United States Patent Application Publication US 2025/0268953 A1 - sequence listing, part 5

SEQ ID NO: 28 - DNA, 333317 bp, Gemmiger formicilis
  source 1..333317: mol_type = genomic DNA
  misc_feature 420: note = n is a, c, g, or t
gttacgcaggatgccgtccaaaaaatgatagagcagattctcaccgttcctgttgacgatgacatcacatttacattcaaaagcattggtgaaatccgggagggtgatgaatatactggataccgcgtagctttgacagccgattttccgcctatggcagttcccttaaagctggacatcactactggcgataaaatcacaccacgcgaaattcaatatgactacaagttgatgctggaagatcgtcatattcaagttatggcatacaatttggccaccattctggcggaaaagctggagactgtaatatctcgcagtgaccagaatacccggccaagagattattatgatgtctatatccttaccaaactgcaagcagaaaatatagactttcccgctttaggggcggcactgatggcnagactgtaatatctcgcagtgaccagaatacccggccaagagattattatgatgtctatatccttaccaaactgcaagcagaaaatatagactttcccgctttaggggcggcactgatggccacagccagtaagcgaggctctgattcgattttgcaagattatagagcaattgtggaagcggtgcgaaacagcgagattatgcgtaggcaatgggataattaccgaaaagatttcgactacgcttccactatcagctttgatgaagtgtgtgatgcagttgcttctacaatggacaccctaataacaaacaatttttttaattaagctatgcagtcggcagactttctgtcggctgttttcttttatctgaaagtgggtgaaaacttgaatcaaaactggatcgtcgaaaatctgaacaacgccttttctacatggaatggaaagctgggcgagttatgggggctggtgacaaccggcccccaaacttttaagggcggcgcagtgtggagcgtgatgcagaccttgcacaatggtatggttggcattggctatgcactggtcgtgctgttctttgctatttcgctatgcaaaaacacaatgaattttcacgagttaaaacgccccgaagctgcaatccattactttctccgctttgtggcggcaaaagcgcttgtgggatacggcatggacattatgctgaatgtgttttccatctgtaatggcatcgtcacagatatggccgacagcatgggaggtatctcagaagctatggtgtcgctgcccgcagaaatgcagaccgctatcgaaaatgtgggatttctcgccagcataccgctatggctcgtaacgattctcggcagcttgttcattacggtgctttcctttgtaatgattcttaccgtgtatggtcgcttcttccgtttgtatatgtacacagcgctggctccgctgccgctggcggcttttgcgggggaaagcacacaatccgtgggcatatcgtttttgaaaagttatgtcggcgtgtgcttagagggtgcggtcattgtgctggcctgtgtgatttactcggcgtttgtcagtacgccgacagtaaccagcggtgaagcgaccactattgtgtggagttatcttgcggaaacagttttcaatatgctcgtattggttggccttatcaaaggctctgaccgaattatccatgaaatgatggggttgtaatatgcaaattccgataaataaagaaatccgccattaccaagaggaaatctttttggggctgaatctgcggcagatgatttgctccggcgcggccattgccgtggcagttgcggtctatttggggctgaccccgctgttgggtcatgaaacggcgggctgggtctgcattgtggccgctgcgccgattgcagcagcaggattttttacttatgactgtctgacctttgaaaaattcctgcttgttgtaatagacagcacaattatccgtaacgactggcggttgtggaaaaccgaaaacaaatattgcaaaaagaaaaaaggtgataaacattgagattaagtgagtacgcatctacgcgaaaaacacgcggcagctataaaatgccccgttccgtgcagcagagcatccccatcgacagaatctatgcagacggtgtttggcaatcggaaaatgtgttcagcttgatgtggcaaattagcgacatcaactacgccatgcagagtgacgcggccaagcagaatattttaacgcagcttggcacggtctacgcgggcctccccgctgactgctggatgcaagtctgcatcgtcagccagcgcatggatgaaaaagcctttgcccgtgatgtgctgtaccaccgcgagaacgacggctttgatgccctccgcgccgagcgtaaccgccaaatcaaggccaacgcccgcgaaaatggaaatgtggtgcagcataagtacatcatcgtgtccacgaacaaacccggcgtaaaagaggcccgcgaacgctttgtacaggtgcaggggcatttgctgtctgcattttccgccttggaatgtgccgtcacgccgctggacaaccgcgcacggctggaggtactgcacaagtttttccgcatttccgaggaggggcgttttaacttcgactttgataattgcgccaaactggggcaggacttccgcgattctatcgccccggactgcatccgcttttgcaaaaagcatattgaaatcgaggatttttatgccaagtgcatgacgatcagcgagtacccgcagcagcttgatgataagtttatctccgcactgcttcagcaagtgccatacattgtgttatcaatcgacattgagccggtggaaaccgaggatgctttcaaagaaattgacaatgcgcagatgaaaaccgacgccgagaaagtccgtttcaataagaaatccgtggaaaatctggacttcacttcctccgtaccgcagcggacgcaggagcaggaccgcatcattgccaacatccgcaaagaaatgacggagaacgaccagcagatgtttttgagcctgctcaccgtcacttactttgctgacacactggaagatctcgcgctggaaaccgatgcactgaaaaccacggcggcaaactataactgccgattcaccgagttgtattttcagcaggaacgcgcctttaacacggccatgccttacggcttgcgccgcatcgagagtgtgcgcacgatgctgacgaaatcgctgacagcacttgtaccgttcaatacccaagaaattctcacaccgggcggcatttgttacggcagaaacgccgtgacaggcaatctcatcatcgggctgcgcactagccttgtcaacggcaatgcaatggttgtcgctacctccggcggcggcaaatccatgtttgttaagttggaaatccttatgctgtacctgcgcttcacaaaagcacgtttctatgtcgtagatcccgaaaatgagtacgcgcccctcgtgcaggaattgggtggcgaggttgtgaatatctcggtggacagcgctacgcactttaatccgctggacttcaaatacgataaggcaacgaaaattcctccccatgttgccaaggcagaatttgtgttgagcctgtgtgagcagataatgggcaaggagcatattctggccggtgataaaagtctgattgacgatgcccttgaaaacatctacaaacccttgatggaatcccactataccgcgccatgcccgactatcaaggacttgtggatggcactgaacaatcagcgcgataaacggtcaaaggaaatcgcgcttgcattgcggattttcgccaccggcagtatgcaagcgttcgcccagcccaccaacgtggacatgagcaaccgccttatctgcttcaacatccagagcttgggggaacagctaaagccagttgctatgctgtccatgttggagtacatcaacaccgccgttatgagcaacgaacgcaacgaccccaaggccgccacatgggtatactttgatgaaatctatctgctgctgcgcgattctttgagcgccaatttcctgtacacaagttggaagcgattcagaaagtacaacgcctacgccaccggcatcacgcaaaatgtgcaggactgccttaccaatgacaccgcctatgccatgctggcaaactccgaatttgtggtcatgctgcgccaaaccaaggacattgacagcgtggtggagttgtacggactgtccgagccgcagcggaaatatttgctgttggcccaacccggtgagggtatcatcaagatgggcaacagccttatcccattcaacaacccccaacccaaggatactaagacttacaaattactcacgactaaacccggtgaaatggagtgaatcctatgagtgaaaatgaaatccgcgtgctgtatgtacagcccggtaagtacccggaagaacgaataatccctaacacgttaagcgcatcacagaaacttgtcggcggcaatattgaatgttgttgcccgtggagagatagcgtctgcattgtctgcaatgattctagaaagattgacgagttaccgcctaaccgtctttacggacatacagactttcttgcaggctcttttttcgtttgtggtagtcgcaggggggattttgtcagcttaaccgataagcagtttgcacactatgaaaagatgtatcatcacccaatcgtctttcttcccacgccgcacggtctactggcaatgaaatgtaccccggagcagtacgagcaattccagcgcgacggcaacaaactaaagatcagacccatcgaccacggggagcgctaacaccatgattctacacagacaaaaagcggggtgccgctcgccgtagaaatcaagaagcacaacttttatataaaataggaggataccaccatgaccgaccccaaatttatgacccctccccaacgtagggcatacttaacccaccttaaccgctgcaaggtgatggataactacccggaatacacacgccagttggacgatgtggtgatcgacgatgcccggaattaaagcaaagcgcaagcagcttgtgcgcaaaacacttatgcgggccaaggcgcagggggaacgcgccgccgagcagcggcaggaatcacccgaagaatacgcacaaaccgaggtgcagcagggcatttacgatgtggctgcccgtacaggcaacaccgccaaaagcaccgcccgcatgagctaccgcaagtttcgtgcaatgcaggagaagcggaaaaatctcaccttgcagggcagcacccaatctgcatcaaagctgattgaaaaagagaaagtcactgttcccacgcaggccgagcgcagggaaatgttcaaaaagcagcgtttccggcaaaaggccatcgcagccaaaacaccagcgccgcaagcccctgtgccgtcatcggccacaccggcatcgctgcgctgccgagtccaaatgcagcagcgcttaaagcggcagcacttgacccgcgaggctgtgcgccgctatctgcaaaagcagacggctgccacagcggcgggcaatgccgctcccatcgttacccacgcacccaagctgcccacaatcagcaataaacaagccacggctgaagtaatcagccgtggcgttcattatatcgcagccaaaatcaaagtcctgctctcacaaaccgtgcggcgcgctgcgcaatcgctgctggccctgcttggcgcgggcggcgtggtgctgttgctggcgatggttataggtgcggctgcggcggtgattggctcaccaatgggcattttgtttgccgatgaatccggcgacccgaacagcatccgcattgccgaaatcgttgcccaaaccaatgccgacttcggcacggcgatcaacgacattgtgtcggcgtacccggagtgcagcgaaaccaccatcacctacgactacgaggacggtcatacatgggcaagctactggcccgaagtgctggccgtctttgccgtgcagaacaacctaaacaacgatggcgatgtggtcgtcattgacgaaagcaagaagcggttgattcaggacaccttttgggcgatgcacgaaatagatgccgaggtagaggaagtaaccgccacgccggaaccgaccgaagacgaacccgacccggagccggtcacggagtacattctgcacatcacggtcagcagcaaatcggtggatgcgctggcggatttataccgctttacgcaggaccagcgggacattttgcaccagctgctatccgaggaaatgcgccccagcctgcttgccctgtgcggtgggattgccgctgccgatggcacgctgtgctggccgctgccggggcatacttatatatcctgccacttcggggaagtggacgccttcggcaacgccgggcatcgcggcacggatattccagcaccggagggcacacccatcctcgccgcccacagcggcacggtactggtcagtggctggaacgacagctacggcaatcaggttctgctggataacggcgcgggcttgtccacgcggtacgcccacatgacgcaaactgccgttaccgcaggggaagcggtaacggcagggcaggttataggttatgtaggcaataccggcgacagcacaggtttccacctgcattttgaggttatgcagaatggtgtgcgtgtgaatcctatggatatggtttgtctgcaagagaagaaacaataagtaatcggttatcctgacaaaagcagccttgaaagtgttttggcactttcaagactgcttcattattgtttatactgtatcatctgtggaaagttgtgcgctttcttttcatggtgatggagagtgcaagcattgcaatgttccatagcaaagatgcaccggaaagaccaacagccgctgtcgcaagcgattttgccgtagcagagtcatttgcttctttgtttgccacagcggaagtgtcgcgtacaagaccggcattgatggtcgtgccatcggtcattgtaagaattaggtagccgtcgttatcaatcatggcgttgtctattccgcgcccggcagtaccatcctgtccatccttgccatcctgaccgttttgtccgtcttgaccatttacaccgttttttccgttaattccattggtgccattttgcccggaagcgccatcggcaccggcatcgcctttttcgccttggacaccctgaatgccttgcttgccttggtcacccttgtcgcccttttctccttggacaccctgaatgccctgggcgccttggtcacccttgtcgcccttttcgccttggacaccctgaatgccttgctcgccttggtcacccttgtcgcccttttcaccttggacaccctgaatgccttgctcgccttggtcacccttgtcgcctttttcgccttgggcacctgtcgctcccatttctccggtagctttcacattgagagattcccaattctgaccattgtcataggaaacataccagaggttatcatcaccgattttgagctgcggtgttcgaccatcgacaccgtttgttccgtctgcgccgtccttgccgtctgcaccatccgttccggcagcctttacgcctgtgtcggtttcaccgatccaccagttgccgttttcgccgatgctgggggtcagaccgtctgcaccgttcgtgccgtttgtaccgtccgttccggcagcttttacgcctgtgtcggtttcaccgatccaccagttgccgttttcgccaatgctgggggtcagaccgtccgcaccgttcgtgccgtctgcaccatccgttccgacagcctttacgcctgtgtcggtttcaccgatccaccagttgccgttttcgccaatgtagggcgtttcaccgtcctcgcctttttcaccatccttaccgtcggtgcctgccgccttaactttcgtatccgtaaagccaatccaccagttgccgttctcaccgatatacggagtttcgccgtccttgcccggctttccgtcgtcaccggccgcttttacgccggtgtcggttcccccgacccaccagttaccattgctaccgatgtaaggcgcttcgtccgcgcgataatgcgcctcgttggaccaaacgctctcataatccttgctgtctaccgttgctacggtcgtcactacataggtgtacttgctattcaggtcaaggtttttgatctcatattccgttgctccggcagacagcttttcggatacttttgtatatgtaccgctttcgtccttgctgtaaacatagtagccagtaatctccggatgaccgttttcgcagtccggctttgtccaagaaagcttcaggtcaaagatgccttcgccgcgggttattgtcttgtccaaattgtcgatggctcgcggcggagaggaaagattggtaacactgtagccgataaagggtgtcttgttgttcgctgcaccactcaggtggcgctgccactgccccagcgtccaatggaatcgataggcgtctacaacaggcgcgggaattccttccgccacaaggctctgcttgtccagactggtgacggtgcagctcgctcccaccgcagtgcctttggaggtggaatttcccttgccatcgctatattcaaggcttgtggtgacaccgtgcattcctaccttatcactgccccattttatggagctgttgaagaaaaacccgtgggacatttctacgctttttgtggtggtgttttccttcgtccatgccaccttatccagcgttccgttatagcccaaagcaaactccgatttgctgatggcggaagcctgaatatccggattcaaagcgccccagccatcatggttatagcggtaggggtcgccctcgttgccgtccatccagttggcagcgggatcgatctgccccaacaggtagcaggtcggtttgtctttgcggtcggccatgtacttgttatactctgtggcaaacttgttgtaggcatccaccgaaagctgctcatacacaggtccctgcggaatggcagtctgcatgacagttttatcgttccatgtgccgtccgctttctgtatgtcatattcgtagacgaacaccggtgtacggctgacaacaacactgttgtaggcttgtgcggaaaagctctgactccactcctcgtgcagagaacgctcgaaggacttcgtccagtccagtgcataacctgtttcaatggatgcctttccgccgaggaagttgaattcggtgctgtagcctatactgaaggacacgctgtcagagtcccagtcagacagctcatagctttccgtcaggacatactctgtttcgttattgcccgcatccattacctcatcaaaatagggcgccgcctgcaagaccgccttgacatccgggtccgtgtaggcgtaggttacaccccggtatttggcaaggacaccgtcgttgttcttgtccacggggataaccagaaagctgaccgcattctgggcattggtgttcacatagctgtccgtaggaacaaggcagtcatatccgccggctgttccgtactcctttatttcgccgtttaccgttgtatccttatagtttttgccccgcatatagcctgtcagcaggtgggactcgttgttatttgcgtgcttgagggcaattgtaaacaccacctgttcccgcccggcagtgtttccgtcaaagttgcccacggcaatggactgaatatcacagttggagattcgggtggtgccgcctgcaccgtcatcggcactcttgaagtaatcgccggtatataccgccacaggcttattgttgctggcatcatagagcgtgccgctgaggaacaccagctcctttgcgccgcgccccttgccgttgatcgcaacagactccacagccaactgttgccatacatcatcggcatcatggtagccgccgtctgtccagccgttggactctatggtttgattggtagtcttaacaaaaccgtttcccgaattgctaagtttcccaatatagagatacccagccttcatgtcgatggtttcgttcacctgctggttgttttttttccatgttcccagttgccccagcatacctgcgaggaacagatccacatcaccatcgccgtcaaaatctccgcaggtcaaagaggctcccacaggaaattcatagcgatcacgcccgccgcttcgtcccttgctggtgtagaactcctcgctctgtgccgcggatttggtcacgatggagctggtatccccctttgtaccgtagacgatcttgaccaccggacggtagtagtcgatctgggcctcgtctttgggcagccggtgacagtaggacagcaccgccagatcgtccacacagtcgccgttgaagtcccccacggccatggagacacccagcttgcgccgctggtttccctccgatctctccacatcataccagggatggtcgttataatagcccatcaacagactgttactcttgccgcgtggggaaaggttgtcaccgtcataatcccactgctgaatctggcagcctccggcattgtaggactccggggtatagaccacgatgctttccttgccatcaccgtcaaagtcaccggccacgatattgaggaagctgcggttggagtaggtcggaaccttaaaagcgcttgcatcaaacatatagctgaagtcgccaatcgctaccagctggctgcggtctgaatccgttccttttgtggtgtcaatgacccacatatagccctttttatcctgcccggaaacacctacaaaggcaacatgatcccggcgaccactgccggtagggtcaaaggacaccgcctgcatcagcttgtagttggggttagaaaaagtaccgctactgcctgatttgttctttgcgaaggtattcagcgccgattctgatcccatagaaaaataggatgcctgccgaaccttattgtcccaggcgttcagatacatcagctcgttctgttctaccatcagaaacggctcgccaatgtcatagccgtaagggttggtggtcgtcgtatagccgctgggctgtacgttttccagattcatcagatttgtacccgaaaaatccgggtcttgcgtcgtgtcctccgcaaagattgacagtggaaagcaagccgccatcaaaataaccgacagcagtatggcaaaccctcgctcgaatatagatcttttgtccatcttgtaatcctcccgttgcattttcatagaccgcaatggcaacttactataatctattttactatattattcgtcttttttctgtgtcgtttaggggcaaaatcgtgtcgtttagcaggaagccgcgcttctctgcttgtgcgcgttctgtgtttttgctacaattaaggcaacaaggaggtgggacggtgaacacccaaaaaagaaatctctgcgctgccggagtgctgctgaccgcagcggcaacaatggtcgtgctatttttgtttcgtctgtcgcaaccggacaaagcgcaacaatccatctttctgaattgcacggcatcagatcggggtggctggacattttacaccgaagccgggcaaaccgaacctgtgttcggttttggtggctacatcgacggcgtaccggcggaaggcgccggtcctgttgtagcggagcgcatcatggaggaaccaggcgaacgatgctttttgcagtttagctgcgtcaatgcgggtctgcaggtgtttttggaggatatacttctctacacggattttccgcagcaagaaaaccgcgtcgatgtatttttgcagaatgcagattttgccggcattaactacaacgggctttgcatcccgctgccgctagactgcgcggggaaagcacttcgcattgtcacctacgggccgtccctaaacgggctgcgcgtacctgtgtttccctcacaggcaagccgtttttccgatgccgtggtgcagaccaccggcgttgtttggtgtatgaccgccgtgacggtaaggcttatgttggcgctaagcctgcttttggtgctggtgcttggtgctcaggccggacagccgctgtggaagctattgcccttgagtggatactttttattggcggcagtgtcaggcgtttgcaacacctttctggaaagtgcttcggggctgaatgccgacagtggtctgctgaactgggtctacctgatccacatggactttctgtacatttacttggcagccgaacttcggggcaaaaaacgttggggcttggctgccacagccctgctgcatattctgcttactgccttgcagagttttgcggcggtgccgcttctcatcgaaaaagtcggtgactggctcggtttctctttattggtcgtagcgattgttctgatgctgttctcgcacgaagaaatgcagcgcagaatcagttggtgcctgtgtgcggttgcggcctttctgtttttgatttggggtgtcacccgttatgtcggcgtagaagtactctatccgttcagcaacccggtaacatccatgctgggcggatatccgcacgcattttatgcgctgctgtgcaatgttgccggcctgctgtgcgctgtacaggtagtcgttgaatttgtgcgcagtatgctgcttcgtcaacggcaaatgcagatgatggaaatcagcagccagacagcacaagagaaatacgagcaggcgcaggcatcggttcgccagacggcatcgtttcgccatgaatggaaaaaccacattgccgccctgcacctgttggcacagaggcaggatcagacggagcttcggaactatctagaccgattggacggggagttggaacagctttcgccccggaattttactgccaacccgacagtcaacacgatttttcagcgtttcgcggcacaggcgaagaaaaaggatgtcaccttccgcgtaagtgcggttctgccggaaatgctgcaaatcagagaggatgacctgtgcagccttcttttcaatatgttggacaacgctttggaggcagccgcgcagacagagcagggagaaattctctgctcgatgcagattcgccggcagtatcttgccatccgctgcgaaaacacctacagcggaaccctgcgcaccgatgaaaacggagaactcttgacgaccaaggacgatgcttccgaccacggctttggcttgatgaaaatgcgtgctattgcaaaaaagtatggtagcgtactggacatcagctatgacgaaaaccgatttacggttatgacagctctgaagctcttgccggaaaagaaaaatcagtaaacgataaggcgcgaaaatgcggcatcttccaaacgggagatgccgcatttttcactggtaaaatcaaatgtattcagttttggttgaggtatcggacaaattgattctgaaaatgctccatatatcgccgcccaatggcaaggtcgctgccatccgtcaggtacagagtccgaccgccctcttcgcaaatgtgggaaagatttacgagaaagctgttgtggcagcggcaaaaaagtgaaccgggaagaattccctccgtttggctcagcgacagcggcaaaaatttctcgccatgtgtcatatgaagaaccgtgccgtgttcccggctctcggcatagtaaatatcctctgtcggtataacaagcgtcttgccgcccgcatgaaaggtcactgtggaagggcggtggtacaaccgcagatcggttgtaattgcctgttccagctcagccgcctgaaccggcttgagcaggtactggatagggcggacgctgtagccgtccttgagaaattccgtagagcttgtgataaacaggatgctggttttgtcgtcgcgctgccgcagttcctgcgccagtttcatgccgctttttccgcccatcagaatatccagacaaagcagcgaaaattcttctcctgccaagagcgcattttccagtttttcggcagatgaaaatgatgtgattctgtgttcgaccttcagcttgtccagaatagattcgcactgtgcgcacaggtttgcacatagaattgcttcgtcttcacagactgccaccctatacaatgcgctcaccatccttttgcttgttaaaagtattgtagcaaatatcctgcttttttgcaacagacgctgtaaatgcacgaaatttgcgccgaggtggaggaggtgaccgtcacaccggaaccaaccgaggacgaacccgacccggagccggttacggagtacattctgcacatcacggtcagcagcaaatcggtggacgcgctggcagacctgtatcgctttacgcaagaccagcgggacattttgcaccagctgctatccgaggaaatgcgtcccagcctgcttgctctgtgcggtgggattgccgttgccgatggcacactgtgctggccgctgccggggcacacttatatatcctgccacttcggggaagtggacgccttcggcaatgccgggcatcgcggcacggatattcccgcgccggaaggcacacccatcttagctgcccacagcggcacggtgcttgtcagcggctggaacgacagctacggcaaccaagtgctgctcgacagcggcacagggctttccacccggtatgcccacatgaccgcgtttatcgtcacgtccggtcaaaccgtgaccgcaggacaaaccctcggatatgtcggcagcaccggcgacagcactggcaaccacttgcactttgaggtaatgctgaatggaggattgacggacccgatgctcttattttgattttgcattgatcaggctttcttcgtcacataccccttgcgcatgacggaggtgatttcgatttgcgtgccgagcttgcggcgcagcttggcgatgtgcatatcaaccgtgcgggtgtgaacgggcgcggtgatgccccagacctgcgccagcagctcggggcgggtggtgatgcgaccggcgttgtcaagcaaatacagcagcagggcaagctcggtctgcgtcaggtacacggctttgccgttttgcgatacctgccgtgcagttgcatcgatttgtaaattactgttgctcatcaaaatcaatcttggtttctttgtaagattcagcaggaaaagtttccgtcaacacgcaggggcagcgttaacagcccctgccaaaattacagcccctccaaattgacgcccgcccactcgtaggcttccgtcaaatcgtcgccgatggcccacgcaagcgccgcggctgcaaccaccaaaaatatcggcacccacatcaggttgtacggcgcaccggcggcgttggtgccctgcgtttggcacagcgcggcggcgtggaacagcgggtaaaagcccagccactcgatgccgttgctcatgcccgaaagcgtcagcagcgcgggtaggcagtagccgactgccgagacgaacagcgccgccaacaggctgcccaatttttgccccaaccacagcgtcagccgcgccatgcacaggcaggcggcaaagcggcagagcagccaaaagagcagcaaatccgataaagtcacaaatttcgggacagcctgcaactcggcaatgctcatcgccggggccagcagcgcgggcagaccgtaatcgcgcagcacctgccacagatgcggcagcaccgtgcctgccgcaatcacgattgccgccaaattgctttgccgcagtttggcgcgcacggtggcgcggcggcccaacggcgtggcgcgcagaacggtctccatgccgcccttgcgctccatggcaaacagaccgctgaagcacagcgcgcacagcagccccgcccacagcgtgtcctgcacgtcagcggtaccgctgaagccgaacagctttttatagccgctctcgtacaccagccacgcgccggggtgctctttcagatagtagttgatgttgttctgcacgacctgttggtaaatgttgtatttttgctgtaatgcgccgtaggccagcatcgcctcgctgctcagctcgccgcgcgccacgcgccgctgtacggccagcatcggggcaaactcctcgccctgtgcagtcaaccagtcgcggctctccgccgtccacgggccggagatatgcttcatgtagtaggcataataaatttcgtcggcatcaatatagctttcgcttgtcacgccctgatacacgccgaacgccagaaaggccgcaagaaacactgctgcgccgttcagcacaaacagcttgcggccctcttcctttataatagaggtcgctttcgtcctgcgcgtcagccccaacacaaggccgcgcttggcggcgggcagcagctgcgcgcgggcgaacaccgtgcagaacgccgctgcgaacagcacgccgtagcacaccgccgccgtccactcgacgaacggcagcccgatcggtgtgccaaaccagaacaggttgcgatagttgccgagcagttcgttggtctgcagcaggctgacgaggttcgcgtatttaaccacgttgaggtggctcgtggccggaatagccgcgcgcacgccgtacatcgccaacggcagcgccaacgcgccgatccagcccgcggcggcgcggcgcgcggtcagcgcggccagcatgacccaaaggcccatcacgaacgccccgacccacttggccagcaaaaaccgcagcagatactgcccgaccgtaatctgcatcgtgcagcgcatcagggcgggaacactttgaatggtgcgattcagcgagcctaaaccgaaggacgccgagcaataggcaaggttgaccccatacagcaccgtaagaacgaccaataagctggcagcaaatgccgccagcttagcaagggctgttttcaaccgtccgcccggcaggctgcgcacaaggctcagcagtccgctgtcgcgctcctgccgcacaaggatcagcgccagcaagagcatagatgccagcaaaatcaggtcggtaaaggcgtaggagattgccgtgtacagccccttttgcgggtaatagtcgatctcggtcgcagtcagccccgcatacaccttggccgtggcttcgatgttctttaagtcgtagcccgttttgtcgttttgaaaaatcgagatgcccgccagctgcgtcgccttggtctgcacgccgtccagaaaatcggtgtaggcggccacggtatcgtactcattctgcagctgattgaacaggcgatattcggtgttcaggtcgtcggtgaacagtgtatagcttttgtccttgtattcctgctcgtaggcgtcgaacatcgcagcgttctcgtcgcggtaggcttgcaggtagctgctgccggcgtaggccatatcgcggtagaagccgccgatcttgacaaggctctcaatctcggtatatttcccgtgcaggtacgcgcccttttcttccattgtcaggccgtcgagctgcgcgccgacggcgcggtagaccgcggcggacggctgccccgtggtggggcgggtgcccatccagagcagcagcagattggcggcggccagcacggccagcaaaagcgggaacagccggttgccccataccttgcggagttcagcaaaaaacagactcatttgccgtccccctcgccgaacacgttcagatacacgtcctccagtccaccgcccggggcgtaggctgcgatcaggtcgggcacaggcgcagcgtccacaatcttgcccgcgcgcagcaaaattactttggtagccacgctctcgacgtccgagacgacgtgcgtcgctaccagaatgatgcggtcctgcgccatgccggccagcagcgtgcgcaggcgaacgcgctccttggggtcaagacccgccgtcggttcgtccaaaatcagcagcttggggtcgcccagcagggcagcggccaacaaaaggcgctgcttcatgccgccgctgtacgccgaaagccgtttgtcgagctcatcagtcaggttgacggccgcggctacgcgagccacctcgccgggcacggcggcgcgcgggatttccttcagcgcggccatgtaagccaaaaagcggcggcctgtgtagctttcatatagcccctgctgctgcggcatatagccgagcacgcggcggaacgcgatgccccgcgcagggcggccgcaccaaagcacttcgccggaatccgccgccagcccgccggtgataatgccgatcagcgtgcttttccccgcgccgttcggccccaaaagaccatacagacccgggccgagggtgagcgacaccccagccagagcctgtttggttttcggtttgccctgcccgcggcggtgcagcagcggggcgggcagcagataggttttgcgcagattgttcaattccagttgcatggcagatgtacgctttcttttgtgcaggatggtgaagctttgcccgcatggtaccaccgggttgttacggatttgttacaagggggcggagatgcccaaacaattgtgcaattcggtgcgttattccatttaatcgacccattggacggtgcgagaagcgtaactatctgaacaaaattcatccttggggatcagctcgtaggtgtagcggctgttttgcaccgttatactggtgccgtcgccctgcggcatttcggcgtccacatagttgaccgcagtgatggcgagataatccgtcgggctttcggcgatgatctgcgcggaaagggtatcttttccgtcagattgtgtgtactgaatcgaggaactgtttatttcctgtgtgttgacatctaccagaatattaaagcacaactttgtttgcgtgtcgcagcagggaataatataggtggttccgatcaaattggggccgcgccccacatacgcttgaacattctccggcataaccgcactaagacttatggaagattgtaaagtcccatttgcatcatatgcgtcaattttccgcgtacttcccaagtggcataggtagatgtgctcgcccgaaataaacggctgtacaggcaacgtgccatcttgaggaatgtccataacgtctatcatttcatcggtatcgacatttaatgcctttatggtatagcgcagtccatagctgccatactcgtctgtgacgttttcgtcggtgcttatattcaaaaaatagatgttacgcccaatgcagcccataacttgcgcagaaacatcgattgggaacgttgacaaaacgtgctcgtccccgccgctcgtggaaatactgaaaatctcataattgcttatggtttgacgcatgaagcatagggtgttatcccagccgaccgcatacatcagcaaatccccagagctgttcccctgatagataagtttacggttactgccgtctttatccatactataaaccgccgatgcagccaaatcaccaaaatcactgctttcgatgtaagaagacgcaccggcgcgtatataatatattttctcgccccacagaaacatacggtaatccccaatgatagaatccaaataggaggtatctgcttctgttgtatgctcactgttggcctgcgcggacaagggaatattgacggccgaagcgtaatcaatatagcggatctgcccggtcagatagtcgttctgattgggttcaatataataatagccgtcatctgtttgtgcgccagcagcataatcaatggtatttggaataagcatttgaatattctctgctggatcggttgtgcccttttcagcatcaattggcactacaggactttgttcgggaacatcattgcttcctttggcaactgtgggtgtggcactgcatgccgaacatgtaagcaaagtgattccacacagaacagacgatatatagcaatatatttttttcatttaagacacctctgagtgaaaaaggctgggagaaacctaaagaagtctcccagtctttttatcaaacacaaccgttgcaggttaaaagatgtaccttgttatctcttgtgtaagcaagtggttaattagttgcggcccaaccccaagaactttgagatgacgaccagtaaacattggcattggcggccaaagaggcaaaggttaaatagtagcttggccagtcccgcaagtttatggtatggctggttactctaaagttcacaatgcaatcgctttttccatcggtcgtgtttccgacataactatgcagttggcagttgttcgtgccatggtaaatgttcaaaccttgggtattagacagagcggacacaacgtaaaatccaccatagctgttagcaatcgttttccaaacctggtcgttaccatttgttggagtgtagagcgtaacgttgtcattctcgttgccatagccgcgtacgttaaggagaaaggtggtttttccgttcgggtaaattttgtatctgccggagcttacggttgggtttccaatggcaaacgccggaacggccatcatcatagccataacgcaggcgattgcaagggtgagaaaacgcttgctgagtttcttcataatcgattcctccaatctgaaagaaacttgtatcgggtttgtttcggggcggatattcaaaacgcctgtgcaccggcatttcgatgggatcttgcgggatgcaccgcatcctcttggctcacccacattctatcacgcgccgacaaaaatttccaataaaccggcgaaactgcaaaaattcgtgcgcaactgcaaaaaagaccgggcgcgtgaaagcgtccggtctttgccgtatcgtcagggcattatttcaaaaactgtgcgaccagcttaaacaccagctcctgctgttccggcgttggggtgcttttgggattgccccagcggcttttgttctgctggcgcagcgcacgggtaagctcggtcatcaaattgatctgctcgtcggtcagaccgtcaaccgaaacgaccgcggctttctcgccacaggcaagataatcgattgaaacaccgaagcaatccgccatgcaggcggcggtctgcaaattgggataggtgcgcccgttctcgtatttggcgatggatgcttcgcccagcttttggcctgcatcggtgatttttttcgccagcgtcgcttgagagtaccctttttctatgcgcagacgtttgagcctgcctgcaaaatcgatcatcatctgcgtcaacctcctactgcttatagtgtatcggttgacatcggacaaatattcagataatatgatttataacatcatatttgtccgcaacggggcaatttggcttgacaacgaaagagggtcgcgttattttggatacaatttcaagcgttaaaaatctaacgacgaaagccggtgacggtatgctgcacattctactgtgtgacgatgacgcgatatttaccgaaacactgaaacgactgatcgaagcacagccggagtttaaccgccgttatatgcagatcgagtgtgtccatgacccccacgcgctgaaaaaggcagccgtgcaaaaggccgacatgatttttctggacattgatatgggcgatgtgaacggcattgcgctggcgcggcagatgcgcacgatccgcaaggacgcggtgctgatctttgtgacaaattacggcgaatatgccgccgagggatacgaggtaagcgcgttccgctttttgcccaagctgcagctggccgaaaaactgccgggctattttcggcaggcgctggcagcctgccgcagccgtacccgcacgctgaatgttctgtgcgacggcgagggtacgaacatcgtgctcgacgagctggtctacgtcgaaaccgaggaacggatgctgatttttcatcgtgcagaaccggcggcaccgctgaaaagccgcatgagcctgcgcacactggaagagaaactggcagaggatggttttttgcgcatccacaacagcttcttgatcaatatgagctatattgctgccctgcaaacaagcggcgttacgttgaccaccgaccagacgcttcccgtcagcctgcacgggtataagacgatcaaaacaaaatacatggcatggagagggcgcggctgatgggatatgcgttgagtattttgatgtgtgccctgcagacatggctatacacaaaactgtgggacagcttttttacaagacggttcagtgggaaagcgttctgggcgtatttggtaatatggactgccgccattactgtgtctgtaaatattctgccgaatgattttcgatatagttatgcagttgattttgtaatggaacttgcccttttttatggaatgtgtttgacgctgtactgcggccgctgggataggcgtttgtttgtagtaatcacgggctatgcctgcttcttttctatatcaacactgaccgaaaaggcatggctactttattcgggtatgacgcagacggagtatgtatataataagccgttgtacaccacgtttctctttttgcggtggctgtgccttgtggcatttgttatgctggttcggcattttcacacaccgccgcaagaaaacgaaaagccgcgcgcatggatacctgcatcagcactgttcccactgtgtacattgtttgtgctttaccgggtgtacaacgcaggaagtgccgcaggtgaaaatgacgcatggacgttttgcctgcttgtgatgtgcgcggttgatatggtcgcgctgtttctgctggatcggctggaatccaccgcgcaaatgcgcgaagcgctggccgttgcgcaccagcgcgccgaggtgcagagcgccaacgtcaaggcattgagcaattcctacacggcacagcgcaaaatgacgcacgagttccgcggctatctgtttgcactctcggatatgctggccaacggcgatacagtggccgcgcagacctatcttgacgaattgaaggtgcgccagaccgagcgcatcctgctggtgaatacgcacaatccgatcatcgacgcgattctcaatcaaaagggctatgcggccaaagaacaggacatcgatctgcatttcgagatcaacgacctttccgacgtggcgatcccgtcggtcgatctgacggtcatgatgagtaatttgttggacaacgccatcgaagcctgcgaaaagctggaaaagcaagagcgccgcatgaccgtaaaggcgatttataacaaaagcgataacccgccgacgctgtttttctcggtcgaaaatgccagcaagccggtcaagattttcggcgaccatatccccaccaccaagccagaaccggagcaacacggctttggtctgccgaatgtgatggatatcctgcacaaatatgacgttttttatttgatggattataaagacggctctttcttattctgccttgaatgggcggatgccgccaacgaaaaagccgttgctgctgcacaaaaataggcaaaacttgcagttgcgcacggaattttgcagttttgccgtttttctggactttgcggacaaatcggtttatcgtattcagcaagggggcgcacagcatggaacaccttgccgaaacgatgaccgatttttttcttcagcacaagtatatcactgaggaacaaaccgagtggtgccgttatatgctggtcaaaaatatgatgagcattgcctcgcttgtgctgttgctgcccttggggacgttgattgtcggttggggcggtgtactgttttacacgtttgtttttcgctttctgcgggaacgtaccggcggctaccacgccaaaacgccgcacggctgcctgcttagttccgtctgctgccagtctgtgatgctgtttttatcgacgcggatgccggacccagttgtttcggcgtttgtcgcgggatttgcctgcctgtcgattgcgctgttcggccccgccaaccacccggaactgcacctgagcgcggaagaactgaaagcgcttcagccgcgcatttacattcggctgctgattgtggccgcgcttacggcggttcttttatttgtccgccccgattggggagcctgcacggcgttcgccgtttttgcagtcgcgctgttgcttggaatttcattgcgaggctatggtgcacaatagctttataataaccgaaccctgtgatcaaaaaaggagaaaaactatgaatgcaaaagaatccctgccccatgcactgggccgcaagacccttgatgctatgattcgccgcgagtatggcggctggccgcccaatacgcctagtggtctttaccagccccaccgcccggagaaaaagcctgcggcagcccaaccccagacccccagcaagtgaccccatcttagcagctgcgccatcgcctccacgtttccgaacacaaaatgagccttgaccttggcaaaagcggcagctatatgcgcagtatttcaatcggcaaggcattgccctcaatgcacgaatttctgcgcatctgtgaatacctcggcgtaaccccgcaggaattctttaccggtgccggggatgaaaccgaccgtatcaacatttttaaccgactgcaagacctcgatgacggtgacatacagaaattgcagacattccttggttggatggaagaaaagtaaatccgctttctgcccgacaagtttttgcttgccgggctttttctttttgtggaacatatttagttgaaaggcgtattgcatggcagatgtgcttgacgctccggtaagcggagccatgccgtattaaggcagaaaccccgtcaagcgcaactgcgtcctttcaaaagtcccttcgccgcgtagtttttcttgtattattcgtatgccagatggtttttataaccatctgacgtatttttttgcttcttttttgctttggcggcagaggactgccgttttctgcccgcgcccctccgagttttgaggtctattcaatgaaactcaaaattcaggaggttattatgtctcgatataaagattcaaataagtacaaaatctacggtgaggacgccattctggcggcaaggttcgataaatatctggatgcgacattacgtaattgccgcgcagattacttgaaggccctgagtaaaaggaaacagcgggaaattccttacgaggacttgccagatgccgaaaaggaaactgtgcaagagagcagcgcagcagacgatgaaattgaatccctgctgttttgggaggcactgaaaacacatctgcaccttctaaatccaaaagagtgtgaggttatgattggactgtatgttaagcggttttctgccaagaaaattgccgcgcagatgggtgttgaacctgctacggttacttattataagaaatgtgcgatcaataaaatccgcgatgaagttatggaggattactaatgggaacacttcgtgatttgcttaattcagccaagcataataattctgaggcagtgatggaactgtacaagcgatgccagccaaccatcaaaaagtacagctacgtcaacggaaaatttgatgaggacttgtaccagaaccttgtgattgcgtttcttggcgtaattgaaaaattcaaataacggaaagcggggcttcggccccgcttttcctcttgttcgtaacctaacagatacaaaaaacacaaaaagcatgtgcaacaaaagtccgttagaatacgaatcttaggaggttgttgcacatgcttttgcttttgataaaaaagtacttgaattggttttaaaatgatatggagtaagaatttccgtaaaaagctatttagtggagtgatgtcgttgtgacaagcccctactagctttcacgttgttctttctgataggtggttggcgatacaccatagtattttttgaaaacggaaataaaatgttttgtggatacaaatcctagtttttcgccgatttcgtatattttggtttcgggtgaatccttcaggtaagcggctgcacgttccatgcggatctgcataaggtatttgctatacgagattcctagctgcttatggaaaagattacttaaatagctgctgtttacgttgcagtaatcagccacttcggacaaggagatactttcacagaagtgctggttaatatactcttttgccatttttatgacgggcatcgtatcctgcgtaattgtctgctcttttcccaaaaggcaaaaaacacactgatatacagcgtgagaaaagttggcatcagaaacgccaccagcacaagaagtacaaaagtccgtcagttctttccaagcggatgtcaaaagtgtatcctcaataagaaaacagtcagtaatactctgaatcatataacagcccatttcccaaagtgctgcggaattcttgtgcggaaccagactgcacaactggtcaatatctgtacgcagagttgtttcttgggaagcagcaaaatcagaaagcacctttttatttgccttttcaaattcgatgatctgctgctgatattcgcttagtagggcgtaagaatgtagctcgttcgatgtgaacagcggcaacgagcgcaaaccggcaatacttgcaagggaataggataaatccatactgtcatccactatgcgtccggcaaataaatttgcatcctgcgcaaagcggaacgatgccgaaaagtcactctgaaattcatggagatttgcaataagagctgctttggtctcgccttcagccacaatataagtgtcaccattatttccgaagaaaggtgtccagttgtattttttacacaaagaaacagccgcgagattctgacgataattgcgagagtgtgcctccgtaggaagaacggcattgtcgcgggcaataggtagcaatgccgcttgtatgacacaagcatacggaagcataggatcggtgtccgtgctggaaaagactttataaccctgatagattccgtcgctgtcatcctccagtatggcacggaacagcattgcgcgagggttggcgcgttcttcctcggtgggattggcgagcagtgtgggcgtatgtttttgcaggcgcttgctgatgtcgttcagcagtttgatgagatcatcatcaaccaatggcttcaaaagataatcctttacgccatactggatagcttttctggcataagcaaaatcgttgaaaccagaaatgatgatgacaacggtgtcaggataattttcttggatgaacttcgcaaggtttaacccgtccatgccgggcatcttaatgtctgtgataacaacatcgtaagcagcctgtttcaaatattcgattgcttcaattccatcctgcgctgtgttaggaacgtcaaagcacgttgaatgtttggggatactttttgaaagccacgttcgcatgagtggctcgtcatcaacaacaaggatatggttcattgagttacctcattctttgtaaagggaaggctgatagagacagttgtaccactgtcagaggaaagaatgtccagcgaggcagagtttccatattttaaccgcagccgtttggcaatattgactaagccgatgttgcctacatgagccggttcagtttcatcgtggctgggggtactgatacgttgctgcaaagactccagcgtctccggcttaatgccaggaccgttatcagacacttggatagagtaacggtcctgacttacacaggaaacgatgtggattacagtttgcccgcgattttgttcgcaggcgtatttgattgcgttttcaatcaagggctgtatggtaagtgatgggatttgttcgctatatagttcggcagaaacagaaatgtcatattgcaatcgatcctgatagcgtagttgtacgagttttaagtacgcttggcaaatgtcaagctccttttgcaacgaaatgtccttggaaacattcataacgccgcctaaaaatgcagaaaaggactcgatggctctaattgcagtatcatattcttcacatttgatgaggaggctgattgtgttcagggtgttatacaagaaatgcgggcgaatttggctgcacaaagaattgtactgcgcttcttttgctagatattgcgcctgatagatttcttttgccaattgtgcatttcgatcaatgacattttgcaatgcctctgtcatttggttgaaggattcagccaagtagccgatttcatcgtttgttgtgacatgagcttttacggttagatcgccgtcctcaacatggtgcatgagggcaacgatctcaaacagctgctgtgtgaatttctgaatgatgatgtagaagccaatatcagcaagcataatgcagaatatcgccagtgcaatgctcttcataagattggagcgcagcggagccatcaatgtgcggtaagagtgcaacgccacaatgttaatgctgtaattggagagcgacagcacatttaccagatatttttggccattcagtgtaatggttccggattgctcgattttattttcatcggccattgcgtcttccaaaccgctgggaataggcgcagagcgatacaacacctgattctgcgagtttacaattaaaagcagacctcctgcatttagattgattttattgcaaattttactgataccggaataatccgcatcgacttttacaacgccgatggttttgctgttatcgtttttgctcctgagctggcgaacgactgaaaatacggtggttgacttttcaccgtacactctttccatgtgcggctcaataaacaaaggtttggtggtttcttttgcttcgttataccaagagctttcagcataagtggcaaggtctggcatgtcgttcggggtgcgcgtatagctgtaaagcgaatcatcgtttgctatgtatacacgaagaatttcacttcgcggaagagtcataaccgaggaaagaaatccttctacgatgcgcttggaatttagtttgtcgcgggaatccgttggtgaatactctagttgagaaagaacttcatcattataataaggggtgagcgtaaggcgatacaactcgtccatataagtactgacgttggttccggcctgctctattgtttgttgggtttgggcaatcgtctgttcttgtaattgttgtgcattccaacggtaggtaaggtaagtaatcgccaaaatgacggcgaggtttacaatactgatggcaatgaccaaccgggtcttaaaagattttttcgatttgtaaggggtcaatttcggcaccctccttccataataattataaactcatgaggacataatgtgcaatgggaaaagccaaattcccaaaaaagagaaacctttatctaaaattttgggtatttattacaattacgactgtggtacaatagagacataaggaaggcgcgcttccaaatgatttttcgaatttcaaaccgatcaatttgaaattcaaatcacataaggaaggaagaatactatgaaacttcgtaagttcgctgcaatgacgatggcagtggcaatgctcggcggcacgttggctggttgcggcggcgcagccagcagcacggcatccagcagtgcagattctaccccagctgaaagcacctctacggcagaaagcaccgaaacctccggtgaaaaagtaaatatcaagctctttaccggcaaaatcgaaactatcgatgtgatgaacgaaatcatcgatgagttcaacgcttctcaggatcatatcgttgttgagcaagaatatcagaaagatgccagcaacgtcatcaagatcaaattcgcctccaacgaagtacctgacattatgaccacctacgaacagggctttgtcgatgaaggcaagtacatggacatctcggacttgaacgagttctgggatcgtatgtccccggatatgaaggccgcttgcacggatgtaagctctggcaatgtctatcgtatctgcacgaacatgacgatggccggtttcttctacaacaaggatattttgagcgaagctggttataccgagttcccgaccgaatgggcagactttgaaaccatgctggagaccatcaaggagaaagaacctgatgttactccgtggttcatcttcggtagtgaggcttggcaccttggccacctgattgagttcctgcctcatggttatatcaagtccacgctgggcgctgttgacgccaagaaggctttcttggccaacgatcaggacaagctccagtttgcagcagcagatggtccgatggctgtttttggtgaggatctggtcgatctccagaataagggtctcatcaacgctgacgtgctgactgccacgaacgacaactgcgtacaggacttcgcaaacggcaaggccgccatgttcagcaatggtatgtgggcgctgtccagcgttcttgaagccaaccccgatatggcagataagatcggtttcgcaccgtatcccgcttatatgcccaactccaagcctgttgttctgagcgctgaagattccggctactgcatttctgcaacgaccgagcacaaagaagagtgcatcgagttcctgaacttcctgttcagccctgaaaatcagaagaagtacagcgaagttgccaaggctcccagcgcatttaccgatgttgatgctgagtgggcacctgaaaacgtcgtgaatgaagtcaatgctgccctgaagagcgctgccaatatcggcttcaccaatgagaagcccgccggtttctctggtgacgatgcaggccgtatggtgcaggaactgctggctggccagtatactcctaccgagtttgccgaggcttatgaaaaagcttggacggatggtatggcatcttaaaacgactcttttctccttctaagtcgtgcgtatcaaatctcaataggtgacatacaagcagaggcgcaccgcataattcacggtgcgcctcttacttgtaaatgcaggtgtattacatgaaaaatagaaaaatcggtctacatacatttatggctgtgcccgcttttgctttgtattgccttttctttatttatccgttgacaaaaggcattggcatgagcctgacaaactggaatggctacgggcaagctgaatttataggcctgaaaaactttgttgactttttcaaggatagccgtgctatttcggatataaagacgaccgttctgttcgcgttaggcagtgcgccgctacttaatattgtcggcttgctgtatgctcttctgatgaacagtaagttcaaaggaaaatccgttgcaagagcctgcatttatatgcccgctatcatcagccccctgattatgggttatatttggtatctgcttctccagccggggcgcggcgtcattttcaatttgctgaatcagatggggcatcccgaatggttccccaactggatgagcagctatacctcagaaatcgttgtgcttgttctcgtgaatgtttggcagtatgctggcatgacgatgattatctatttggcaggcttgcagaacatctcgcaggatttgtacgatgcagcaatgattgatggtgctactggctggcagagcttccgttttattacgttgccgctgctggttccttccattcgtatcaatgtggttaccaacatcatcggttcgctctccgtgttcgacattgtaatgtcgctgacgagtggcggtcccggttatcagacggaaacattaagtatttacattatgcgtatgtgctacggcagcaaaacaggctattctacggcagttgccatgattatgttcttgatcgttctgattcctgttttgatttcgctgcgcctgacacgcacgagagattgataactggtggtgactaaaatgaaatcgaaagcaactttcccgcgctatttggcgattattctgatttgtctgctctgcctttgcccattcgtagtgctgctgattttgtctctgaacgaacccggcagcaacatgtacgatggcaatgttctgatcccggatttctatttcggaaactatgcagaggggtgggctaaatccaatattggtcgagccatgatcaactctggtattattaccttgaccgcattgctgttgattgttttccttggagcaatggccggttatgctgttgccagatacccgaacaaattcaaccgcatggtgttcaacattatgctttgctgcatgatgattcccggcattatcaatacggtgccgctttatactttgatgattaaaatcaaagcggtaaataccttatggggcatggcttgtgtttgtgcgacactcgcattgccgcaggcggtctttgtgttctccggttttatccgtgctttgccgagagagcttgaagaagcagccgttattgatggctgtacgccttttatggcattttggcgtattgtttttccgctgctgatgccctctatttctgcggttgtcatcttgaatggctttggcatctggaataactactcgcaggcggtctttttcctgcaaagcagtgcaaagcataatgtgccgcaggcattgtctgtctatttccagcagttcgcaggagccaaatggaatctgatggcagctacggcggtcattgccattgtgccggtcgttgtgattttccttattttccagaagagcctaatgaagggtcttacggaaggtgcgattaaggggtaaggagctatagaatggacatttatccgtcaaaagcacagtttagtacaaatgaaactgtaaccctttgccttatctgtgatgatgtactgcccatctctgtccatatccgggtactgctcctctccaaaacggtatgggagcaaaacattgtattgaccgagaacaaaacaacggtatccataggcgctttctctgctacttttgcaggatatggcgtaaatgtttatcagcagaatgatttggaaaaaccaattttgcagaccgcctttgatgttgcagaatctcctagaaaacttttacggtatggattcttaagcgacttcacagaaaaagaccgagacaatggtgcattggaatggctgttaaaatgccacatcaatctggtacaattctatgactggtcttaccgccacgattctcttgtggctccgcaagaagattaccatgatatgatgggcaaggaaatctccggaagtacagttaaagcaaaaatcgcaaaggcaaaagcgctggggatgcatccaaccgcatacggcgctgtgtacgccgccagcgaaccattttttgaaaagcatccgacatgggcgttttacaattcctgtcaggaaccgtttgtatttattgatgtgttctatatcatgaatattgcaaagggctcgccttggaggaaacatctttttgaagaataccaaagtgcaattagcatgatgggattttccggcatccacatggacacctatggctttcccaaaacagcatattctcatttggatgcaatcccgaagaaaatcaaattggaaaacgaacttcccactctcattgatgaaacgcgcgaaaatgtacacggtgaggaagaaccttatttgatttttaacaatgtcggagcatggcctgtccagagaaccgcagatagaaagcaagatgctgtctatattgaggtgtggcctccttacgaccggtatgcaagcatcgcgcagcttatccgggatgcaagaacttatgccagagatgataagagcattattttggcagcctatctgaaaccattccgggaaggcaaacgtgaaaaagccctcccagcagccaagttgctgatgggaagcattgtctcaaatggtgccacacatcttttgaccggcgaaaaccaaacggctctgacacaggggtattacagcgattatacaaagttcagcgattccgaagccgaagccatcagacgatactacgactatatgattcggtatgaaaatttgttctttgatcctgaattgcaggacgtgacgatgacccataccgggtgggataactatgagtatcaatgcaccagccataaggtgagttcctacggtgaagcagggaaaatctggatgattctccgtgaaaaagattatcgcaagtgcatctatttactcaacctgtgcggccaaagcgaggattactggaacgagggtaaagaagaaccaaacatccaaaaggatataaagtttaccgtgcaggttgataccccggttgaaaagatttgcttcagcactcccgacgaggaaaacatggacgcaatagggctttcgtttacagaaagagcaacaaaaaccggaaaatttattgactttaccgtaccaagcctgaactattggacaaccatttggatcgacacaagaaaggaaacaatatgaaaaagcatcattttataaagatgtcttccattgcactttccctttgcgttgcactgggtacattccctgcaacagcgtttgccgatgatgccaacgcaacaaccatcacaaaggcgtatgttgataaagccacctatgcgccgggggaggcggcaacaatttacgttgatgttgatggcgcgactggaacgaagacggcgcatatccaaattactcatctaaatgaaactgtttgggaaaatgatgtgacgtttaccgcaaacggcggaaaaacgacagttccgatcaactggactccgccggcatcggatcatcagggatatttagtgtcaattacgattgatggaaaacaaatcgtgacggcaattgatgtgtccagtgatgtgacaacttatccccgctatggatacagtgtcgattttatgcccggtgagacttccgctgaaagcgatgcgatgatgaaagaactcgcacaggtctaccatgtcaatatcgttcaatattatgactggatgtatcggcatgaaaagattcttccggatgagggagatgagtgggtcgatatgtttgggcataccctctcaaggcagacgattcagcagcgcattgatgccggtcacgcctataatcaaaaggcaatggcttaccagatgtcttatatggcacgtgaaggatacacagaaaatggtgtagatccgaagtgggggctgtattccagccaaacgaatcataatatcgattacaatccttctgacaacagcacaatttctggaattgatcagtatctattcccgttggaagggaagcccgcgccgctgctcatgacgtttaatcccttaaatacggattggcaaaattttatggcaaaccaatataaaggtgccataaatactttggacttcgatgggattcagattgatcagatgggtgatttctggggcagggatgcacaatattatgattacgatggcaattatgtgaatttgggcgaatcttttgcaccgtttacaaatgcaatcaagcgtcagctcacagaaaacaacagcgcaaagaatattgttacaatgaacgctgttaatggtggctcggaagattacttctcgtcaaatagtattatctctacggcaaatactgattttgcgtttagtgagctgtggggcaacagcgatagctataaaaaagtaaatgactttattaactggcagaagatgcaggacggcggcaaggctattgtgctggctgcatatatgaaccagtatgacatcaatggcactacttattcttatagcaatgcgcagctgaccggtgttcatacaaacagcgagaacggtgtcacctacattacaggtttcgatgaggttggagaccgtgcagaaataacgattgaagctcccgaagatggcaactattctctcgttttcttggccgcgaatggaacggatacgcaagcaagtaaaagcatctaccttgatggtacaaaatacatgaccgcatactttgatgctacaagaaacggtgttatccctgcagagccggactggtattattattcttatgatgcatcttttactgcacctaaaaatctgtatctgacaaagggaacgcatacgttgacgatccagcaagatgctgatgataagggtggagacattcgccttcagacagttactcttggcgtgtatgacgaaaattctgtccgcttgaccaacgcggcaattgcagcaagtggtgcgatgcacattgagatgggcagcggaatgtctacaacagcaaacagcggagaaaacttcaacgatgtatccctgcttggaaatccgtactatcccaaggcggcaaagtcgatgacctctagccttgagcaggcaatgtataatcagtatcagttcattactgcatatgaaaacttgctttatgatgcaaacgttctgccttcggatacaggattccaaaacatcagcatttctaacgaaactatttctggcgatgcgaagccgggtacgatttggtacgtcattaaaaacaagggcaatgactatggtctgattcatctaattaacctgaccggcgaaaacgatgaagattggcgaaatgtcactggcacccccaatgcaaagcagaatttgactgtaaagtactatatcccgcaatacaaggatataagtggagtttattgtgcttcccctgatacaggttgcatcagcaatgcattggcatacaatgtgcaaacagatgatgtcggcaagtatgtcgaaattcaggttccgtctcttgaatattgggatatgatttatatccgctataacgacaataccttgacggacactgtcgaagcggagaattcgattcttacgaatgtatccacgaacaacaatcacggaggatactctggaactggttttgttgattcttatggcaaagctggagatgccgttacgatggacttctttgtccctgagaccggggactataaactttcctttgtctattccgctgctgttgatggaacgccgaaacgtgaattgtatatcaacgcatatggatatgacagcatttctttcccggcaacaagcaattgggaggaatggaatacaagcgaaactacggttcatctccgtgcgggtattcaacgtatggtggtttactgcggcaatgcagatgacggatacatcaattttgactgcgttcatatttccaaatccgcttaaaggagtgtgagcaactatggcaacctcaaaaagtccgtggtggaaaagtgcggtaatctatcaaatctatccacgcagtttccaagacagcaacggcgatggaatcggcgatttgcagggcattaccagtcgcctagactatttagccgatttgggaatcgacgccatttggctcagcccggtctaccgttcaccgcaagatgataatggctatgatatttcagattactgtgatattgaccctatgtttggaacgctggccgatatggatacgctgattggtgaagcaaggaagcggaatatccgtatcattatggatttggtattgaaccattcctcggatgagcatccttggtttctggaagcaaagaaaagcagagacaatcctttccatgattactatgtctggcgggacggaaacgaagatgtgccgccaaacgacatgaaagcctgcttcggtggttctgcatggacttgggtgccggatgtacagcaatactatttccaccagttttccgtaaagcagcctgatttgaattgggataatccgaaagttcgagaggaaatctataaaattatcaatttctggattgaacgtggtgtcggtggcttccggctggacgtgattgatcagattgcaaaagaacctgatttgaagatcacgaataatggtcctatgctgcacgcctacatccgggagatgaaccgccatactttcggtggaaccgaccttgtgacggtgggtgaagcgtggggagccaatgtggataacgcgaaaatctacagcgaccccagtggccgggaattttctatggttttccaatttgagcacattggtttggatcagatccccggaaaagaaaaatgggatttggaaccgcttgactggatggagctaaagaaggtccttagtaaatggcaaactgggctgcatggttgcggctggaacagcctgttttggaacaaccacgaccttccgcgaatcgtatcccgctggggtgacgatggaaaataccgcgtagaatctgcaaagatgttcgctaccttgctgcacggtatgcagggaacgccctacatctatcagggcgaagaacttggcatgaccaatgcgccgtatgatatatcggattatcgtgatattgaaacgctgcacatttaccgtgatagactggcggaaggctatgcagaggaagatgtcatgcgttctattcacgccaaggggcgtgacaacgccagaactcccatgcagtgggatggcagtaaaaatgctggtttcactgtaggagagccatggctaaaagtaaatccgaactatctgcaaatcaatgccgcaggagagtgtaataccgcagattccgtatttgcctattacaaagccctcattgcccttcgtaaaaagtatcctatttttgccgagggtgattatcaacttcttatgggggatgacccggatgtatttgcttataagagaacatggaaagatcagacactttatgttatctgcaatttccgtgcaaaggaattgaatgaggtgattcctgaagaatatagaaaaggagcattgctgattagcaattatgcagagcaaggttccagcttgaaaccatacgaggctcgaatttatttagagcagcgtaattaaaacgcatcggatttccaataagcaatagaccacgtcatgggcctcaccagcgtaaagaaatacgatgtaagtacaattacattagtttttcggcccgacagcttattcggctgtcgggcctttctttgtgtttgccttcaacaagtcactcgttaaaacgtaacatttatatattaggttcccaccctcatgtctcacaagtcgaatcgcctcacattcgtatgcttacagtataaaacgaacaaatttcagcatcaagaaaaaaattttgatttttctctaatttttttctccgaaaacagtctttatattatgagagcaaaaataaggctctctccccttgaggaccttgaaagcagaatatccgaatcaccggctacatacaactgaccttgccgcaacccaaggagcgtttcggcaggtgcgtcccggttgtgacgcgaggataccgccgtaacggcggtggagcgcccccagaggcgggagaggtggcgtggaacacatacctcaagcgaagggtcagcaatcatgatacgcaccgtggcgatgctctcaaggcgtcggcggtactgccaacaatgtggtacaggaagcgggagctgtttccagcagccgggtcggtggttcgccctcgtatgtccgggaagtagtgtcgaataggacgtacaatttgatttcagattatggcggtcacttgttttccacaagtggccgctatgcttgtggaatcaaatatgatacacatgaaggaggaaaatctatggaaatgaattctgttatggctacggaaattgtagccgcagaagtggagcacattgtgctgccgcaaatcgtcagcattaagcaagccagccgaatgttggggctgccgccgtattacctgcgacggctttgcaaagaggttcccggcgtggcatttcagtccggcatcaagtggtacatcaacttggggaaactagttgattactacaacaattcgggcagaaatgccgctgggtaagagcacaaaagggccgcaatgtcaagggtgtcgtgcgttctgacgacagcctaccgcttttatggcaaacgctgtatagtttggcttgtcagaaaaatcagccaaggaggaatagaaaatggcatctatcgaactgcgcacacccaagaacaaacccgcttactacaaaatcaccgcaaacatcaccctcaatggccgtaccatacgcaaattttcccgctttgagtttgaccccaagacgctgaaaaccgcaaagcagcgcgcagcggcagccacggcagcagcatttgaatttgaagcaaaagcacaggaagaagccgagcgcagcctcagcggtgcaagcaaaccgttccgtgaagtagcagacgagtatattgcttccaccaaagcaaaactggagccatcggcactgctgcgcggtaactatgattttgataaaaacaaggcaaatacaacgctcaacaaagttggctatctgaagaaaatcgtaagcgtagcgccatggtttgccaaaaagtccgtgtccgaaatcacaagagaggactgcgcaagagttattgaggaaattaaagaaaaaggctgtttgcgcagtgaatatgcttttatcctgccggagtatgccgcaatgaaaaacaaatcctttactaaaatggtagttggctatgacatttctgcttataccgccatgaagtgcttcagcggcgcggcagtcacgcgaaaaacggcagaagtggtttcaaatatcctcggtgtttctgtacgcgatgcgttccgttttgagcgcgacgagagacccctgtctaaaaagacaattcgggaatatgtgctcttcgccaatcaagtgctgcactttgcaaatgagcgctatcactcggtgcaagccgaattcaagatgccggcgaaaggagcacgccccagatttgtagactgcatacatgaggatgaagtatgcaaactcatgtcagaaattgataagtgctctatgccggagcaagccattgtattatccctgctgaatacgggtgtgcgtcgtgctgaattggccggcctgacatggagtgatttcgatttcaaagaatgtaccgttcatgtcaacaaaagccttttagtttttagggacttcggctatcaacacacggccacaaaagaaagcaacgaccgttatattgatgtagccccagagtacatggaatttatgcagcaatacaaagagtggtggtacacaaaaaagaggttgatgggggccagttggcagcgagacatggtaaaaaacaaagagagcaagcgtgaatcactgatgcgactggccggagaagaatttgtcatcattgacgatttcggttggcctcgcaacccggatggttacaatgcgctggtaaagcgtgtagcaaagaaagccggtctcaaggatattcacccacacatgtttcgccatacctttgtcagcctgctcatgtcgaatcctgacatcggcgttgcaacggttgcagctgaagcaggtcacgcccagccgagcacgactttaatgatctacacccagcaatacaaaaaacgccgggagtcgatacgcaatcagttgagccgtgaattgtacgaaaaataaagaatcgcagccgtgttatcttaaaaaataacatagctgcgttctttttatgggccgtgagggattcgaacccccactgaaccggttatgagccggtggctttaaccgttaagctaacggccctcacagatgtatagaatagtatagcagaaatttccctgtttgccaagaggttgcggggcggaatttttaaaatccaaaaaaataaaaagcgtcccgcaaaatccgcagggagcctcccctttcccctcttggttggatatggtatactggtagcaaatcaacgcgaaagaaggcgcagctttgaccatcaaggatattgcccgcgagtccggctatgccgtgggcacggtgtcccgcgtgctgaacaacaacccccgcgtcagcgaggacgcacgccggaaaatactggccgttgtggcacagcacggctaccagcccaacgccaatgccaagcatctgaagcagcaggtgccggaggggctggccctcattgtaaagggcacgcagaacgctctgtttgcggacctgctggacaagctgcagccctgtctggaggcgcgcggctatacgccgacggtctactacaacaacggcagtaccgacgagctggcctgcgcacagaccatctttgccgagcgccggccctgcggcctctttttcatcggtgcgcacccgcaatgctttaccccggcgctggcgtcgctgggcatcccctgcctgctgctgacgaacaacgccgccgggctgggcattgagaatctgtccagcgtcagcgtggatgaccgcgctgccgctgccgtgatgatcgagcagttatatgccaaaggccaccgtgtcatcggcatcatcggcgacaggcccgaaacctcccgcccgagccagcagcggctggacggctgtctggatgccctgcagcggctcggcgtgccgttcgactttgaccggcagtaccggcttgcggacttctcgatgcagggcggctatgcagctgccgagcacctgctggcccactgccccggccttacggcgattttcgccatgtcggacctgatggcggtgggagccatccgggccatacaggaccacggcctgcgcgtaccgcaggacattgccgtggccgggtacgactgcattgcgcttgggcggtacaccgtgccgcggctgacgacgatccggcagaataccaccgtccttgccgagcgtgccgccgacattttgctgcgctgcatagaggaaaacgcccccgcccgccacgagaccgtaccctttgagctggtcaagggcgagagcgtataacaacagacccggagcccgtttggttgggctccgggtaatttttgtgcgtgtttatgcctgtgcgctttcaggcgtggccatgccggttcgttcggcaaagcggcgctcggtttcctcgttcaggtatttctcgtcgggataggcaccgtcgtgccggtcggcgtattcgtcggaaatctcattctgcagctggcggcggatgtaatcatcccggtctgcttcgctggagaagctgttattgtcatagtggtagctggtctgcacgcgctgggccacctgggcagcggtcagccccgccgggtaggaggcgacgcagtccaggtagtagctgatgccgtcgtcggtgtcctcatcggtgctgaagctgtaccgcgtaaagcccaagttctccgcctgcgcagcctgcatgacggccatacagtcggcggcgaatgtctccgcgtcgacatagtcgttcaccagctccgtgtgcaggatgcagtcgtcgccgtcctgcagcgtgtagttgccgtgggtctcgtggttgaaccagacattcacgctcagggagtttgttctggctttcagctccggctcggtgctcagggcgttgtacatggcctcggttttttggctctcgatgcggctttgggcatagctgcgagcgggtccccactcgctgatggcgaggggcagcagtgccgccgtgccgacgatgcagagcgtgaacgccgtacccagcatggcgagccagtcaaatttcaccttcacgtcgggcctggcgctgtagacgagcatctcgatgccaagcgcaatgaggatgaccggggagaatttcagaattttcagcaggtcgaactgcggcacaaactgatagacgatcagcagaacaccggctgcaatcagcaccagcgcaaacgcaatgctgccgacgcggcggacctttttcggggtggtttgttcatccatgattttacctcgttctatttatattgagtggtaggggccgggcatgcccggcccgcgcgtgtatggcgggcacagcggcggtgggccagcggcgggcggaacatatcccgcccctaccctgcggcaaaaggcagatgagcggcgtccgtaaggctgcccctcatccggcgctgcggcgccacctttcccccaagggggaaggcagggcgttattcatgcggatacggcggaagctcgtcgtcgcggtttttcttttcagggtgcagacccagcagcttgaggcccgcgaaaatcagcagtgccgcaatgacaacattcggtatgccggtgatgatgtcgtaggcgtagccgttgcccacaagactgcacagcagcgtatagagccaggttgagatgaatgtgtcatacagtgcccagacgccgaagccgaccaggccccagccaatcagtctgttgtgctgtgggagcagctttttgatctcctcataattgcccggaaccagcagggaatcctccttcggctcaccggctgccatgtggcggatgaggtcataggtgtcaaaaaagctgtacatccagatgacaaggcagaggaacagcagcggttgaacgacggtggccgccatcacacagagtatcagcatcatcgcaatcgacaggccgcgctgcatatagccgtagtacatctgccctgcgcccgggatacaggcgaagataaaggtcagaaagccgttttttttcatggtttattcccccttggcggtgctgccgccgatgctttgtgctctgatctggtccagaccgttttccgcggtcagggtaaagctcttaaaggtgtcgtccaggctcttgtagaagccgttgacggcggtgttgaatttggtaccgaagcgttcctgccgggcggcgggctgctgcggcagcagggcggcgggattgggcacgccaaaggtgctgaccgcgccccacatcacaaagcccagcaccaccgcggcagccgccgagacatagcggtttgtcataatgcggaagctgcgcagccgcataaggctctgcacctgcgggatcaggtcgcgcatcggctgcttcatacagtcgggcgcggcgtcgatcatggccgtgtagcgcagcagacagtagtcacagaagctcagatgctcggcggcctccagtgcgccgaggtcgtccagcgtgccgtccttaatggcgtacagcccttcgtcggtcaggtggccttcggcgtcaaagagtttgttgttatcaaaataaaggctcattccttctgcctcctctcggtaatctgctggcgaagcagcagctttgcgcgccacagctggctgttgaccgtcgcgggcggacggcccaccagcttagcgatctccgccgtttccctgtgctccagaaagtacagcacggcaattctgccgtagggctcgcgcagaccgcgcaccagtgtttccagctcggcggccccggcgcggtctgccacactctgggccgggtcgtcggcgtcgctgccgggcgcaccgcgcggctccggcagggcgtcgtccccggggacgtccaccttgcgcacccacgcgcttttcaagtggtccttgcatttgttggccgccacgcggacgagccactgcttgtaatactgcggctcgcaccggtctatagccgaaaacgcggagaggaaggtatcctgggtcagatcctcggcggtgtggggctcgtgcacaaattgcaggcaaaccgtgtagatgagcttttggtattgctgcatcagaccggtaaattctttatttgtcagttcccacacctcctctcgctttgaccttctgtatactaaaacgaatcccccgcgagcgatattgcaaacgcgggggaatttttaaaaattttcttctttggcttcccccaaggggctgcgcccgcaggcacgtgtcgaagcgcaaccaccgtaggcggctcttagcacggagactgatgatgggcaggtgtgccgttatcgcccctttaccgagcagccaccggaaggccgcccctcatccggcctgcggccaccttctcccaagggagaaggctttacgggttgatatccagctccaccgggcaatggtcgctccccatcacatccatcagaatctctgctttctcgatcttatcggccaggcggctactgacgaggaaatagtcgatccgccagcctgcgttccgctcacgggcgcggaagcgcatgctccaccagctgtacatgccggtggcgtcggggtgcaggtggcggaaggaatccgtaaagcccgcggccagcagctcgcccagcttgccgcgctcctggtcagagaagcccgccgcgccgcgattggggccggggttctttaagtcgatgtcctcatgcgccacgttcaagtcgccgcagaggatgaccggcttttcggcgtccagcttttgcagatagcggcgcaggtcgtcctcccactgcatacggtagtcaatgcgcgccagctcgttctgggagttgggcacgtagagattgaccagataaaaatccgggtattccagcgtgatggcgcggccctcgtggttgtggacgtcctcgtcgaggccatagcgcaccgacagcgcaggcgttttggcccagatggccgtgccggagtagccctttttgtcggcgctgtagatgtactcggtgtagcccgcgggcgcaaaatccgcctgtccgggctgcattttggtctcctgaatgcagaagaagtccgcgtccagcgcgttgaagacgtcctcaaagccttttttcaggcaggcgcgcagaccgttgacgttccagctgatgaatttcatgggatggtactcctttatgtataattagccgcgagtattttgtcagccacgcagtaggggccgcacatgtgcggcccggcacttaccggcaaatgagcgcttatgggaaaagccgcgggccgggcatgcccggcccctgcctctcggcaaggtttttctacgctgccttcttcaccgcgttctttttccaggcaccgctgacgaaccgggccacaaagcatataatgcggcagatccagtcaacgaccatggcgtaccagacgccgacggcacccatacccatctgcacgcagagcacccagctcaggcccatgcgccagaccagcatcgaggccgtggcaacgaccatcgtgaaccgcacgtcgttggcggcacgcagggcgttgggcagcacaaagctggcgggccagagaaagatcgacatgccattgtggatcatgaccagtgtccacgccagtgcgcgggtctcgggcgtcagggtgtacatgctcaaaatctggttcagagacagcagcaccacaacattgaccgcgccctgggcgatataatcccacaaaagcagcttttttgtataataatttgtctgttcaaagtcctgcgcaccgatgcagcggccaatgaccgtgatcatcgccaggcccatggcattgccgacaatgcagccgatggcgtccaggttgttggccaccgcgttggccgagatatgcaccgtgccgaacagcgagatcatcgagacgacaagcacgcggcccagctggaacaggctgttctcaaacgccgacgggatgccgatgtacagaatgcttttgaccgtgcggccctcaaagcgggtgacagattgcggcgtgatgcgcagctggtagtcctgccgcgcagccagcgccagaatgatgcacgcaccgacagcgcgggagatcagcgtgggcacggcgacgcccgcgacacccattttcagcacgaacacgcagagcgcgttgccgcagaagttgataccgttgacgatgaccgagaccttcatcgacaccgcgctgttgcccgtggagcggaagatggccgcacccgcgttgtaaagcgccaaaaacggaaacgacagcgccgtgatcgtaaagtaagtcaggcacgcctgcatgacctcgtcggtgatggtgccaaagaaaagccgcagctgcgccgtgcgggtgataaggcagaacgccgccacaccgacgccgaggatcgcgctcaggcccacgagctggcccgcacttttggcggcatcctcggggcgtttggcccccagatgctggcttgtgacgacagcgccgccggtggccagcgcaccgaacagcgtgatgatcagctggttgatcatatcgacgagcgacacaccggaaattgcggcctcacccactgacgataccataacggtatccgccatgccgacgagaatttccagcatctgctcaatgatgagcggccagagcagcgtcagcagctggcggttggtaaacagcctttcctttttcatttttacaatgcatctcactttcccagtatcgagtatagcacaaaaaaagcccccgcgcaatgcgggggacaaaaaggctttcccccgagggggggaaggctaagggtatttactcataccgcagcgcttcgatcgggtcaagcttggcggccttgttggcgggataatagccgaagaacacgccgatggccatactgaagccgacggcgatcagaatcgcagcgatgctgggcttggcagcatagcccaccacattgctgagcaccgtgcccagcgccaggcccagcacaataccgatgaagccgccgatcaggcagaggatgacgctctcggtgataaactgcatacggatggccgacgcaggcgcacccagcgccttgcgggtgccgatctcgcgggtgcgctccgtcacggagaccatcatgatattcataacgccgatgccgccgacgagcagcgacagtgccgcaatggccgagatgccgagcgaaaccgtgctcagcatgctggtcatcgagtcgagcaggctcgccaggctcgatgcgctgaccgtccaggagtcgttgcgggtgtagtagctggcgaagaaatcccccaccgtgttgacgaagtccgtgacattgaccgtgccgccgttggccacaacggtgatgctctggtaccctgcccccgccccggcgatggccttggcaacatccaacgggatgtaaaagtccgtctggatgctgtcgtcgtcgctgccgccgtacatgctggagtagctgtcctctgtgtatttgtatactccctgtatatagaacgtgtacaaattctggttgatggtcagcgtgaccgccttgccgatggcgtcctgcgcactgccgccgatggcctgctcgacgaacttttccgacacgcaggcgaccttgcgcccggcatccctgtcgtcgtccagccatcgtccgtacaaaatctgcgaatcatcgttcctggctgccagtgccgcatgattgatgccgctgacagtggccgtgatggtcgtggtcgggtcaccgtatttggcagtcgtgccgctgcccacctgctgggtcagttcgatgtgatggacctgggtcgggaaagcggctgtaaaatcgtttatcatcgcatcggtgataaggtctgcgtccgacggtttggaatccataaaccggcgcagctggacgccctgggacgtgcccgacgtgtcggagctgtttttctgcgttaccgtgacagaaatgttactggcacccatgccggacatcgagtccatgaccgagccggtcatgctgttgccgacggtctcgatggcaatgaccgccgcaatgccgatgatgatgcccagcatcgtgagcagactgcgcattttgttgcttctgacgctggtcagcgccatgccgatattctcaaaaagctgcacgttcgccggtcccctttcgttcgcccacgatcagaccgtcgcgcagcgtcagcacccgctggcattcctcggccagctcggggttgtgcgtgatgagtacgatggtcttgtggtatttttcatgcagctcgtgaaagagatccatcacgacgcggctcgtctggctgtccagtgcgccggtaggctcgtcggccaggatcagcgccggctcattgaccatggcgcgggcaatcgcgacgcgctgcttttgtccgccggaaagctcgttgggctggtggcgcatccgttcgcccatgccgacgcgctcgagccattccttggcgcggcgggtgcgctcccctgccgggacgcccgcatacagcatcggcagttcgacgttttttaacgcgctctggcgtccgatcaggttatacgtctggaacacaaacccgattttgcggttgcggatggccgccaggtcgttgtcgtcggcgtcgtggatgttgacgccgtccagcacgtactcgcccgccgtgggcttgtccagcacgccgataatgttcatcagcgtggacttgccggagccggactcgcccacgatggcgacgaactcgccggggtagacggtcaggtcgataccgtgcagaatttccagctcgttcggctggccgatgtaatagctcttgcggatgccctgcatctggatcaggggctgcgcggggtgcgcggcctcctcccctatcaggctcctggcaatattctgcgcaaactgttgtgttttttccggcattattgacctcccggaccgccgtccggcgcaccgccggggccaccgccgccggggccgcccatgacaacggtgccctcgggcatattgctgccgtcgccgacgtaaaggtcgccgttctccatcatctgcacatcgctgtcggacgtgcccgattcaatgccctgggtcaggtccgccgtggcgcggatgacgtcgccctcgttcaggtcgctgccggtgatctccacatagtagtcgttggtgtcgccctcggtgacggcgacctgctcaaaggtcatatcgacgccctctccgccggtcttgcgcagcacgtaggtgctgccgtcgtcgttggtgcccacggcgtcgcgcggcacggtaaagacgttgtccttggtgctgatgacgatctcgaccttggcgggaatgccgaccagcagaccgctgtcctgcccgttgaccgtgacggtagcgccgaagctgccgctgtcgttggcgacagggtcgatacgggtcagggtaccggtgatggtgtcgtccgtggcgtcgctggtgatgttgcactgcaggccggtcttgagcctgccgacggagctggccgggatcgtgacttccaccgtcaggttgtccacatcctgaatcgtggccaccgtgccgctgcacaccgcgcccaccgtggcgtccagcgcggtgatcgtgccgtccatcgtggcagtcagggtgcagttctccagcgcggtccgcagattggtcagggtatcgtcctcgcgctgggactgctcgagcttcgtctcggtgttgtccacgctgcgggacgcggttgtcgcgctgttctgataggactgctgcgcctgttccagcgcttcgcggtactgctcaattttattgtaggcctggctgacggcgtcaaagccctgcaggcccagctccgggatgctgcactggcccttggcgatattttcccggctggtgtaatccgcgatctggccctgcagaccgtctgcgcgggccgtgtcgccgttctgctgggcctgggtcagctgaatgttcaggttggcaagggtgttctcgtatccggcgatctcctcggcgtagcgggtgtaccagtcggtgacgatctcacggttcgtcttgccgctgttggcggcggacgccatcgaggtatagtagtcatccatgcccagcgtgtcgtagtttttctgcgccttatcgagattttcctgcgccgtagccaggtttgtcgtctgatcctcgacggcctgggtgtagttcttccgggcgtcggtccgggtgtcgctgagctgcagctgcgcgttggcgatctgcttttccacgtcggtggtgtccagcgtggcgatgacatcgcccttcctgaccgtgtcaccgacagcgacgttgactgccgtgaccttgtaggtcttgacggaatccgacgccgtgacgctggcgctgctgccggccttgaccgtgccggtcacgctgaccgtatcgctcagggtcgttttggtcagcacggtggtgcgcacgaactgatagctattggcagcggccttgtcggtcttgcccagcacgttcacgaggacgagggccgcgaccagcacaatgaccaaaaagatcgtcagctttttgtggcgtttgacccagccgagcgggccgcgtcgggtttgtgttttttctgccataccgggttcccttctgttttcggagattttttgacaaaatttagtatatattgcaaatgtgttggatttttgaaagaagtatgaaaaaaggcggcacatcttagaaagatgcgccgcactgcttgggccaggcccctaccccgcttctttttgccttaccgctcctcgcggaagtaggccaaacccagatgagccgggggctggttttccttcttcttgcgcatcgaaacgacgatcaggacgacgatcgtgacgacgtagggcagcatctgcacaaggtcggtgatgtggctggccatcgtgatgccgagcagcgtcggcaggaactggtacagccaatagagcataccgaacaggtacgcgccccagatggcgttcagcggcttccaggtcgtgaaaatgaccagcgccacagccagccagcccagcgcctcgatctggccggtggtcgcccagatgccctggttgtagtccagtacatagtacaggccgccgatgccgcagatgcccgcgccgatgcaggtggacaggtacttgtacagcgtaacgttgatgcccgcggcgtccgcggtggcggggttctcaccgacggcgcgcagattcaggcccgcacgggtgcgggtcaggaaccagtgcagcaccacagccagcaggatggccgcatagacgagaaaaccgtaggagaacacgacctgcccgatgtcgcccagacccgacagcacgggaattttggcgctgaacgccttgttggcgacgggagcggcggagtagctggcgccgttcaggataaacacgccgaagaagtttgccacacccatgccgaaggtcgtcagcgccagaccggtgacgttctggttggcgcgcagggagatggtcaggaacgcatagatcaggccgcccgccatcgaggccagaatggcgcaggacagggcgatgaggatgctgacaaagccgttggggttggcagcgctgttctcataggcccaggcgctggcaaagcccgcgaagccgcccaggtacatgatgcccggcacgccgaggttcaggttgccggatttctcggtcacggtctcgcccagcgcaccgtacatgataattgtgccaaacgggatggcgcgcatgatccacgcaatcagactgctgtgcatatcacttgccctccttgtgtgcgccgcgggggatgacgcggtagttgatgaagaactcactgcccagaatgaagaacaggatgatgccggtgatgatgtcggcggcgtactcgttcagcgagtacgcagacgcgatctccgacgcaccgcgctcgaggaaaaccagcaggaacgaaatgagcgccatatagaacgtgttgaacttggccagccatgcgacaataatggccgtgaagccgcgcccgttggcggacgccgtggagatggtctgatccttgccggccacgatcaggaagccgcacaggccgcagatcgcgccggagatcagcatcgtgcgcaccgttacgcggcggacgttgatgcccgcataccgcgcggtgttctcgctctcgccgacaacgctgatctcatagccctgcttggagaagcgcagataggcgtacatgacgaaggtcagcacaatgaccacaatgatgttgatggtgtagcgctggcccataatgacggggaaccagccggccttggtcgccttgttcagcgtgccgaggcttgacgcctggccgcgcatgatgttggtcatgcaggcaacaatggacgtagcaacgtagttcatcatcaaagtgaacagtgtctcgttcgtgttccagcgggacttgaaccacgcggggatgaagccccacagtgcgcccgcggcaatgctgcccagcgccatggcggcaaacagcagcggcagcggcagattgttgccctggtacaccatgatgagggcggcggtcaggccgccgatcaaaatctggccctcgccgccgcagttccagaagcgcatcttgaaggccggggccagcgcgatgccgacgcagagcagcgtggacaggtcgcgcagcatccagctgaagcgggtcatgttggcgaaggtaccgctccacatgacgccatagacggacagcgggttcaggccggtgacgaaaaagataaacagcgcatcgacgaccagcgccaacagaatagcgatggcacgcacggcgatcttctggggcatcgtcgtgccctcacgcttggcaatgcgcagcagcggctcgcgggccgcagtggcagtctgactcatgcctgctcctcctttaccaggttggtcattcgcagaccgacctcctccttcgtggtcttgcggccatcgagaatgccgttgaccttgccgccgcacagcacaacgatgcggtcacacagctccagcagcacgtcgaggtcctcaccgacgtaaatgaccgccacaccgcgctttttctgctcgttgagcaggtgatagatcgtgtaggacgtgttgatgtccagaccgcgcaccgcgtaggcggtcatcaggacgatggggtcggcggccagctcacggcccaccagcaccttctggacgttgccgcccgacaggcgggagaccggggtgttcaggtcgggcgtgacgacgcccagctctttcttgatcgtctcggccagcgccagcggggccttgcggtccacgatgggcgaatggcccttgccgtagcttttcagcatcatgttgtcggtcatgcccatcgagccgaccagacccatgcccagacgatcctcgggcacaaaggacaggtggatgcccgcctcgcggatggccttggggcttttgccgacgagctgcacgggtgcggcagcgtcgggcgcgtaatactcgatgcttgcgccgctctcggcgggctgcaagccggcaatggcctccagcagctccttctggccgttgccggagatgcccgcaatgccgaggatctcgccgccgtagaccgggaaggacgcatcgtccagcacggtgatgccctcggcgctgcggagggtcagatgttcaatgtccagccgcttgaccgggttgaccggctcggggcgttcaatgttcagctcgaccttctcgccgaccatcatctcggtcagcttggcctcgttggcgtcctttgtggcgatgtcaccgacatactcgcccttgcgcaggatggcgacacggtcactgatggacaggacctcgtgcagcttgtgggtgatgatgatgaccgccttgccgtcggccttcatgttgcggatgacgctgaacagcttctcggtctcctgcggggtcagaactgccgtaggctcgtcgaggatcaggatgtccgcgccgcggtacagcaccttgacgatctccagcgtctgcttctggctgacgctcatctcgtagaccttctggtcgaggtcaagggcgaactcgtacttttcgcagatggcgcgggccttgtcgtggacctttttcaggtcgaacttctcgccgctgcccatcgacagggcgatattctccgtcgcggagaacacgtccacgagcttgaagtgctggtggatcatgccgatgcccaggtccagcgcgtcgcggggggagcggatggtcgccgccttgtcgccgacatagatctcaccctcgtcggggaagtagataccggcgatcatgttcatcagggtcgtcttgccgctgccgttttcgcccagcagggccagaatctcgccgcggcgcacgcccagggaaacatccttgttggccacgacagggccaaaggtcttggtgacgtgctccaagcgcacagcatattcgttctgcgccattgtgcaggctcctttcggatggtatttataaattgggtaggaacaattttgtgatccgtaggggcggattctatatccgcccgccgtacctgccgtaagctgcacgggcgcatatagaatgcgcccctacggcctgatttgcaacgacagatataaccaccaaaagggaaggctgcggttccaccgcagtcttccctttagattcagtcagaatcaggcgacggggtcagcgtcctcgatgatgccatcgatgcgcagggcaaacgtcggggctgcacgcagctcaccctcgtggaagtaaccgtcggagatggcctccttggtcttgccctgatagacagccacaggagaaccggtgctgaaatcgtagtaggtcaggtcgatgggggcggtggtgacctccgcgccgtcgacggtgaacttgctggtgtcgaagacatgcaggctgccgtccttcagcgcagcctcaacctcggcgaccttctcggcggtgccgtcggcaacctcggggccaaggtcggtgatggcgacagcgccatcctcatagcccttgcaccaatcctgcgggatgctgccggcctgcgcaccctcgaacagctccttgtagtagaccttccagacgttggtggcggaggtcagggcagcggtgggggcggtgtcgagcatgtcgatgttgtagccgatggagtagcagatcttgccggagtccttcagcttctgggtggcagcgggggcaccggtggagtcagcgtgctggccgatgatgaccgcaccgttggcgataagggcctcggcggcagcgccctccttgtcgatgtcgaaccaggagttcgtgtacatgacctccatctggacatcggggtaaacgctctggacgcccaggaagaaggcggtgtagccggagacgacctcggcgtagttgtaggcgccgacgtagccgatcttgaccttgccgtcagcggtgaagctgtcgggctgggtctcgggggtcagggtaccggactcgaccagttccttgaccttcatgcctgcgacgacaccggagacatagcggctctggtagacggcggtaaaggcgttgtagaagttatcgaggtcggagatagcggcgaagtcgccggtcatggccacaaagttgatgtcagggtacttctcggcttcctcctccatgtaggtctgatggccgtaggagttggagatgatcaggttgcagccctggccgacaaggtcctcggctgcgtcggcggtgacgccgccctcagcgatcttgtacttccagacgatctggtcatcggacatgcccagctcggcggcagcttccttgatgccgttgatgtgcgcggcgctgtagccttcggtctcgtcgcccagaatgatagcaccgaccttgacgtcgggggcctggttgttgctgctgccctctgcagtagcggtggtaccggcggcgctgctggcagcagtgtcagcggtggaaccacaggcggccaggctgaacaccatagaggcggccagcagaatgcccatcagtttcttcatgtgtattgttcctccctgttgtgtgtacaaaaaacggcaaaaatgcgtcgcttcgtgccggaatctgccgggaattgacgcattttgctgtcttgcaagacccattgtagccgctttacgatccgtttgcaataatttttaaatttttgttaaaagttcagcaaaacaggtaaatgttttgcctgtgcagacagtacactgggcaggacgcacaacgaaaaaaagtaaaagtcatactttcttgtgcaaaagtatgacttttacttttgggtccgccctcctcgaagggaggcttttacctcttatgaataaactttctgtccagcccctgctttacggcggcgttgagcacgacccaggtcaggaacacctcgatgggcagcatcgtcgtgttctttaccagacccgaggtgaaatagtaaaggtagcccttgccgtagagcatcgccttccagacgctgcccagcaggacgttgctgccgtagttgatgatgagccgcgtcacaataatgcgcggcagcgtcggtttttggcggtacagcataacgccgtagatcagtcccgacagtatggccgtaatgaggtagccggggaaatacggctcgccgtagcctgccagcaggaaacccaccgtatcaatgatagccccggccatcatgccgacgacggggccgtagcacatgcagcccagcgagacggcgaggaagctgaagtaaattttcaggctcggccccagcaggtagatgggcaggctttccagcacgatggccatggcgcagaccagccccgaaaaggccagcacccgcgggttgttcagctcgcgccgggcagcgcgccagtagtcagcggaaaagacggacagcttttgttcgcacataaaaaatcctcctttgtgcgttgccgcacaagggaggaggcaatttttgtcggatgggcacaacgccgcatccgccgttgcacaccatcatgcagcagtgggatgcgaaacctgcaccgcggacgtttccgtcacttcgtcctgccacaactccccgttggtcaggcactccggggccaagccccacgcgcaggtctctactctgcgaaaacaattttaattatacatagattttggagaaatgcaagagaaagctttttgtaaaggtcaacgggcagtacccctcaggcctcgtaaactcggccagctcccctgatggggcgcctttttgcgcgggctttgcccgcgagaaagcctccccatcaggggaggtggccgagcgtcagcgatggccggaagggttcggcagcttcccccttattgcccgcttgcgccgtagtttgccagcacgcgggcgctggggtcgttgacatcgcagtgcggccatgccttgttgggcatccagtaatcgacgatcatctcggcctgaccgggataatacttctcaaaaatttcacggtacagcaggctttctttggtaaacgggcgggcgtaggtgtacttgccgcacttctcggcaaagtcgcggtccgtgtagaccgtctcggcgtactccttcaggtcatccaccatcgaatggccgacggcatcgctgaaggcggccttctcacgccagaggatgctctcgggcagccagtcgccctcaaacgccttgcgcagcagatacttgcccttgccgtaggtgttcagctttttggccgggtcgatgctcatgacgtaacgcacaaaatccagatcaccgaacggcacgcgggcctcgaggctgttcacgctgatggagcggtccgcgcgcagcacgtcgtacatatacagctcgcggatgcgcttctggctctcggtctggaatgcggcggcggacggcgcgtagtcggtgtacttgtagccgaacagctcatcggagatctcgccggtcagcagcacgcggatgtcggtgtgctcgtggatgtacttgcagaccagatacatgcccaccgacgcgcggatggtggtaatatcccaggtgccgagcatggcgacgaccttctccagcgcgtccagcacgatgtcgcggttgatgatgacctcggtgtggtcggcgtgcaggtagtcggccacctgcttggcgtatttcaggtcaatggcgtcctcactcatgccgatagcgaacgtgcggatcggcttgcccagcttcttggccgcaatcgcgcagaccaggctcgaatcaagaccgcccgacagcaggaagccaaccggcgtgtcggcgtcaaggcgcttgtccacaccggcaaccagcttttcacggatgttcgtcaaaatctcgggcagctcgtcctggctgtaggcgggcgtatcggcaatgtcgcagtagcgcacaaactgaccgttgcagtagtagctgccaatcgggaacggatagatttttttgcacaggcccacgaggtttttcgcctcggacgcaaaggcaatgtgccccgactcactgtaaccgtagaacagcgggcggatgccgatggggtcgcgtgcggcgatcagcagctttttgcggctgtcgtacaggatcatggcgaactcggcgtcgaggtgcctgaacatgtcaaggccgtacttgtagtagagcggcaggatgatctcgcagtcggagtcggactcgaacgtgtagccctcggtctccagctcagccttgacggggcggaagccgtacagctcgccgttgcaggccacgcagtccgcaccgcggaagaagggctgcatgccctcgggcgtcaggcccatgatggccagacggccaaagcccagcaggccgaactcggtctcggccacgcgctggtcgtccgggccgcggctggtggtacgcagcagatattcggtgaaagttttcttgggcagatcatgcccggcataacccatgatgcagcacattgtttgtttctccttttcggtttacgtcttacaccctccgaatggtaaacaaaaaagacagcccattcgccctgcattaggacgaatcgctgtcttggatccgcggtgccacctaaattaccgcagccgaaataacggcatacggtcacttttccgtacacgttcacctttgaaacgctgccgctgtaacgcacggcctgcggcacaccctactttttgcatttcaggctgcagctcggaggtgttctttcgcgccctgtccccgtcccggcttacaccagacgccaggctctctgtgcggatatggagcggtacttttcctcttcaacgcttttgatggttaaagaatagcacggctgaggggtggtgtcaagatggtattgcaaaaaagtttgcgtgaaccgcagggcggcagagcccctccggcaccttgcccagcagccggtcaaagatccaacaccttcgtcaacttgcacaaggttttgccgtttcgcaatttttgcaaggttttggaatcattcttgcagttttttgcagtgcaaaattccataccgcggaacagatttccatatacagaattgtgccgcgcatgaccgttccgcactgcggaatcgggaatctgcgatagccgtgccgctatttaggcaactgccgcaatggtcaaaccagctccggcatgatacactgaggatgacaaaattcgtttgctccgcggtacctctaccctctgccgggagcgcccacccacaagctgcaggccccgcctgcaaggaggaaaaccatggcaaaaaacgcaatcgttggtcagtccggcggccccacctcggtcatcaacgcaagcctggccggcgtgtatgagagctgcaagcgccgcggcgcaggcaaggtctacggcatgctgcacggcgtagccggtctgctggagcgccgcacctgcgtgctggacgacaagctgaaaaccgcactggacattgagcttttgaagcgcaccccgtccagctatctgggttcctgccgctataagctgcccgactggcacaccgccgagggcgagagagtctacatccggctgttcgagattttgaaggagctggacatcggctacttcttctacatcggcggcaatgactcgatggacaccatcggcaagctggccgactacggcgcacacatcggcagcgacatccgctttatgggcgtgcccaagaccatcgacaatgacctgatggtcaccgaccacacccccggctacggcagtgcggccaagtacatcggcgttgtgatgaaggagatcatccgcgatgcgacggtctacggcacgaagtacgtgaccatcgtcgagatcatgggccgcaatgcgggctggctgaccgccgccgcggcgctggcgaaagccgaggactgcgagggcgtggacatgatctgcctgcccgaggttccgttcaatgtggatcacttcgtcgagaaggtcaagcggatgcagaaggagaagccgtccatcgtcatcgccgtgtccgagggcgtcaagctcgaggatggccgctatgtctgcgagctggccgacgatgtccacgcggtggatgcgttcggccacaaggctctgaccggcacggcacgcttcctggcaaacaccgttgcacgccgtctggacaccaagacccgctgcatcgagctttcgacgctgcagcgctgcgcgggccatctgacgagccgcaccgacatcaccgaggcgtatcaggtcggcggcgccgctgccaaggccgcgtttgagggccacaccggcgagatggtcgcgctggaccgcatctccaatgcgccgtaccagtgcggcacgagcctgcacccgatcagcgaggtcgcaaacctcgagaagaaggtcccgctggagtgggtcaacgccgaccacaccgccatgaccgacgagttcctggcctacgccctccccctcgttcaggccgagctgacccccatctacgtcgagggtctgccgcaccatatttatctgcccgaggcttgatggggcgcggtgttcctttcttataagaaaggaaccgaaagaattttagaataataaaacaaaagcgctgcggtaacgaaagtcatctcccgttaccgcagcgtttttagcctcccttgtcaaagggaggtggccgagccccggcgaggccggagggattcccgcggcctcacggaggcaccccttatacgcggagggattcctgcacttccctatcaatggcagtacataccccttcaaaattcttcatcacatcgttgttggcaaaccgcagcacccgcaaatcatatttttgcaggaactccgtgcgcgtctggtcgtcagcaatgcccttctcctcgtaatgctgcgacccatccagttctaccaccagcttggctgcggcgcagtaaaagtccaccacatagctgccgatgaccttttgccgcaaaaagcggatcgggtactcccgcaggaaatcgtaccagagatgacgttcctccctggtcatatccttgcggagctttcgcgctatcggggtcagcgctttgttgtgcttgccgttcatacaggcagttactcctcctggtttctcaccgggcacacgggctggaatccctccgcctcgctgcgctcggcacctccctttgacaaggtaggcttttcttttaatagaacccaaagctcggcagggcattcagggcgtcagcccaccaggcgggaatgggcaggccggagagcgccggataatagagcacaaacaggacgagcgccaccacgcagaggcccgcggcgatctttttcgcccagtctgcgtgcttcatccgcgccagcaccagtgccagcgccgccagacagaacatcgagctgggaaaataatggtacaggaaggtgcagcgcgtcaccagcatccacgggatgagctgcgtgccgtacaaaatcagcacgcccgcgccctggcggctgccgcgcccgctgacctgatgccacaaaagcccgaccagcgccgccagcccgaccagccagatgaccggcccggccatgcccgcaatgctggccttcatgccgtagggcaggtaaccgttgcggtagtaccacaccgggcgcaggcccagcagccaagtgtaccagcggctctcaaacgggtgggtcgccttcagcgtcgcgtggtagctgaacatcgacacctggcactgccaccagtcgctgaggctgaacgtcggatcgcgccaccagtacggcaaataggacccaatgtagaggcagagcggcagcagcacataaaacagcacgccgcccaccgccgcggtgcggaactccgcccggaagcctggccttttctgctgccagcgcgcatagagcacgcccagatacagcacggccagcccggccccggcgtagatgccggtccacttggctgcgcagcccagcccgaacgcaacgccgcccagcgccatcggcagcagagcgcggttcacgccgtcggtcagcacccgctggcagtaccacaccatacagtaggctcccaataggataaaaaacgtaccgtaaacgtcaatcgttgccagacggctttgggaaaagcgcataaaatccagcgccagcagcacgcctgcggtggctgccgcccacggtttgcgggtcaggcggcgcacaaagcaccacgccagcggcaccagcagcacgccgaacagcgtacccgcgaaccgccagccgaacgccgtcatgccgaacagcgcaatgccgaccatgatcaggtccttgcccagcggcggatgggtcgtctcgtagacgggcattttgtgcagctgctcatagccggtgcggccatggtagatctcatcaaaatacatgctgttcagctggctgatcgtgtcgggcacggcggtctgctcgtcaaacagcgcgccgccgcccgtgaccggcaccagccggccgttggcatcgcggaacgccagctcaaacagctgggcgttctcgaccatgaccgtcagctgggtgcccgccgccagctgcacgttgttcgctgtccagctgaagcaggtgccgtagttcagctccttttcaaagaccgtgctgccgttggcatcggtcaccgtcatgctgccgccgaacgagatgcccgggtagacccacagcgataccgcgctgccgtccagcgtcacactctcggagagcgccgtgcctgtcgcgtccagcgggtcctgcggcgcggtgcggctgccgagatagctaaagctcagcaccgccgtggccgccgtcagcgccaacagcgcaccaacctcgcggcgggtccatttcggctgcggtgcgggcacgggcggggcagtttccggctttgtctcgggcagggccagcgtgtggccatggcgggtaatgtcccacactgcaaagatcagcagcacaaagcagaccgtctccccaaggccggtcaggacggccactgtcgagctggtcgcgctcgtcagccattcatcgttggtgccggtcagcgagtagaccgtggccagattgatgaacccggccagcgacaggcccacgcccgccgcatacaggcggatgtcgttccagtgcgcggcggccagcagcgtcagcaacacaccgggcaccatgtagcgctcgtgcatacagtgcgcaagcgtaaaaatgccgatgccgtagtacgccgccaacagcagcggtgagaaccacccgccccgcacgctgcgcaccgcaaaatacgccagccccgccgtgaccagcagaatatggaagcacccaagctgctgccagctgatgccaaacaatgccgggtcagcctgccccttccagttgccgcccagcgccgccagccagttaaaggcgttgatcgtcgcgtaggggtagccggacattgtgccggtgtatttgtcgatcaacttcgggatcaactgcacaacgccaaaaaaaggcagacctgtcagcagcggcggcaacagtgccagcgccgcgccgccaaagcagcggccaaaggcgcgcaggcggtccttttccagcgtaattgccgccagatagcacaccgccagcaccgggccgaacagcagcgcctgcggcttgatggccagcgccacgccgtacagcacggcggcgggcaggtagcgccgctgctccagcagcacaaagcagagcacaagcggcagcgcaaacgcgccgtcgatctgcttccagacaccggtgtcgaacagcatcagcgggttgaatgccgtaaacgccgtcagtaccagcgcggtatgctccttcacgccccggctgctgcgctttgccgttctgtagacgagccacgccagtccgcagtcgcagagcgacggcacaagcgccagcagaaaatacgtccacttggactcgtaggcgatgtgcagcgccgcgcggatggcccccaccagccccagcacccagaggtagccgggcgggtagtcggcaaagtagccctcgctgtaaaaagcggcgggaccctcggcggccagcttgtcgccccaggccacaaagcagctcatgtcataggggtagccgtccgtcacaagggccagcaccaggcgcagcagcagggcaccgcccaacagcacccagaggctcttatttgattttgttcgttgattcgtcatgttacacacaaaatcaggggcaagcccacgcacccgcgccctgcggcgcagatgcgcaggccgcccctgcatctgtttttttgaaaaaatcttaggcaataccgcacaattcccgcctaacggctcaagcaccgctccggcggatctccgcgccaagagccgccgcaagcggcggttgcgctccgaagcgcctcgctgcggctcggtgtgcggcacggcatctgcgttgccaaaatgctcgataagacatccagtattatctgcgcttttggcttagcagctgccgcacctcgctcgccgtatcggcacttagaattatgcggtcttgcccttacagcttcgcgagcttcgggccctgcaccgtgtcggtgacactccagcccatctcggtcagctgggcacggatggcgtccgcgcggccccagtccttggccttcttggcggcagcgcgctcctcgaccagtgcggtgacctcggcggggatgctgtcggtctttttgcggttgtacagcaggcccagcacgccggtcagctcatcaaacgtcttggcggcagtctccagcgtcgctttgtcggaggcatcggacagcgtgttgatgtccttgaccagatcgaaaatcgcagccagagcgtccggcgtattcaggtcgtcgtccatggcggccttgaactttttgcgcgcattatcgcacttttccaccagcgccgtgtcggtgccgtgggcatgctccatggcaaaatcaaggttgtcgcggcaggtgtacatccgctcgaggctgttcttgcagctctcgatcagctcaacggtgtaattcagcggcatgcggtagccagctgtcagcataaagtagcggatcggctcgtagccatacttgtcggcgatctcgcgcaccgtgaagaagttgtttgcgctcttggacatcttctcgttgttgatgttcaggaagccgttgtgcatccagtagcggctgaaggtgcagccgttggcgcactcgctctgggcgatctcgttctcgtggtgggggaagatcaggtcctgaccgccggcgtgcaggtcgatggtcttgcccaggtgcttgcgggccatagcgctgcactcaatgtgccagccggggcggccgtggccccaggggctctcccagtagggctcgccgggcttggccgccttccagactgcgaaatcggcggggtcctccttcaggtcgtcgtccatacggctgcgcagctcacggttgccgctctcgaggtcgtcgaggttcaggtggctcagcttgccgtagccggggtcggacttgacgcggaagtagacatccccgttgcgggccacataggcgtggccggagtccacgaggtccttgacgatgtggatgatctcgccgatatgctcggtagcgcgggggcgcacggtgggggccttgacgttcagaccgtcggaatccctgatgtactcggcctcaaacttgcgggcgacctcctgcatcgaggtgccctcctcctggccctttttgatgagcttgtcatcaatatcggtgatgttggagacatagtagaccttgttgccgcagtattccagatagcggcgcagcgtatcaaagacgatcatcgggcgcgcattgccgatgtggatatagttataaaccgtcgggccgcagacatagatgcggtactcgccctccttctgggggacaaattcctctttctggcgggtcatggtgttgaagatctgcatagcttgcacgttccttcctctatatagggatgcttttattatagccaacgcaaggcgcggttgcaagggggattcagccgttatttgcgaattgcacggccagctcgtcccagacagcactgaaattgtaggggaaccgctcgttctcctcggccagataggcgcggtaggtgtcgagctctgccgccgtcggtgccttaacgcggcggtaggccgtgatcgtgtagccgttgcccatgtcgaaggtggctgccagctcaaacggcgcgtacttttcctggttttccaggaaggccgcgttcatcttctcggtgtggttgttggggtcaaacggcgtacaggtcagcacgacctgcgccgtaagcagctccttcgggaaggcatcgttgccgggattgcaggcaccgtagggcagaatttcgcggatggactcatccggcagcgccgagatgcggaacacatccgggctgtagaccacgccgtgacagatcatgtaggcggagttttcgccggtgcagttctcccgcagccaggcgttgacctcggcgacctgctgtaaatcattgcgggggctgtccacgtaaaagtacagtccgctgtaaaatccgctggggaaaaccaccggcagcagctgactgcacgcgccgaagttcagcgcacacagcacgcccgccgacacggccagaatgcggcgcggccacgcccacggcagatcgctgacgagcagcgcacagaggaagcagcccagcaggtagaacggcgcgacggccagcgactggtggtcgtccatattctgcacacgggtgacgagcagcacggtcagcaccgcgccgacggcggcaagaacagcgagcgcacgggccttggcattatacagcccgtatagtatgccgatcagcataatcgcaaacacgagccagcccagatagacacgctggttggccagctctgccagaaagccgccggtctggtaggtcgcgtagcggtcactgtagtcggccttggcgatgcgccagaacatcggcagcagcggtacaccgacgcagaccagcgaggccgcggcaaacctgccgaagcgcagggcggtctgtacctgccgggcgcgtgcagcgcgggctaacacccaaacgccatacagaaaaaagaacgccacaacggtaaacatgtagctgcggcgggtcagcatgagcatacccgtaaaggccgccagcgacacaagccgcgcgggggccggctggctgaagtcgtacccgacgccgagcgccagcagcataaacgcgaacgcgacaccgagcaggtccggcataccgcggtaaagcgcaatgtgcaaaagcggcagcaacaggacgaatgccatggagagcgccgtgaacagcaccggggcctttggctgtaattttcggcgcagcaccgtcagaagaagccatgcactgtagtagacgagcgacgggatcagcagcgcgcagagcagcgcaaacgtgttggccgtgcgcggcgtgaacatgaagaacggctctgccagcagattgatgaccagcggcgcgtagtcgttgaaccacgtcttgtagatggtcgagccgacaccggtaaagacgccgtccgcaaagttggattccagccgcacctgcagattgtagtaggtcgcgttgtcccacaggtatagactctggcggccaaccatggcgtgcagatagaatgcggcgctggccgctatgcagactgctaaaatgacggcatccgcttttgtgcattttgcgccaaccgcccgcgccgcgcggcggtacaggcagaatgtgcccagcaccgccgtgcaggagagcagcagcagccatacatccaccggattccgcccgctgccgagcatatcgacaacttgcagcggcgcggcaaaatgcgccgccgtgctgaacacgaacttgacggcaaaaatgcacagcagcaacaggacggcccgctccaggcgggtcatcctgcggtagatgcattttaaaaatgtacggagattgagctttgacaagttggggtctccttattggatccgttgccttgtaggggccggacatgtccggcccggcacctgatgtagaatggcatgtatggcaaggccgcgggccgggcatgcccggcccctactgcgcggcggctgtcacttcgcctgcatgaacagcttgcggttctgccacaggtagatgccgccggagagcagggtcgccgcgccgcagagccagcagagcacaatggtaacaaagctgacaaagccaacatccgtgggcccggccagcgcaccgacaaagtagtagaagatgatggtcagcatctgcaaaacggtcttgaccttgccccacatgttggcggcaatgaccgtgccggtctcggcggccagcatacgcacaccggccactgcgaactcacggaacaggatgaccgccagcacgatggacgagcagacgtgatcggtgaccatgtaaatgaacgccgcggtggtcaggcacttgtcggccagcgggtccatgaacttgccgaagtcggtgacaagatgattcttgcgggcgaggtagccgtccagaaaatccgtaatgctggcaatggcgaagatgacgcccgcaatcagcatataagccgcatggaagtccgctgtgccatagtgggaaacggcggcaaaaatcataaagacgggcaccaaaacaacgcgcatcatcgtcagtttattgggcaaattcatagcttagtcctccagcctttcttccgcgtaaccgtacaggtcgtaggtgtcggaatcggtgatggtcaccttatagaatgcgccggtctccagcggggtgtccgcgggggtcagcacgctgccgtcgatctcggggcagtcggccttggtgcgcagcaggtacatgccggtctcgtcatcgacgccgtcgcagatgcactcataggtatggccgaccttctcgccctcgcgctcggcgctgacctcggcctgcagctccatgatgtgatcggcgcggcgctgcttcgtctcctcgtcgatctggttcggcatttttgcggccacggtgttttcctcggcggagtaggcaaagcagccgaggcggtcaaacctgacggtcttgacgaagtcacacagctctgcgtactgctcctcggtctcaccggggaagcccgcgatcagcgtcgtgcgcagcgtgatgccggggatggccgcgcgcagccgggcaattgcgtcctcgatctccttacgtccgccgcggcggttcatggccttgagcaccgcgtcatcacagtgctggatgggcaggtcgagatagggcacgaccttggtgttgcggaccatggcggcaataaatgcatcgctgatacgttccggataggcgtacaggatacggatccagcggatgccgtcgatttcctgcaggcggtccagcagctcacagatggcgccgggtctgccccagtcctcgccgtaggcggtggggtcctgcgcgaccagaatcagctcgcgcacaccctcgcccgccagccagcgggcctcggcgacgcagtcgttgatttcacggctgcgcagcgcaccgcggatcagcggaatggcgcagtaatagcagccattgttgcagccctcggcaatttttaagtacgcatagtgccgcggggtcgagataacgcgcgcaccgccgagctgcatatcgctcttggggccgtagttctcgatctggcccgcaccgtcggcacagatgcggcggacgatggcgggcagcgcggcgttggagccaatgccgacaacggcatcgacctcggggatctcctgaatgatctgctgcttgtagcgctcagccaggcagccggtcacaatgaccttgaggtcaggattttcctgcttgtactggcaggccatcaggatattctcgatagcttcggtcttagcggactcgatgaagccgcaggtgttgatgatgataatgtcagcctcggcggggtcagccacggtggtgtggccgtccttgatgagggcgtgacagaatacgtcggcgtcgacctggttcttcgggcagccgagggagataatggcaattttcattgggtagtcctttaatataatattgtatggtttgcgcaggattataggggcggttccccgacaccccgcagggcggcagatgtttgccgaaaattgtagggcagccagccctctggccgccgcagaggggtcaagacccctccctacaatgcgaaccgttaaggggatgcaatcggcaggctgagggccgggcatgcccggcccctacagggcagccggattttattcgtcgtcggacagcacttcccgtatcaccgcatgggaaaatccgcggcgggcgagggcggcggcgacctggtcgcgcttaccggcggcgagcttggcggcgtactgccgctgcacaagcgcacgggccgtctccaactcggggctttcgccgtcgtctgtctcggcaaacagctcctccaccacatcggcggcggtgtcgcggttaatgcctttggccgaaagatcgttcaaaatctcgcggcgggacttgcgcttgcgcagcagctccgcagcgcggcggcgggcaaacgagacatcgtttaaaagccccagctcccccgcccgcgccacagcgtaggcagcgctgtgggcgtcgaacttccggcagagcttctggtacagctcccctgccgcgtggtcgcgcagggataaataatccatggccttgtccagcgcgcggcgggtctcgcttttcttgcgcagctcctcgatctgccagtcctccagctcgtcatcctggtgcagggcggcagcggcgaaggtgtcctcatccagcgagaaggcaaactcgccgtccaaaaacagcgccagacggcctttttttgtctccttgatttgcgttaagcgcggcatggcttattcgtcaaccataatatcgaggtcgacctcgctgcccgtcgtcttggcggcgggagcggcaggggcttcagcggctgccgcgggcttgatgacctcactcgggtccagcggcttgacggtccccttcttaccggcggccagcaggcggtcagagtttgcgcggacgatcttctcgatctcgtcggagacctcggggtggtccttcaggaactgcttggcgttgtcgcggccctggcccaggcgcatctcgccgtagttgaaccatgcgccgctcttctggacgacacccagcttgacgccaaggtcaagaatttcaccgatcttcgagatgccctcgccgaacataatatcaaactcggcctcacggaacgggggcgcgaccttgtttttcacgatcttggcgcgggtgcggttgccgatgaacgcgccggtggagtccttcaggccctcgatgcggcgcacgtcgatccgcacgctggaatagtacttcagcgcgcgtccgccggtggtgacctcggggttgccgtagacgatgccgaccttctcgcgcagctggttgatgaagatgcagacggtgttcgtcttgccgatgacgccggtcagcttgcgcagggcctggctcatcagacgggcctgcaggccaacgtggctgtcgcccatctcaccctcgatttcagcgcggggcaccatggccgcaacggagtcgacgacaaccgcgtcgatggcaccggaacggacgagagcctcacaaatctccatggcctgctcaccggtgtcgggctggctgaccagcagactgtcaatgtcaacgcccagcgcggcggcataggtcgggtcgagggcgtgctcgacgtcgatgaaggcgacctcgccgcccatcttctgtgcctctgccagaatttgcagtgccagcgtcgttttaccggaggattcggggccgtagacctcgacgatacgcccgcggggcacaccgccgatgccgagcgccagatccaggcccaggctgccggtggggatcgcgtcgacctgcatcgtgacgttcgcgcccagcttcatgacggcgcccttgccgaactgcttttcaatctgcgccagcgcggtttccagcgcggccttcttatcggcggcgggggctgccgttttgggtgcggtatctttttttgctgccatgttgcggttctccttttatctgcaagtatgcttatgatttgcgtttgtacctattatatacgatttacgagtaaattacaacattttgttgtgtgttttgtgtcccataaatcggattttcaacagcttttttcaggtttttgcagcaaaacagcccggtcattgctgccgtagtctttacggcagctgccgttgacccagccgttagccgcccccagtgccagcacgtcggcagcctgggcacagccgatctccagcaccagccagccgcccggacgcagcgcgtcccggtagtgcgcggtcagcaagcggtaaaaatcgaggccgtccgcgccgccgtccagcgccatggcaggctctctggcagtctcaggcatcaggtgtgccatctcctccgccgtcaggtagggcgggttcgagataatgagatcggccccgccggagggcaggctattataataggtaaggatgtcgccctgcacggcctgcacgccggtccccgccacattggcggtcaggtagggccaggcgtcggcgcttttctccacacaggtcacagccgcgccgggcagatgcctggcaatgcccaggcccaggcagcccgtgcccgcacagaggtcgtagacgacgggcgcttctgcgtccttcaacagctcgatggccgcctcgcagacgacctcgctgtcggcgcgggggcagagcacgccgcggcccaccttgagcgtaaagtccataaaatcccactcgcccagcaggtattgcagcggctcacgggcggcgcgacgctcacccaagacccgcaggctcgaagcctcgtcgggggtggggccgttgtccaggcgcgggtcacggcccgtgacaaatttgtacagctgcaccgcgtcaaagcgggcatcgggcacaccggccatcatgagccgggcgcaaagactttgataagcagtattcaccagcgggcttcctccggtttttcgggcaggaccggggtcacagcggcaatggcgacctcgatcatcgagtcgtcgggctcaaaggtcgtcaggcgctgcatccacaggccgggctgcgagacgatcttggacagcacactgtcggaacggcccgcccatttcagaatttcatacgaaataccgaccaaaagcgggaacatgcagagcttgtacacaatacgcattcccgtgctggtccacggcagcaccgcatacaaaaagatgctgataatgatgacaaggatcataaagctggtgccgcagcggggatggaagcggctctgcctgcggatgttctcaacggtcagcggcagacctgcctcataacaggcgatggttttgtgctcggcaccgtggtactcaaagacgcggtgcaggtccttgaaccgcgtgcagagaaacatatacccgaggaaaatggccattttcagcgcaccttcgaggatgacgcgcggccagcgccccagcgggacaaccttcatgacgaggccggtcaaaaacgtgggcaaaaacgtaaacaggaacagcgccagcacaacaccgacgaaggcggcgcaggtcatgagtacgttctgcacggcgggggtggcgtgttcctcgaaccatttgtccagcttggactcggcgggctcggtttcgccctccatcgctatatcggcggcgtgcattaaataccggtagcccttgtacaggttttcggccatgttgcagatgccgcgcaccagcgggaccctgttgtaccagtggacggtgacagtgtcataggtcaggtcgatggtgccgtccggcttgcgcacggcgcagcagatcttctccggcccgcgcatcataatgccctccatcagggcctggccgccgatggaggtgcgaaattctttggacatatatggttctccttgttaaattttctgcctttcctcatgggggtaggtggcgccgcagcgccggatgaggggaagcccgcgcagtaaaccgcaaagcagttctgacgaaaactctgccctcatcagtcaccttcggtgacagcttcccccacgggggaagccttttcaaatcttgtcatgcagatgctcctgcccggggtggtagacggggagggtgacggtgacggttgtgccctgaccaagggtggaggcgatgtcaaatttgccgcccagcgtgccgacgatctcatcgacgacggccagcccgatgcccgagccgcgcaccgagtttttcgccttgaaaaacttctgcttgaccttttccaggtcgtcgggcgcgatgccgcggccctggtcgcggatggacgcgctgaccgtgaccggcgtgcggctcagcgtcaggaagatcgtgccgcccggttcggaatatttgatcgcattatcgaacagattgacaaatacctgccgcagccgcgcgggatcggcccagaccgggtacggctcgggcggctcggagtagacgagctgcattccctcctgacggatgcgggcctccacgaacagcgcggcgtcggtggcctcggcgacgaaatcgagcacctcgcagttcatcttgatgccgttctgcaggcgggagaagtcgagcagctcctcgaccatcgtataaaggcggtccgtctcggtgccgatgatcgagaggccgcgacggtagttttcattccttgggtcgtcgatattgctgatcgtctcgacccatccccggatggaggtcagcggcgtgcgcagctcgtggctgaccgatgagatgaactcatttttcaaccgctcggtctcggcaagatcctcggccatctggttgatcgtcttgcacagccgcccgatctcgtcgtcgtagcgggtgtccggcaggcggactttcatgtctcccttcgcaattttggtggcggtagcctcgacttcaccgagcggacggacgatggagcgtacaaaaaacaagccgctccacaccgtaaaggccagcaccagcacgccgagaccaacgcagatagcgacggtgcgccaccacaggccgtcaacgagagtcaggcttgtgaccatccgcatggcggcgatgctgcccgccgcgtagggcacaagcatcgtaacggccatgaccctctcgccctggggtgtcgtgaagatagccgacccgatgccgttggcggacgtcagcgcacggccatagtcggtgccgtttgtcaggtcgcggttcatagtgccgctgctcgtcgccaggatgacgccctgtgcgtccagcagcataaattcaaacttgtccttctcgtcgaactgttcgacgacgcgccgcaggacattggcgcggctttcggcggtgtttgcggtgtcccccgccgtgcccgtggcctgcaggcggcccacgacggtggaaaaacgattttccaccgcgcgctcgacacctccgtagaggtcgttgtagctgtagtacaggaacagtccctccgccagcacgagcaccagcaccgtgatcagcaggctgccgcgtatccagcggcggataatgctggtggattgcatggcggtgagctcctttcctgtgggattttggtaggtggtgagagggcggggtgagagatgacggaagcggcgcgggagggatgaatttttcccctacggttggtggaaggtttgcggcaaaggatgtagggggcggcgtcctcggcgccccgcggaggggtcaagacccctccctacgatgcaaaagataaatgggcggtaatggcaaggtggagggccgggcatgcccggcccctacggactggcgttcccggtttacgcattccacctatacccatacccccaaaccgtgaggatatgctgcgggctgctgggctcgtcctcgatcttcatgcgcaggcggcggatgttcacgtcaacgatcttcacatcgccgaaataatttttgccccagacaccttccaggattttttcacgcaccagcgcggtacccggattgcggaagaacagctccatgatttggaactcgacctgcgtcaggtcgatgggcttgccggacttgtacagaatgcggctcttttcgtccagcacaaacgggccgctgaccagctgctccagctcctcggcggacctggcggtggtaccgctgccgcggtggatgcggcgggtcagcgcctccagacgcgcgatcagctccgacaccgaaaacggcttcgtaatgtaatcgtctgcgccgatggacagaccgcggatcttgtcgctctcctgccctttggccgacacgatgataatgccgatgtcgctgtcaccgcggcggatcgtctcgcagagactcaagccgtccatgcccggcagcataatatccaaaagtgccgcgtcgcagcgttccccgctgtgcatcagttccagcgcgcgctcggcactgggggcctcgacgacctcccagccggccattttcaggttcagggctaccatttcgcggatgctggcttcgtcttcgactaccaaaactcgtttcataaacccgatttccctttctgtatcaatttgatcccagcagcaccgtgttctggctgatgaaatccaggctcaatccataatacgacgttacaacgcgggcttgcagctgctggctgccaatatttgcaatgcgcagatagttgccgacgccggtggccgcgttgtccgcggggtcaacgacgcgcatctcgcagtagaccgtcgtgccctcggcgttgcagatcagccaccccgtgccgctctggttggagcggatcaggatgctgccgtgcatcgactcgggcagctccataaaaatgttatactcgctgtcgtagacgccaaacttgctgttgccgcccgccatcgaggtgtaatccttccagagcagaaagctcagccgcttgtccatcggcgtttgcagcgtgccgccgtcgtcgatctccacagggatgtccaccgtgccgttgtcgtcaaggtcgcggctcagcagctcgcggtggtagcgcagcgtgctgcgctggatgtcgctcatgccgctgggacggtagggctgcaaaaagcccgttgcttcgtcatacagaatgatgtccgataccagactgcttgtgccggtccaggcatccatgaccaggtacatgccgtcgtcgctgccggtgcccgcgtgcagggccgcacagctgctgtagacgccctcgcccaggttcagcgtctgggtcgagcggaactcgccgtcgttggcggtcagcagctgcagcgtcacgccgcccagctcagtgtccggcggcagagccagaaccaggtcctgcgtgtcacccttgccggtgaagtccgcgacgatcatgtcggtatagctcttgctgatgaccgtagataacgtatcaccgtcatattgatagacaaccagatattggtcgccctggggcgagacataccctgccagcagctgctggctcgacgtgtctcggaggtgcgcggcggaaaagctctgcacctcgctggtcaggccctccaccacgcggctgacgcgccagctgctctcccccgtcggctcgagcacggccagccagacgttggagctggtcgtgtcggtggtgtagaggacggcggcctcgtctgtgccgtcgccgtcccagtcaccgaacgcaaacggcgaaaggaaatcgccgctggcgggatactttaaggttgcgctgccgcccaggtagttgttcagcgccttttgcagggccgcgctctcgccggagagctgcggcgcgcgcagcaaggtctcgacatcccctgccgcactgcaccccgccagcagcacaggcacaaggagcagcgccgcgatttttttcaacatgtggcttgctcctttcttgcacaaatatacagatatagtatagcacatttacggcagcgccgcaatgcctaacagcatgagaaggcagccgacggcggcgcccaaaatgcctgcagtgcggtgggcggggtgcagggcaccgggcagcagctgggccagtgccacccagaccatgacgcccgccgccagcacaacggtgccgttcagaaagcccggcgtgaagagccgacgcaggaacagccacgccagcaccgccccgagcggctcggccaggccggagacgagcgcggccagcacacccgcggtgcggcggcgcgttgcgtaagcaaacggcacggccacagcaagtccttccgggatattgtgcagggcgatggccgctgcggtgcgcagaccgagcgacggatccgccgtgcccgcgaagaaggtcagtacgccctccgggaaattatgcagcagcagcgccagccccgtgacaagtgccgtgcgcatggcagcggcgcgggccgggtctccgcttttgccaaagcgggcggccagtgcagcttcctcgggcaggagccgccccagcagacccgcggtcagcatcccgagcgccagcagtgacacaaccgctccgccgcaggccagcggcggcaggtagcccccgtaaaacgccagcgcctccggcatcaggtcggccagcgacgccgtgagcatgaccccgcccgcaaagcccgcgctggccgccagcagacgctccgacggcggacagagcacagccagcagcccgcccacccccgtggacagccccgccaccgtcgtaagtacaatcggtgaatcttgcataggtacgcccccttttatggtttataaaggtatgcggcgcagggggcggggtatgaccggggcgcggggtgtacttttgcaggagagtatgatatacttaacctagttcaataaatcggaatttgataaaggagtgattgtatgaaaaagatagtatgtatagtaattttgattttagcaattacagggttattgaatggtattagctatttgatttcaggtattagtgcaagaggaataggtggtgtaaattatgggagggttatctttccactattagttggagctattgctgtttattttttaaaaaaggagaagaaaaaatagaaaacttccagtttgttggcgcggtcatgtttttttccccccccacacacccatttaaaaatagatgcgcaccacaaggccatacgccccttgcggcggccagagggctggccgccctacaccctgcccggagggcaactgccaactgacgggacgtcggggacgccgccccctaccgctgcacaaaacaaaatgcgggagactgctgacgaaaagcagtctcccgcatttattggtttagaatttcttcgtttccttctttgcaaagaaggaacaccgcattcccttaatacccgctgccggcctcgccggaggtcaacagcttgacggcacgggaggtgccgaggcggtctgcgccgaggtcgaggaacttctcgatgtcctcaacggtggagatgccgcccgcagccttgatcttgcagcgacccgcaacgtgctttgcgaacagctcaatgtcgtggaaggtcgcaccgccggtggagaagccggtagatgtcttgatgaagtcggcaccggcctcgggcacgatgtcgcacatcttgatcttctcgtcgtcggtcagcaggcaggtctcgatgatgaccttcagtaccttgtcgcccacagcagccttgacggcggcaatgtcattgcggacgtcgtcgtactgcttgttcttcagccagccgatgttgatgaccatatcgacctcggaagcgccgttctcgatggcagttttagcctcaaaggccttgcttttggtgtccatagcgccgagggggaagccgacgacacagcagaccggcacgcggcccgccatatactcgacggcctgcttgacgtagcaggtgttgatgcagaccgacgcgcagtggttggcgatggcctcatcgcagagggtccggatctggggccaggttgcctcaggcttgagcagggtgtggtcgaccttgctcagcatttcttccttcgtgtatttcatcggaaattttctcctttctcacaatgcttgcacaggcgtgcctgatgcaggcccagggcagcgaaaacgatggaggtgatgctgaccgtggcaccgatgatgcccagaatcagccccaccagacggaatgcgtgaccgcgaactttctgtttcataggggatgcctcctttgggggacgtagttttttgtgcacgagctgcctggctccatgggtcagcagcgggtgcttgagcacaaattttgccactttaaaaataagcatggtatgctccttccggatgatgcgttacttctttttaaagataaacaatttgctgaaaacgtagttggacacgataacgatgacctggctgaacagcttgacacccatggcccacagcttgccgttggccgcggcaaacgcgacatgcggtcccagcaggctgacgcccagccagatgatgacctggtccatgaccatcgtggcgatgcggcaggagacaaactgcccgaactccgcccaggccgccttgcccttgttcgcgcttttgaacacgaacgtgcgatttgtccaataggcaaagaggatacagatgcagttgtccagaatattgccgatgcccgcggcaaagtctgtaccgaacgccgcctggaagcccgcaaagacgaccaggttcagcagcgttgcgaccccgccgaaaaacaggtaggccagaccctcatagtatttttggatgatgtctttgagtttttgcatgatgtacccgttttacgtttgtaggggcgggcactgcccgcccgcggggcgtcgaggacgccgccccctacaggttacttgtacaaaaaggggcctgcctgttacaacaggcaggccccatacggttgcgcaatgactaagaattattcagcgtcctcgccgttctcgtcgaggcaggccttcatggacaggctgatgcgcttgcgatcaaagtcaacggcggtcagcttaacgcggaccccgtcaccgaccttcagcacgtcggagaccttgttcacgcgctcattgctgatctcgctgatatgaacgagaccatcaatgcccggcatgatgcggacgaaagcgccgaacttggtgatggagacaacgggagctgtgaactcggtgccgacgggaacctcattctccagcttgacccaggggttgtcctcttccttcttgtagcccagggagaccttctggttctcgggatcgtagctcttgacgtagacctcgatctcgtcgccaaccttgacgacctcggagggatgcttgatgttgttccagctcagctcgctgatgtggcacaggccatcgacaccgcccacgtcaacgaaagcgccgtaagaggtcaggctcttgacaacgcccttatactgcttgccgacctcaacattggcccagaactcctcacgcttggccttgttggcctcggcagtgaccttgttgatggagccgacgatcttgcggcctgcgcactcggtaatgaccagctgaacgtgctggccaaccagcttggtgtagtcctcgtcacggcgcatggtggcctgagaacggggaacaaagacgcggacgcccttgacgttgacaacaacgccgcccttgttggcctccatgacgtcgccttccataacggtgccgttctcggcagcctcggagacgtccttcatgcccttctgggcctcaaaacggacgcgggacagggtgtcaacaccctcctgatcgttggtcttgacaacaaccagatccagctcgtcgccctctttaacaaggtcttccatcttggcgttggggtcatggctcatctcgcgcaggggcacaatgccggtgtgcttggagccgtcgacaccgacgatgcactccgtcggggaaacgctgatgaccttggcttttacgatctttccggtgtaaacatttgcattggcttcggtagctttgagcatctcctcgaagctcatgtcgtcacggatctcttcactcatactgttaagtacctcctcaattatagacgaaggcgttgaagccccggctgtcacgcccacacgcgccgcaccagcaagccatgcagggtcgagttcatcagcagtctcgacgttgatggccttggtatgccgcgcggcgacctgtaacagcttttgggtattggaagaatgatgaccaccaatgacgaccatgtgatcgcatttttggctgaggtcttccgcttcctgttgcctcgcccacgttgcattacatattgtatcaaaaattctggcttttgtacactctttttttaaaaaagctttgcaattttcccaactttccacgcgaaatgtcgtttgcgcgacgacgtagatggattcttgttgcaaaagcgtggggagcaatttttgcagctcctccagattggcaaaaacctgcacagggccgcttgtatggccgacaattccctgtacttcggggtggtcggcgtcgcctgcaacaagcaaaagcgcaccgtttttgtccgcttccatcgcgattttatggatttttgcaacaaacgggcaggtggcatcgtgatacgccaggctgcgtgtgcttattttatcatagacgcttctgggcacgccatggctgcggatgatgacctcatacccgtcgggcacggcgtcaatatccgggcaggtcacagcgcccttcgcctccagatcggccacgacctgggcgttgtggatcaatgggccgagggtcgcaaccttgcgtccctgcgccaataaatcataagtcagcttgaccgcgcggtccacaccaaagcagaagccggcggttttggcacggatgatctccatagataagctccttttgtaaactccttgcctccctctgcgagacagactcccccgaaacgggggagatggcgcttgcgccagaaggggagcagtggccccgcagggccggagggagagagccgtgtctttatccgaagcttcgggcctcggcaaagctctctcccctaccgcctgcgggcggagccccctcccagagggggccaaggggaatgtcattccggcagctgcggcttgtcgtccggtgcagcgggttcctccgctgccgtttcggccaggcgcacagcaaaggcgttgtcggccagcagctgctccagctcgtcgcgcaggcggttcttcatacggcgcagctccgccattttgtggctctgatccctgatctgcaggtccgcggcggggatcggctcaccaaagacgatgcgcaccttgcagaaaaggtgcagcctgccgtccttggtgccgtagatgatgcgcacaggcagcatgtccgcacccgcggcggcggcgatcacaaatgcgccgctcttgatcacgcccagcttgccggtctttgtgcgggtcccctcggggaagatcatgatgcccgtaccatttttgcactcgttcgtcagcttttcgacggtggtggtgtcgcccttgccgcgctcgatggaaacagcacccatgcagcgaaggaaccagccggccagcggatttttgaacagctcctccttggccagaatgcgcagccgcttccagtcaaatatcgttatagcgatcaagacagggtcaaggttggcaatgtggttcggtgcgatgacgtaggcgcgcccatcgcggacggccttcaaattctcgcgcccgatgacctcgaaccggaacagaatgtgggccagcacccagatgatgggcagcagaatccagtataaaagcatcgtcagcccccttagatgtgcgcaagaatcgtgcgcttgagcaggtcaaagctctcctgcaggccgatgctgcttgtgtccaccagaatggcgtcgtcggcctgtttgagcggggccacggcgcggtggctgtcctggtagtcgcgctgccggatgtcggccagcacggtggcaaagtccgcgggctggcccttctcggccagctccttggcgcggcgctgggcgcgggcctcggcgctggcggtcaggaagatcttgaccgtggcgttgggcagcacaaccgtgccgatgtcgcggccatccatcaggatgttctggctttcggccaagccgcgctgggtgtccagcaggaaggtgcgcaccgcggggtgtgcggccacggcggacgcggccatgccgatctcctcggcgcggatggccgtgctgacgtcctcgccgtttaaataaatgtgctgcgcaccgtcgatcaggcggatgccgagcttgacctgcggcagcagtgcggcgacagcgtcggcgtcatgcgggtcaacgcccgcgcagacggcgtacaggccgatggagcggtacatggcgccggtgtcaacgtagacatagccgaggtctttggcgagggccttggcgagactggatttaccggccccggacgggccgtcgattgcgatggaaatcatagttatcatccctttaaatagaatcgtctttggcttctccctttaggggagaagctgccgcccgcaggcggctgatgaggggagagcttgcgggggctgcccgttagaaggttaccgccgcagagccgcaggccgggcacgcccggcccctaccgggtggtttctccttcccgtgcagttgccgtaaggtctgccctcatccggccctgcggggccaccttccccctcgggggaaggctggggttacagcgccttggctgccgccacggcggttgaccaggcgatttgcaggttatacccgccggtgcgggcgtccacgtcgaggacctccccggcaaagtacaggcccgcgcacagcttgctggccatcgtcttggggtctacctcgcggacatcgacgccgccggcggtgatgacggcgtgctctttatcacccagtgcgctgaccggcacctgccagtgcttgcacaggtcaacgagcgcctgtttctgctcccgcgtgatctgcgcggccttcgtggcggggtcgatgccccacttttcgacggcgacgaggcgcatcgagttgggcagcagctttgccagcgccccctgcgcactgtggctgccctgctccgcaaagtcgcgggtcaggcggtcatagagcgttttttcatccagcgcaggctttaagtcaaactcacagatatagcggtgcttcgttatatcctcaatgtaggtgctggccgacaggacgagcggcccggacaggccgaagtgggtgaacagcgcctcgccctgctcggtaaacagcggcttgccgtcacagagcagcgtcagcgtaacgttgcgcagggccaggcccatcatgcggcggcaggccgggtcggggctgaccagactgcacaggctgggctgcggcggcatgatcgtgtgccccgcctgccgcgccagcctgtagccgctgccgtcgctgccggtggccggatagctgatgccgcccgtggcgatcagcgtgttttctgcccgcagcgtctcgccgcggtccgtcacagcgcccttgcagacgccgtcctcgatgaccagcttttttgcgctgccgcgcacaaattcggcatcgcgtgcataatcgcgcagcgcggccagcacgtcggcggcgcggtcactccggggaaatacccgccgcccgcgctcggttttgagcggcacgccgagcgactcgaacagctccatggccgccgacggcgggaaagcgtaaaggctcgaatacaaaaaccgcccgttatgccgcacatagggcaaaaactcccgcacgtcgctgtcgcttgtgacgttgcagcgtccctttccggtgataagcagcttttggcccggtcccttggggttgtgctccagcacggtcacggtcagcccgcgggcacaggcggccccggctgccatcaggcccgccgcgccgccgccgatgaccagtagatctgtcatgcgttctcccttcgtttgtcagtttttctcggtctgccgtacaaaagtagcccggcagatgcgtacaggaccagcagcggatgcaccgttgccaggtacatcgtgctggtgccgatgccgaagctggacacctcgacaaaggcgatcatggcacagcgcagcagcgcaatgccgaagatgccgaacagcagcagccacggcacaacggtctgcgccgtgcatttttgacgccgctgcggcaaaagctctgccagctggcacagcacggcgcagagcacgcccaccgtaagcaaaatactgcagacccgcgtccagccctgcatgacggcaaaaaccgtcttttggtacgggctgtagtagggcgtgtcctcccccgcgttggcggcgctgttgaagccgcagtgcaggtagccggaccaggcggcaaagtcgtcctcggtgccgatggaccgcagcgtctcatagggcgcacagtcccgcaggcccagcacatgccaaaagccgttccaggtctcggccagcgtcgaagggacgtaagccgccgagatcggctggctcgtcgccacgcgcctgccggtgcggctgggcagtgtgctcgcgtcgcaggcggcgttgatcttatcggccacggtctgccagtaggcgtcggcggtcttagcgtcggcgtagatgccctcaaactgcgcggcgcggcggatggcccaatagaagctgcccgcgcggtagtcgccgagatttgggtcgcggaaatcattctgcagctgggcgtcctcctccagccagtaggccagcggctccaattccggcacagcgtcgtaaattttctcgcgggcgtcggcgggcacggagaggtacggcgcggcgctgtcggtgtccacgcgcatcatcgcgcccatggccgcggcaaaggagccttccgaaaagtcggacagcgcaaacacgccgtagtgtgtgtaattgagggtgcagaaggtcagcacgccgacgccgagcatgacatacgggatgacctgcgcagccagagccttccagcggcgcttgcccgccagcaccacggccacaatgacggtggccgccgcggcaaacggcagcaggaacagcccggcgtcctcgcggtccagatagccgcaggccagacccgcgcccgccgcggccagccacggccagagcggcttttccggcgtgaacaccgcgcgcagcgccatgcccgccatgcccgcaaagaagtacagacacagcgccggaaagatgttgtcccggtagacgcgcagcgtgtaggccgcccaactcgacggcagaaacgccagcgccgcaaacagaccaagcgtcagcacgcggccctgtgcggggtcttttttacgccacagcgttgaaaacgcaagcgctgccagcagtgccgccccgcaccagagcgccgcgccgctgataagatacggcaggtgcagcgcgtgcagcagtgccagccacaccgggaagaacatggccttggacagcgtcagataatcatacgcgcccagccactgcccggctgtgatatggttggccgcgcggaacatcagctcgtcgtccagcggcgcaccgcccacccagatgtacgcctgctgaaagcccgtcagcgccagacgcaggcagaccagcagggcgcagagcacccagaaagcgcggcgggacagccgcgggcgaaaatgcttcatcggtaacttcctcatgcgttatttttgcagcttctcaatgctttccacaagatatttctgctgcctgaacgtcagatttaagagcagcgacagatacttgacgacgatggtcagcacggcgaacagccctgcaaacccgacggtgatgacgaacatcgtcgtcgtccagccctctaccgggtggccggtggcgaagatgacgagggtatagatcagctcggccagcgccaacgccatcatgcagagcgtgacggtcacgctggccttgaagccgaagttcgtgtagagcgtcaggctgtccagcgccagattgaaccggcccttctgcttaacggtcagctggccgtcaaattccagatcggccatccgtaagccgctggccgcgtaggccgccttgcggtagggcaggtgcgtgctggacgcatggacgcggttgatggcgcggcgcgtcaccagacggaacgcgtcggtgcgcaggcggtaggcgctctgggaatgggcgttgaacaccttataaaacaggctgctgccgccgcgcacggtgcgcgggcagaccgacacaatatcgttgccgtccagcgccgccctgtatgcctgcataataagcggcggcgcgtagcagagctcggtggagtcgaactcatagacatagtcgccgatggcggcatcgaggccggcgttcatggcgtcctcgagcccgtggtagatgctcatgtgcaaaatcgtcagcggggcgtcctgctccctgccccaggcgcgcagctgtttgaccgtgtcgtcggtgcaggcgtcgtccacgacgaccagctcatattgtttaaagttggcgtccagctctgcggccaccgtgcggcagaactccacggcgcgcgcgccgtcgttgtgcaggtagacgactgccgaaataaaattgttgtctttaagcatcatacatccaatacctcgtccaggtcgtataccgtgttgatcttgccggacagcacgctgacgagcttcggctcgtcgttcatcacgcggaccaccgtcgggcgcgagtcgtcgatctcgctggcctttaagatgggcttcatgctgaacaggctgctgtggtaggcaaagccgtattcttcctttaaatacttgcgggccagctggctcatgtagggccaggcgctttgcggcttggccgggcactcattgcagttgtacaggctgcccggcttgcacacgccgccgcattcctgctggcacgggaaggtcgcgacgctgtcatagctcgtctcatgcggggtgaaggtcacgctcgtcaggctgtgcaggccggtccggccgaagggcatcaggctgaaaaacggcccgtccatgaccgtgatgccggtgtttttcaggcttttgtccacggtgcacaaaatgatctcgcatttttcgtacttaataccgaacggcggcaggccgagcatggcgtgtacgtcgttgacgcccgcataggtcgcgttgagcaggtagggcgcttcggcggtgatgtctcccgcctgcacgcgccacgcgctgccgaccttctcgatggccgtcggcttgtggctgtacagtacctcaacgttgggcagtgcggcgagctgctccagaaaccagcgcttgagtatctgcgcatcgtaggtgtactcggtggtcaggaacgcgccgtcgcagagacccgggttgaagtagcgctcgggcgcaacgtcgtcgcagcggatgcctgccgccgcgcagaaccggcggaattccgccgcgttcgtccaggagaagtgcgcactggtggcgtagacctggtcaaactcggtgtgcaggcagaagccgtaatcattgcagaaccgctcaaaatagtgggcggacttgatggccgtggagtagctgcgcgggtagtggtagcccatatggacacgggcttggttgatgtaggtcgcgcgcatgaagggcgcggggtcgcgctccagcacaaggacgcgctgccccgccgcgccgcatttctgcgccgcgtacaggccgtacagccccgcgccgaggatgattttatcgtaggtcatagagcgtttcccctttttacattccttcggacgattgccgggcggatatgggatccgccccggcattgtaggggtcgatgctcatcatcgacccgggcactttgcggctgccgccaagtgccgcgggcgagcactgctcgcccctgcatctttgcaaaatagaacttacggattatacttcccggccagcgcattcagcagcaccttcatcaggtcgctgttgcccttgaagccgctgatcttcgtcggcgtcttgccagtggcagggtaggcgcgggtcacggggacctcgcaggccttcaggcccagctgcgtcgcgcggatgcttaaatacgccagcagctcatacccgccaaagacatcgcgcagcgggcggacatccgggtgggtcaggtactcgcggctgtaggcgcggtaggcgttggtcgtatcggtgaaccactggtgcgcccccaggctgacgagcggcgcgtggatgagccgcacggcggcatagcgcaccggcggcgtgttgatggcgtggccgccgcggataaaccggctgccctgcacgaggtcatagccctcctgcaattttgcgataaactcgggcacgtcctcgatggaatccttgttgttgccgtcgatggtcaggatgcctttataattgcggtccagcgcaaaatacatgcccatgcgcagctgggcgccctgcctgccggggccggttttcgtcagcagcgtgttgacgtggtagagcgccagcgtctcccgcttcatgctgccgtcggtggagccgccgtcgcagatgacgatgtcgcagagctggtcgatgcccgccttctgggcgcgacccagctcggtcaggatgcgcgcgccctcgttgatgacggggatcagcaggcagtagtcatggcggcggccctcaaactccacagccgtgtagtcgggcacgccgttcaagtttgtgcgctcatactcgatcatgcgaacacctccgcgatatagtccatcgtgcggcggatcgtatccacgtcggtgtgggccatctcgacggagacgaagccgcggtagccgacagcccccagcagcagcgccagctccttgtgctcggggcggcgctcaatcgggaccagacccggctcactgatgtggacatggctgacatactgcatatcatcgatgaagttctgcaagtgctctccctgcgccagcacggtggacaagtccagattgaccgacaagccggggttgtccagccgcttgacgagcgcaaaggcgtcggcggtgccgttcaggtagttcgtgtacatcggcgggttggcctccagcgccagatgcacgccgtaccgcgcggccaggttgcccgcctgcatgaagaacgcctcggcggcggcatcgttggcccccagcgggcgcatacggttcttcgggcagccgaacaccagcgacgggcagttcaggctgtgggcaaactggaacgcctgcgccgtgtagtccagcaggtgctcggtgtcggcagggtcaaagatattgcccttctggccgtaccagatgctttgcagactgggcaccgagaagccccagcggtttttgaggtagccgccgaacagcagcgcactcgtcaggttttcatacggtgcttcggagaaaatgcgggtcggggccagctccaggccggtgaagcccgcctgctgcatggccgcgtatacggtttcgtcatcgtccttctgccatgcaatgttcgagatggcaagctgatagctcggcatgggtcagtccctccaactgcgcataaagcgcgtaatatcatccaattcttgttgttttgtgcaaaggtaatcgccgctgccgcccaaaagcgccgcgtggcggctgcgcaggtcgtagtcaaacgggagcttgggcagttcattgtgccagtccgctttgccggtcacggcagtgtagacctcggcggcggagaccggcggcgtgcagaggtgcagcagctttacatcagcggcgcgggcagcctccatatccgaccagagacggcctaaattatagaactggtagcggctgcgggcatcggtgaaggccagggcattgaagtcgttggctgcaaaaaaggcgcgcagcgctgccgggtcggcggtgccgttcagcttgtaaaagccgttgtccgccagcgtgtaggctgatttgacaagcggcgattttgccgccagctcgctgtatttatccggtctgagcatggccggggtgatggtgtgcaggtcaaagaggaagtttttcctgatgccggtgccgtacagtgcgggcaggcgcacaatgagcgcgtcgggaaagtcctcccgcacccagcgctccaattgcagacggtttttgccgtaggcgggcagagcttcggtgtcctgcgcggggctgtcctcatagacgccgcggctgtctgccagcacagcaatgctggaaatcaggacaagtcttttgggcgcgatttggcggatattctcccgcgcggcgcgcatgacggcaaggtcggcctccgggtcggcgttggccaggaacatggccgccggcacgcccgcgtagacacagaggtcagggcgggtgccgtactgcgcggttatgtcactgctgtggcatgccgcggcgaaggtatgtttggccagcaggttgccccccacaaacccggtggagccgacgagcaagtcacaggacatagcaattcccctttgcacatttatacaaggtacattatagcctattgcgggggaaaaagcaacgccctgtgcgcaatcgcacagggcgttagctataaagccttccccccttgggggaaggtggccccgcgggggaagcctttacttcttcaaaaactcctcaataattttcagtccgaccgccccagatttttccgggtggaactggcagccgaggacgctgccgtggctggcggcggcgcagatctcgcgcccgccgtagacggtgtcggccaggcggtcctcatcgcggacgggcttagcctcgtagctgtggataaaatagcactcctcgccgggcttgagcgcggccagcgctgtgccggaaaaatccgtgcgtccgccgccggggtagagcggatcccagctgatgtgcggcaccttctgcggatggccgtccacgtccgtgtcggggatctttaccacacggcccggaataagcccaaggcccttgtgcaggccgaactcctccgactcgtcaaacagcatctgcattcctaagcagatgcccagcagcggcgtaccggcggcggccttctggcgaatcggctcgatcagccccagccgtgccagaccgtccatgccgtccttgaacgcgccgacgcccggcagcaccagcttttccgcggccagcacgtccgccgggtcactggtcagcagcgtttcggccccaaagtgggcaaacgcatggcggacgctcaacaggttggacaggccgtagtcaatcactgttaccttcatacctggcgcacctccaccccgcccgcgcggatgtcctctttcagctccgtcacggtttcttttttgtaatgcagcacagcggcacaggccacggcgtccgcgcccgcgttggcagcgtccacaatgtcgtcgccgcagccgacaccgccgccgcagatgaccggcacgttcacggctttcgtcacggcctcgatcaattcaaggtccataccctgctgtaacccctcgttgtcaacgctggtcagcagaatttcgcccgcgcccagcgccacgccgcgcttggcccactcgacgacgtcatagccggagtgggcgcggccattgtcgtagtaggcttcccacttgccgggccaggtgcggctgcgcttggcctgaatcgacagcaccatgcactggctgccgaacgcctcggccacctcggtgataagctcggggcgcttgatggccgccgtgttgatggccgccttgtccgcacccatcgacaggatgtggcgcacatcctcaacgctgcgcagaccgccgcccacgcagacgggaatatacacatcatcgactgtttttcgcacaatatcgcttaaattgttgcggttgtacaggctggcgacgatgtcgatatagagcagctcgtctatcccggcctcataatattctttggcaaacgcattcgggtcgcccagcttgcgcagtccctcgagctggatccccttgacaaggttggtgtccttgacgtccaatcttgcgattagtcgtatttttttgctcataactgaacctttctaaagccttcccctgtgggggaaggtggccgcgcgaagcaaggccggatgaggggcgcgtatgccgcgattgcccgcaaacgggttgccgcggaaagtccacccctcatcagtccgcttcgcggatagcttcccccaagggggaagccttttcgctcaaatttcgtggtgcgtccccctcgggtcgccccacagtacctcgctgtcgccctcgtagggggtgtggcggagcttccacatattgtcctccctcttccagatgtgggggctgcggaagcggtccgccaggtccataaagtagtcgcggtccatcctgggctgctcaaacagctggctggcccaggggaagtgctggcggtccagcgacagatatttgaagatttccttttcaaagcggtccgggtactcgccgtcaaacttcttgcagagcgccttgccctcgtccagcgtaatctcctcgttgcggatctcctgcgcggcgtcgtaggtcgtgcggccgatgccgtacttgatgtaggtcgtgtagtagaagaagtcgtcgatcttgtcatcgatggagttgtacttggagtaggtgccctgtgtgcgctccggcgcggggcggaagccaccgtgctcgacgctgtagtagtacgcgccctgcggatgccacttctcgtaatagcccagataccgcacctgaatgtggtttttctcaaggttggaggtctcggacggcaggtagatggccaaatcggccttgtccactttgtagtcctcctccagctggcgcaggctgacaccgcccagataaatgtggtcgtagtcgttgaccgcaaagaaatgttcgtcgcgcagggcggagttgttatcggcaatcgggttgccgaactcggcctcgttctcgccgtagaacaccagcgggatgccgaacttcgcggccatcttgggtgccagctgcttctggcccagaatgaacggctggaacgggtggaacaggttttccgtcgcaaggcgggtcagcaggcggtgggtcatgccgttgggggtgcacaggtagttgtcaaagcccgcgtggatccacgcctgcatgttctcccagccccagggcgtgtagatgtgcggggcccaggtgacggtcagcgggtgcataccgtacttgtatttcagcaggtgcgcggcgtagaagctgtccttgccgccggagccgggcaccagacagtcatagctgccgtcgttcttgcggtactggtcgcagagctcgcgcagctccttctcgcgcagggcccagtcgatatggccgttggccttgttgtggcaggcatggcaggcatcacagacgccgtcctcctgaatgaccatcgttttcttgatggagttgatcgtgtgctcaaactcatagcaggagttgggcttctggttgctcatgacacattccttgcagaactgtacgtgcttgggcaggccgtagtaggcttcgagctggtcctccgggatatcgggggcgtatttgctgtaatcaatgtcgatgtgacggggaatcttttccatattctttacactccaatcggctctgtatcaaaatgaaaagacgccgtccgatagcaatgctatcagacggcgcctttgccgtatgcaggtattatagcacagttttatgcgggatgcaagcatacggtgggaattttgtacgcaaacaggggaagatgtggtatactgtttaaaacccccctgcctttgcagggtaccgggctgagccttccaccgtccatttacagaaagcgaggtgtccttcatgaccgaccctgaaatttgtgccgccgtccggcagcactacggccttgccgtgcgggcagtggagcgcattgaccgaggcagtgcagcgctttttaagctgtacggcagcgaggcagccttcattttaaaggtgtttcaacccaagttccgcgcggacagcattttgcgggaggtacatgtcacagattttctgcgccagaacgggatttctgtgcccgagtacattccctgccgaaacggagacttctactttatgcagaacggccgcatcgccattctgcaggcatttattcccgggcaaacacgggaaaagggctgctgttccaaaagggagctgctcgactccgccagactgctggcgcaaattgtaaatgccttagagcactacccctacgatgatctgttaccctgtgagatttccagatacggcagcgcagcgcggctgctgcaggccaaagccgcctacgcggacttgatggcagcagcccacgccgatgccgtacacggagcagagatctgccgcgacttgcaggaccgccttgtaatgattgcccgtgtgtccgatgcgggtgcatttgtgaacacaaacgccctgaccctcaaacgctctcacggcgattacagcgtaatgcagctgctgtatgacgggtcagagatcaaggccgtgctggattttgtcaacgccggagaagtaccgattgcgtgggaactgatacggtcatacagctacatggactgcacattcaatgcggcacgactggccgcctacacaaacgaataccgcaggtacgccgaagtgagcatggacgacctgcggtatatgccgtatctgtatttaagccagcttttgagcagcacttatgggtacaagcagtatttacagaccggggatgaggaattgctggcctttgggcgatggcggacagagatgtgccgctatttaatagccaacgccagggaggtttctgcagagttggtacggcttgcttaaaggtgccgcactgtacgcaattactccgcaatacgcaccccatcaataaagactgcccgcacctcggtcatgacctcgaaggggcagccgttcgtgatgacgacgtccgcgtccttgcccacctccagcgagccgacgcggtcggctacgccgatgtgctccgccgggttgatggtgatggccttcagcgcgtcgaacgggtccatgccggccttgaccgccatgcctgcgcagagcggcagatactgctgcggaatgaccgagttgtcggtgatgatggacacgtggcagcccgcgttggccagcacgccgggggttttccaggatttgttctgcagctcaaacttgctggcaaacgtcaggctcgggccgacagccatcggcacgtccttttcttttgccagctcgtccgcaatgagatgtccctcggtcacatgctccagcgtcaggcgcagatcgaactcccgcgcaatgcgcagcgccgtaaagatgtcgttggcctggtgggcgtgggcctttaaggggatctcccgcgccagcaccggcagcagggcctcgagcttctggttgtaggcgggcattttggtcacgtcaccgttggccgcctgcttgcgtgcgccgtagtcccgcgcctgcatcagtgcaccgcgcaggaacgccgccgtggacatgcgggtggagtcgcacttgtcacggtagcagcgcttgggattctcgccaaaggcgcacttcatggcgacggggtcacggacgatcatgttgtccacgcgctcgccgacggttttcatcgccagaaaggtgccgcccagcacgttggcgctgcccgggccggtgcagacgcaggtcacgcccgccttacgcgcgtcggccagcgaggggtcgcgcgggttgatgccgtcgatggcgcgcagctgcggcgtccagatgtcgttcatctcgttgtagtcgcagccctcatacccgatgccgtagccgtcgagacctatatgggtatgcgcgtccacaaagccgggataaacctccaacccatcggcgtcaaacacagcagcgtccgccggggcagtcagcccgccgccgatagcggcaatcttaccgtcagccagcagaatgtcggccttgcaggcgtcgcggtggacagcgtcatggacgaggccgccgcggatgagggtggtcatggttattcctccgttataccgtaggggcgcattctatatgcgcccgcagagtccgcggctgcggaagcgtccacgggcggatatggaatccgcccctacattttattttctgcttacttacacgttaaaatccaagcacgtccttaccgcggtgtacggtcttaccttgccgtctgccacggcgacgtgggcggggtgggtggagtagcctttgagcgcggcggcgtcggtgaaggtcgtgtccagcatcaggtcagcgttggcagagctgggcagggcgtcggtgtagacgcggacatccagcaggccggggatcttaccggccagaccctccagcccttccttgatgccggccttgacggcggccttttcggcgtcgggcatctcctttaatttccacaaaataacatgacgtaccattacttgttttcctcccagatggggtgcttgagctgccactcgccgtactcgttcttctcgaacaggtcgcggttgtagaatttgtccagaatggcccagaactcggtctcggtgtagccgcagaactcgcagaagtcacgaacgcagagcgggtcgagcttgccgtcgcgctccttgatgatggggatagcctcctcgcgggtcatcatgccgtagcggatgtagcgggccgtgtagtcggtggcggcggcgtggccgaacttgggatacttgagccagctgtgcaccagataggcgcgggagtcgatctggtcaaagttctcggcatggtgggtgcggtcccactcgtgggtcaggtcgtggaagccgtgggccttggcgatctggtagttcttgtagctgttccagggcacaaagtagctcatgtagaacgggtcgagcttggcgcgctcctcggcgctgggggccagcgtcagagagaggtctttctcggtcacgccgtcgcccagcagttcctccatcggcataccgacggcgacaccgttctcgatctggcccatggcggagtaggtctccttatcggcgttgccgccgtactcaaagctgacgttctcgccgtagcagagcatcggggtgttgaacttggcggccatgtgcagcgggaaggtgtagatcaggcggtccacgtaccaggtcggcttgccgtacttctcaaagaatttgcgcatcagcgtcttttgcaccttgatgttgggcttgcaggagatgatcgtgcagccgaactcctcgctgatgttcttgagattgtggatgcccgcctgcgtcatggggaagttatcctcgacgctgaacaggatggggttcatgtgcatgacctctttcagcatccagacctggaagtggctgtccttgccgccggagacggcgacggcgcagtcatagccgccggggccgttcatgccgcggtacttgtcgcagtaggcctcgaactccttgaaacgggcatcccagtccacatttttgcggctctcgtagtggcggcaggcgctgcacacgccctccgcgtcgaaggtgatcccgggtcgggtgtcgggcatcgtacattttttgcagtaacgcataagaacactccttatatttatatattatatttcgttgttgtaccgtaggggtcgatgcttgcatccgcccctacaaatacggcagggcttgtgttgtcgcttttttcacttcgccgccgcatgcacggcgtccgcgccggcgaagtcatagatgacgaaccgtccgtcgttgtagacctcggtgcattcgccgttctgcacaaggcccgcgttctccgccgggccgtcggtctcggtgtcgatgagcaggaacgggtgccgcgggtcggtggtcaggtggtccttgcgctgcagccagttggggacgtagtcctcatccagcgattgcagcgtccagacgtccaattttccgttcgtcagctccgtcatggcgttgccgttccagaacgtggcgtagccttcggtgtagccgttgtccaccagccagtcggcggcggcgtccagccccttgtgggcgagatacgggttttcgatctcctgccggacggtgttgacggcgcagaccgtgaagcagcctgccagcaccacacccagcagctgccgcgcaccgggcaggcggaagtcctcggttttcagctccaccgccatgaccgcaatggccaccggcatgttcatgagccagaagtagaggtaatactcgtggaagtaggcgtaggagatgccgcagaccgccagcatggcgacgagcagcagcacaagcagctggtcgttcgtctccagctttttcagccgcagcagcagccgcacgatgcagaagaacatccatccgcccagcagcagaccgatgcccgccgcaatgccgccgaagtggaagatgccggagccgttctggtagccgaactcatggaagaagtccatcaggatgcggtccagcgtgaaccagttctcgtcgcggtcccagacgatgaagctgtaggacttgaaatcatacagccgcgacatgacgctgttgctgatgaaataccccgccgcgccggccaccgccgtgacaagcgacgccgcaaacagccgcacctgacggcggcagtgctgcagggccgttttccagtcggacgtgccgctgtcatgcagtgcaagcaccagcaggatcgccgcggcaatgcagagcggcgcgtggaacaccataagctgcttgacgccgttcatgcccgcgatggccgtgacgatgcaggccgcgagccattgcagtgcgcagtgcttgttgtcggcgtcgaggctgcgcagcaccagcgccagcacaagcatataaaagaaggtatagacgaggtagtacccgccgtagatggcgtagaccagatagtgctggccgaacggccacagcagcgtgcccaccatccagaggccgggccgcccgagcctggcgcatttgacaaagaacagcatacacgccgcgtacagtgccagcgcaacggccatgccgaatgcgcgcgccagatgccagtcatccgggaaaagcagcagcccccgccggtagaaccattgcagattgacgaccttcaattccgtggagtagaaccagttgtggctgatgatgctgccctctttgttgagcaggtcggagaggatcatctccgacgcgaggtcggaatcgacgatccatttgccgggcacaagctggtaccacaggtcaaacagatacgccgccgccatccagagccacggcagcgcctgccagagcctgtgcaaagccccgccctttgtttgttgtttcattcggtttctcctgattcaggtttctagttatttaaactataccgcatttgggcgcaaagcgcaaggtatgcagggcaaaaaagcgccttgacgctgtgcggcattcatgctatagtgggggtaatgactcgtttttctgcgggactgtgcgggcttttccagcaatcggagggcccgctgcttttatatttgcttatcgtttgcttatcggagggcggccatgcagcagctacgcagcgccatacacaatgccattgccagatttttgaaaaatcagcccccggcgcgcatcattgccgtgggctttgcgctgctgattttgctgggcgcggcgctgctgatgctgccgtttgccgcgcaccccggcgcacacgtcggcccgctggacgcgctgtttaccgcaacgagcgccgtctgtgtgaccgggctggtcgtggtggacaccggcgacacgttcagcctgttcgggcaggctgtcattgcgattttgatacagatcggcggtctgggcgtcgcgtccatcggcatggggctggcgctggtcgccgggcggcgcatcagcttaaagggccgctccctcgtgcgggaggcgctgaacgtcgagagcctggagggcatggtgcgccttgtgcgggccatcctgctggtgaccctgatctgcgaggtcgccggtgcggcgctcagctttccctcgtttgcccgcgatcacatgccgctgcaggcggtgtggctgagcattttccactcgatcgccgccttcaacaacgcgggctttgacgcactgggcggcgggcagagcctgatcccctatcagaacgatccgctgctgaacctcgtcaccgatgcgctcgtcattgtgggcggcatcggcttcatggtcattctggacgtggggcgctgccgcgggcagttccgcagaatgacgttccacaccaaggtcgtgctctccaccacagcggtgctgctggtgggcggcgcggtgcttttgcagctgaccgaccacatgggctggctggcggcgtttttccagagcatgacggcccgtacggcgggcttttccagcgtggatttaggcagcataagcaacgcgggtctgctggtcatcatgatcttaatgttcatcggcgcatcgccgggctcgacgggcggcggcatcaagaccacaacgttttttgtgctgatgcagcaggtgcggtccatcttctccaagcggcggctcggcgcgttccaccggcgtctgccggacagctcgctgtccaaggccgcgaccatcatgctgatggggctgatggtcgtgggcggcggcacgtttgcgctctgcgtgctggagccgcagctcgattttggccgcctactgtttgagcagatctcggcctacagcacggcggggctttccaccggcatcacggcggagttatgccctgccagccgggtggttctgatcctgacaatgttcattggccgcgtgggcgcggtgacgctgctctccctctgggtggagcgccccgagcccaccgcccgctataccgaagaagccattacgattgggtaaatgcgaagccgcaaggcaaccaccgtaggggcggattccatatccgcccgtgcccgcctgccacaggcacggctccgcgggcgcatatagaatgcgcccctacatactctgccgcccggcgcggcgcagaaagggtacacgtatgtttgacaaaaagaaaaatgccgccgagagctacggcgtaatcgggttaggccggttcggcacggcgctggtcaagacgctggccgccgccggcaaggaggtcattgccgttgacaaggacgaggcaaaggtcaaggccgtgcgcggctacaccgactatgcgtttgtcatcgacgagctgaacgagacctctttgaaggagaccggcatgcagaactgcggcacggtcacgatctgcatcggtgagcagattgacatcagcatcctgacgacgatgctcgtcacaaagctgggcgtgccgcacgtcatctccaaggccgccagtgaggtgcacggcgaggtgctcaagcgtctcggggccgaggtcgtctacccggaggccgacatggccgtgcgcatcggcaagcggctgatctctggcaatctgctggactacatcgccctcggcgacggcgtcgaggtgcggcgcatcacggtgggcggcaggatgctgggcaagagtgtgcgggcgctggatctgcgcaaggtctacggcatcaacatcatcgccgtcgagcacggccagcagacgaacgtggagttctccgccgattacacctttaaagagggggatgccgtcgcggtcatcggcaagttcgggaagatcgataagtttgagaaagaaatgtaatttcaggcagatgccgggttccgggtggcctctgctttaaatcaccggcctgtaggggctgggcatgcccgtcccgcgactttgctatgctgcccgtcaacgggctgaacccttccggctttcttcgcccgcgcaaaaaaggcccccttgtcaaagggggctggccgcgtcagcggactgggggattccgacgggccttgcctgattgcccgttacacccgcagacggccaggaatccctccgcctcgcttgcgctcggcacctccctttgacaagggaggctttcttcgcggggcgtcggggacgccgcctacattcctcgttaaaaaactaaccgcacaaattttgcgcttttcggcttgcaaatctgccctttatgtcgtacaatataaactaacgaaatacggcaaaaacaggaggaattccaaatggaacacagcaatccgatcctgatgggcaacaacagcccgcagaaattcatcaccatcggtgaggtgatgctgcgcctgaccccgccgaattatgagaagatccgcatggcctccgcctttgaggccagctacggcggcagcgaggccaacatcgcgctggcgctggcgaacctcggcgtggattccaccttcttcagcgtcgtgcccaacaactctctgggcaaaagcgctgtgcgctggctgcgctgcaacgacgtacactgcacgccgatgatcctctccaccaaagaggagacccccagccaccgtttgggcacctactatctggagaccggctacggcatccgccccagcaaggtcatttatgaccgtatgcacagcgccctgaccgagtacgacctgacgaaggtcgatctggacgagctgttcgacggttttgactggctgcacctgtccggcatcaccccggcgctgaacaaaaattgtgcggatttcatcctgcgctgcctgcgcgccgccaaggagaagggcctgaccgtcagctttgacggcaacttccgctccacgctctggagctgggaggaggcccgcgactactgcacccagtgcctgccctatgtcgatgtgctgttcggcattgagccgtaccacctgtggaaggacgacgaggatcattccaaaggcgactggaaggacggcgtgcccctgcagcccagctatgagcagcaggacgagatcttccagcatttcattgaccgctacccgaatttgaagtgcattgcccgccatgtgcgctacgtccactccggcagcgagaacagcttgaaggcattcatgtggtacgaggggcacaccttcgagtccaagctcttcaccttcaacattctggaccgcgtcggcggcggcgacgcttttgccagcggcctgatctacgcgatgatgcacgactacaagccgatggacatggtcaactttgctgtggcgtccagcgccatcaagcacaccatccacggcgacgccaacattaccgacgacgtcgagagcatccgcaacctgatgaacatgaattacgatattaagcggtaatttgcactaaggcaacaccgcacaattcccgccttacggcttaagcaccgcttcggcggctgcggcgcggcatctgcgttgccaaaatgctcgataagacatccagtattatctgcgcttttggcttagcagctgccgcacctcgctcgccgtatcggcacttagaattatgcggtgttgccctcagtaaaatctgccgacccgatgttgggtcggcagattttgtttatggatgcggagccttccccttcgggggaaggtgtctgcggccccgcccgcagacggatgaggggcgcgtgtgcggagattgcctgtttacggcaggcagcggaaaactgcggcggggtgaaggcaccccgccctacatctgacgatacggtgcgctgtagggcggcatgccctcatgccgccgcggtcattgctccgtttttccgttcacctccgcgttgatcccggccccaatgaacagaagattgatgatcacatacagccacaaaataatcagaatgaccgccgtcagcgagccgtagatatacgacagacgccagaaatgcaggatgtaaaacgagaacacacgggagaagaccagccaccccgccgttgcaaagatcgtgcccggcagctggctgcgcggcgtgcgccgcccgccggggacgtagatgtaaatcagcaaaagcagcccgaacagcagcgggaccgagacgatccggccaatgctggccacccgctgcagcggggccacaatggccgcgtaatggcgaaaaagcggcaatgtatcggcaaagcgcgtaaacagggagtgcatgccctgcagcgccagcatgaccaaaagcagcagctcaaacacaaaggtgtagccaatcgccagcaggcggttcaaaaacgtccggtgcgagccgggcgtcagcctttgcaggccgatctgcagtgcgttcataccgcccgacgccgagacgatggtcgtcagcacagccagcgacgccacaaactgtgcagactggccgcttaaattttgcaaaaggccgaggatggcagtctgtatctcggggatctgcggcaggaagtccgccagcagctcggcgacgccttctaccgagaagccgggcaccaggttgacaagcatcagcacccacatcagcagcgggaaggacgccgtcagcagaaacagcgtggcggatccggcgtagaccgccatgtccagcgccaggtagcggcgcagcacggcggcggtgatctgtacccaacggggcggtttttgtttcatggcggctccttgtggggggatgtgtgtggcggcgtggttgcggggcgaacagtattcatccgcggacgtgtgcggctgcggcaaagctcccgggtcgatgacgagcatcgacccctacattcctacattatagtataaatgccccgcgtgcgcaacctttgccccgacgcagagcatcgcgcccggcgcaaagtggccgtcacctggcgggagcttggcggccaataaggccatacacaaaaaatttacaggcacagccgcccaaagcggttaaaaatatatcaaaaacacttgcgcattttcggttttatgcgtataataaggataaaccccttggggcgcggtgcgccccgccaaaaatgtgaaacataccgagaggagcttttactatgggtttgggtaaaaagaccattgacgatgagaactacgccggcaagcgcgtactggttcgctgcgacttcaacgtcccgatgaaggacggcgttatcaccaacgataaccgcatcaacgccgcactgccgaccatcaagaagctgattgccgacggcgctaaggtcatcctgtgcagccatctgggcaagccgaagaacggccccgaggccaagttcagcctggcccccgttgctgtccgcctgagcgagaagctgggccagcctgttacctttgcgaacgatgacaatgtcgtcggcgagaacgccaaggctgctgttgccaccatgggcaacggcgaggtcgttctgctgcagaacacccgtttccgcaaggaggagaccaagaacgagcccgctttcagcgaggagctggccagcttggccgacgcttacgttgacgacgccttcggctcctgccaccgcgctcactgctccaccgccggtgtgaccgactatgtcaaggataccgctgtcggctacctgatggagaaggagatcaagtatctcggcaacgccgtgaacgatcccgagcgtcccttcaccgctattctgggcggcgctaaggttgcagacaagctgaacgtcatctccaacctgctggagaaggtcgacacgctgatcatcggcggcggcatggcctacaccttcctgaaggcccagggctacgagatcggcaagagcctgtgcgacgacagcaagctcgactactgcaaggacatgatggccaaggccaaggagaagggcgttaagctgctgctgcccgtcgatgccgcctgcatcaaggacttccccgatcccatcgacgctcccgtcgataccgtgatcgttcccgtcaccgcgatcccggctgacaaggagggctgcgacatcggccccgagtccatgaagctgtttgctgacgccgtcaaggccagcaagaccgttgtctggaacggccccatgggcgtgtttgagaacccgaccctggctgccggcaccctggctgttgccaaggctatggccgagagcgacgctaccaccgttatcggcggcggcgactccgctgcagctgtccagcagatgggcctgggcgacaagatgacccacatctccaccggcggcggcgcttctctcgagtacctcgagggcaaggagctgcccggcatcgccgtcatccagaaggcataatttgtaaggatacccgcaggagcgcggcggcagagccgccgcgccctttttgtaaaaaggcttcccctgaggggctgcgcccgcaggcgcgtgtcggagcgcaaccgccggaggcggctcttagcgcggagcctgaagctgtcgccgcaggcgactgatgagggtcgagtttgccatattatcccgttgacgggtcatatccgcacacccgcccctcatccggcctgcggccaccttcccccgcgggggaaggcttattatggaaggagtaatcaccatggataaacagaatcgtaaagccatcatcgccggcaactggaaaatgaacaagaccgctaccgaggccaaggacctcatcagcgagctgatccccgctgtcaaggacgccggctgcgaggtcgtcatctgcgttcccttcaccgatctcgtcaccgccgtcgagatgaccaagggcaccaacatccacgtcggcgccgagaacgtccactttgagaagtccggtgccttcaccggcgagatcagcgccgacatgctgaccgacctcggcgttgagtacgtcgtcatcggccacagcgagcgccgccagtactttgccgagaccaacgagaccgtcaacaagcgcaccaaggctgctctggccggcggcctgaagcccatcatctgcgtcggcgagagcctcgaccagcgtgagcagggcgtgaccgaggagctggtccgtatgcaggtcaagatcgcgctgaacggcgtgaccgctgacgagctgaagaacgtcgtcatcgcctacgagcccatctgggccatcggcaccggcaagaccgctaccgctgaccaggccgaggaggtctgcgccgccatccgcaaggtcgtcggcgagctgtacggcgaggacgccgccaaggccctgaccgtccagtacggcggcagcatgaacccgaagaacgccgaggagctgctgagcaagcccgacgttgacggcggcctgatcggcggcgcttccctgaaggccgaccagtttgcggtcatcgttgacgctgccaccaaaggctgattgcaacaaaggcttccccttgggggaagctgtccgcgcagcggactgatgagggaaaagctgatggagccacccgtttaagggcgacgccggaaacgccgccctcatccggcgcgtcccgcgccaccttcccccggcgggggaaggcttttcaacaaaaaggagtctacaaatttatgtctaaaaaacctgttatgctctgcatcatggacggcttcggctggacgccggacgagacctacggcaacgccgtggctgccgcgaacaagccgaatctggacaagatctttgccaattaccccatgaccaccatccaggccagcggcttggctgtcggcctgcccgacggccagatgggcaactctgaggtcggccacaccaacatgggcgcgggccgtatcgtctaccagcagctgaccctcatcaccaagtccatcaaggacggcgagatgctcaagaaccccgtgctggtcaagaacatgaaggctgccatcgacgcgggcaaggccatccacctgatgggtctggtcggcaccggcggcgtccacagccatgccgaccactggtacggtgtgctggagatggccaagcacatgggtgcgaaggacgtctacctgcactgcatcatggatggccgtgacaccgacccgcacagcggcaagggcttcctggccgacctgcaggccaagctggacgagttggggctgggcaagatcgcctctgtctccggacgttactacgccatggaccgcgacaacaactgggaccgcgaggagaaggcctacgccgcgttcgtctacggcgagggcaaccacgccgccaacgctgccgaggccatcgaggccagctatgccgccgacgtgaccgacgagttcgtcattcccgttgtcacctgcgagggtggccgcgtgcaggacggcgacaccgtcatcttcatgaacttccgcccggatcgtgcccgtcagatgacccgcatcttctgcgacgacaactttaccggctttgagcgccgcggtggccgcaagcaggtccactatgtctgcatggccgagtacgacgccacgatgcccaactgcgaggtcgcgtacccgccggtggagctgaagaacacgctgggcgagtatctggccgcccacggcaagacccagctgcgcattgccgagaccgagaagtacgcccatgtgaccttcttcttcaacggcggtgttgagcagccctgcgagggcgaggaccgcaaggtcatccccagcccgaaggttgccacctacgacctcaagcccgaaatgagcgcctacgaggttgccgacgagtgcaaggcccgcattgagagcggcaagtacgacgtcatcatcctgaacttcgccaactgcgacatggtcggccacaccggcgtgtttgacgcagcggtcaaggccgtcgaggctgttgacaagtgcgtgggcgaggtcaccgacgcggtgctgaacgcaggcggcgtcgttttcctgactgccgaccacggcaacgccgagaagatgaagaaccccgacggttccccgttcacggcccacaccaccaacgtcgtgcccttcgcggtcatcggcgcgggcgacgtgaagctgcgcgagggcggctgcctggcggacatcgccccgacgatgctgccctatatcggtctgcccgtccccgaggaaatgaccggcaagagcattattgcggagtaacaagccttttcgagaaaaggcttggcgaaaagctttaaaagtatgacccttaaagcggcaggcttcggcctgccgctttctttatgccccaatcccttgcgctgggacgcgaaatcgtgtataataagaaattactgatgattataaaggggaggtgcggccatgagcctgcaaagttttggatttttcggctttctgctggtcgtggccgccgtctacctgcatctgccgcagcgctggcagagcgcgtttctgctggcggccagctgggtattttacgcgctggcgatgccgtcgatgctgccggtcacgattgtcattgccgtgttcacctacctgtgcggacgcggcatgaccgcgcgggaaggtgcccgcaaaacggcgttcctgcgcattggcgttgtagggctgctggcgatcctggcgttctttaagtataacggcgcgttcgcgtcggacggcggctggcaggccgtcgccatgccgctgggcatcagcttttacagctttgcggcgatctcctacttaattgatgccgcgcgcggcgactgcgaggtcgagaagaattttattgactgtgcgctgtttttgaacttttttgccaccgtcacgcaggggcccatctgccgcgccgggacgctgctgccccagtttaaaaaggagcaccgctttgacgccgcccgcacggtgcgcgccctgcggctgatggcactgggcctgtttaagttagtggccgtcagcgacgtgctggggctgctggtggatgaagtgttcccgaactaccgcagctacggcgggcctatgctggtgctggccgcggtgttttacacgttccagctgtattttaacttctccggctactccgaggtcgcgcgggccgtgggtctgctgctggggctggagctgcccgagaacttcaagacgccgttctttgccacgaatttttcgggcttctggagccggtggcacatcagcttttcgtcgtggctgcaggattatctgttcatgccgctggcgtgggcggatgtctccgggttgacgggcggcaaaatcagccgtctgcccgcggaattttgcgtgttcacggtcttttttgcctccggcttctggcacggcaacacgctgccttttgtggtgtggggccttttgcaggccagctaccgcctgggcgaggagctgctgcaccgccgtttgggcaagccgaaaaagaaagccccggcccgcgtgctgtgggccaagcgcgccggtgtgtttgtgctgtggtgcgtgagcatggtgttcttccgtgtggggtcgtcccccgccgccgcaccgctgaccgtcggggatgcgttcgcgtatctgggccgctgctttatgggctggggccccgcgcagtttgcgtcggagctgtacgccgccgcgtccggcggattttatgccaacgccatcatggtcgcggcgtactacgggtttgtggcgctggtgctggcgctggcattttaccttgacacccgccgggcgtttgcgtttaaaaacaagccgtccgaaatctgcctggccaatgaaaagcaccgctgggccgtgtattatgcccttgtcattgccctgctggcaggctatatcatgcagagcggcgggtttgggagcagcggatttggtatgtacgcggggttctgacagcctctctcttgccttcccctgattgcccgtagacggtttcaccacccgcaggctctgccctcatcagtcagcgggcggagccgctgacagcttcccccgcggggaagccactcttacgaaaggaggctgtggcccattgaaaaacattctcaaaaagctggcgctgctggcaattcccgtgctgctctggctcgcctttttcattgcatttgagccgaacaactatttcgggctgaaggcctccgcaacgtccagccagccggttgcgcgggtgcgggcgtaccagcaggatcccggcacaaatttgattttgggtgacagccgtctggcccactttgacatgggccttgtggacagcctgtccgggcagtcgtggcagaacctcgcgttcggcggtgcatcgttaaaagagacgcttgacctggccgactatctgctggattccggccacgacgcagacacactgctggtcgaggtctcgttctacacgctgaacgcgggctacaacacggaccgcttcgccacgctggaggaaacgctgaacaatccgctggcctactgcttcaacctcgagtacaacgtcaacgcgctgaccgttgccatggacacactgcgcggcacgcccgatacgattgaatccggcgactgggtcgaggcggattatctggccgatgacggcacagttttgccgctgcaccgcaaattatacgactacaccgcgaccatcacgccgcgctgcaaaagctgggcgctgaatgacgagcagttcaaccgcctgcacacgctggcccggcgctgccagagcgagggcgtgcggctcatcgtagttttgccgccgatggccgacaatgtgcggaccgaggtctgcgatgtgttcggcatcaccgagaccatgcagggcacggtgctgccgacgctggccgcctgggctgatgaatgcggctttaccctgctggattacgagtggggcggcagcgttattaccgacgatgacaagcagttttttgacggatttcatctcgatgaaaaatacggtctgccgatgtggacggaagaactggttggggatatagcagcataaaggcttccccttcgggggaagctgtccgcggagcggacggatgagggcaaagtttcccacaaccgcccataaatgggcaatatccataagctctcccctcatccggccctgcggggccaccttcagtctccgcgctaagagccgccttcggcggttgcgctccgacacgcgcctgcgggcgcagccccaagggggaaggctttttaggaggtacacatggctttagactttctgattttgtatgagcataccgtccgcgagtatgagagcgaccttttgctgaagctcgagctcgagcggcgcggctacacggcggagatccgccagctgctggaccccaagcatctgcggctgttcggcaaagacaagcccgaggtgctcgtcgccagctgcatgtatgacaacgaggccatcaacagccatgtgtacaacaatattggccgctgcaacaaaatcgtcaacctgcactgggagcagatgctctccgacacgcaggaggagggcgactggttcaacatgaacggcaacgccaagcgctgcgtgcagacctgctggggcaagcgcaccgccgcccgcctgcaggcccacggcatggatgccaaaaacacgcccgtgaccggcgcggtcatgatggactttctgcgcccggagtttgacggctactttaaggacaaggaaacgctctgcagggagttcggccttgacccggccaagcagctgcacctgtacatttccagcttcggctatgccagcatgaacgacgacgaggtcgccgagctttccaaaatggcgggcactgattttacgggctttgccaaaaccaaccgcgtttcgatgcaggaaacgctgcgttggttcgatgaatatctgggcgcacacccggaggtggagcttgtctaccgccgccatcccagcgagtggaacagccccgcgctggaggagctggcgaagaagcgccccaacttccacgtgatctttgcggactcggtcaagcagtggatcgttgcggcggactcgatctcgatctggatgagcaccgccatcgccgaggtctacatggccggcaagagctgccacatcctgcgccccgtccccattgaacacgagtacgacccggtcatttacaaggacgcccattacgtgacgcgctacgacgagttcgccgccgccatggccgagccggagccgccgttcccgattgcgaaggacgtcatcgagggctattttgaccccagcgagacgcccgcctacaagcggatggccgacctgctggaggacgtgtacaagaaccccccgcgggacgagccgatgggcgacggctttacgccgcacttcaacaagctgaaattctgcgcgctggcgggggtacacttcctctaccgccgcggctgggagccgaagaagctctttgccttctgcccgccgctggccaattttgcccaacgcatctacggctacgtggacaaggcgcatgtgacgccggagcaggtcgcggcgatggaagcaaggatcaagccgtttgtgaaataacgaccaccgcgtaggggccgggcatgcccggccctgcactgtacggcaaacgcgcggcaaaggcaaggccgcgggccgggcatgcccggcccctacaacgttacgacaggacaagcaactatgtcagatcaaaagagatcctccggtgaatccttcgccgggaatgtgatgaaatattcggtggcgacctatctgggctttgccatcacggggctggcgctcatcgtcaaggggctgctgcccgctgaggtgctgggcgcaccggtcaccttcatgacttacacggccacgatcatgaacatcggcattctggggctggatcaggcgctgctgcgcttttaccatgagccacccgccggggccgagccgcggcagctgttcgcggcctgcacgcgcatttcggcggcgtttatgatgctgctgggcgtagcgggcagtgtgttctttgcgcagccgctggcagcggcgttcggtctgggcagcgccgggccgggcattgtgccgctgctgttcctcaacgcggcgctgtatatgctggtacgctacttaaacgtgctgctgcgcttggaaaacgacctgcgcgcctacacggcggagacgctctggatgcagggctgctacaacctgttttacctgctgccgggcttttttacatccaacgtctttgttctggctgttgcggcgattctaagttttggtgttgtggcgattgcgtttgggtataaataccgcgccgccgtgtttgcgccgctgcccggcgcacagctgggcggcatcgcgcgccagaccgtgccctacggcgtggcgctggccccggcgcagattttgttcagcctgtccagcggcatctgcctttcgttcgtcggcaacgccagcggcgagaacgcccagggcctgtttgccttcggctacagcctggcgcagctcgtcacggccattcaggcgggcttttccacctactgggggccctacgtctacagccattaccgcgacgagcaggagcgcatctgccgcgtgcatgacgtgctgaatttgctgatcttcggcttcttctgcgtgctggtcatgttcgaggacatcgtctttgtcatcttcccggacaagcgcggctgtcttgccattttcccgctgctgatgctggccgttgtgttcaacattctgtgcgagggcacggtctacggcaattcgattgcccgcaagccgtggcatgacacgattggcatcgggctgggggcgctgtccaactttgggctctgcgccctgcttgtgcccgcgttcgggctgaccggcgcggcgctggcgctggctgccagcaacggccttgcgtttttgtaccgcagcatcacggggcagatgtactaccgcacggtggccagctaccccaagacgatctccggctttctgctggcgttcgcggtcacggccatcggcacgctgctgtggcagcacttctttataaaatttgcgctggtaggcgtgattttgtttatctactgcactctctaccgcgcacagctcgccagactctggagcatgggccttggcatcctgcgcggcatcttccatagaaagtaaggcgacaacatgaagcattgcggcacacaagagctggaaacggagcggctggtcctgcggcggctctccatcgacgacagcgaaatgatgtacaacaactgggccaacgacaggcaggtgacccaatacctgcgctggaacgcccaccgcagctggggcgagaccgccgagacgctgaacgagtgggaaaagcactacgatgacccggccttttaccagtggggcatcaccgacaggcacaccaaggtgctgtttggcacgatcagcctcttccccgccccggcgctgaagatgggctggcacctgaacaccgaacgccttggccccgcctgggaggtcggctatgcgctgggccgcaagtggtggaataaaggctacgccaccgaggcactctgtaccgtgcgggactactggtttgacactgtgggcgcagactggctggccgccgtccacgccaatgagaacattgccagcagcgcagttttgcagaaggcaggctttgtctacgaccatgacgtgacggaccgcaagtttgacggcacgccggtcccctgccgcgcctaccatcttttgaaagaggaattatgaccgataacacgacagaattagactttggcaccactgcccagaaagccaccgacgccgagaagctgcccgtggtgctgctggcgctggatcagggcaggtacgatatggcgcgcagcctggacgagctgcgggcgctggccgacgccaacggcatggacgccgtggccgaggtcgtgcagaagcgtgcgacgcccgaggccgcaacgctgctgggtgagggcaaggtcgccgaggcgcgacttgtctgccagaatgtgaacgcggcagccgccatctttgacggcgagctgaccggcagccagatccgcaacctgtcggcggcactgcaagtcgaggtgctggaccgcacgatgctgattttggagattttccgcgcccgcgccacgacgaacgagggcaagctgcagaccgagcttgccacgctgcgctatcagctgccgcgtctgcaggggctgggcgaagccctgagccgccagggcggcggcggcgggggcggcgggggtgcccgccgcggcgccggtgagacaaaactcgagctggaccgccgccatctgcaccaccgcattgagcatctcgagggccgcttaaaggagctggaaaaacgccgcggcgagacccgccgggcccgccagaagaacaatgtgcctgtggtcgcgctggtcggctacacgaacgtcggcaagtcgagcctgctgaacgcgctgtgcggcgagcagatttttgaagccgacatgctgtttgccacccttgacccgacggcccgcaagctggtgctgcccagcggcctgcaaatcattctggtggataccgtcggctttgtcagccgcctgccgcaccatctggtggaggcgttcaaatccacgctggaggaggccgcgttcgcggatgtcatcgtcaaggtggccgacgcgggcgacgcacaggccgccgaacagctggccgtgaccgatgaggtgctgggcagcctcgactgcacggacatcccccagctggtcgtctacaacaagtgcgacacctccaacaccgtggcctttgacccggatatcctgctgacgagcgcgaaaaccggctacggtctgcccgcactgctggcaaagctcgacgaggtgctgaaccaccgcgtgcgcacgatcgagatcgtgctgccctatgacaagctggcgctggcggacattctccgcagccgcggcagcgtcgccgcggaggaataccgcgaggatggcgtgtattaccgcggcacagtcaaaattgacgatttgcatcggtttgaggagtttttggtttgattgcccgtgcgctttgccttcccccttgggggaaggtggccccgcagggccggatgagggaaaagcttgtcgttgccgcctgtaaacaaatcacggtagcaaggtttcccctcatcagtcagcggtcagggccgctgacagcttccccccttgggggaagccttttctcccattgacaccgcctttccgtccgcctataatgaaaccattgaatgtcttataaaggggtaataactatgtctaccgtccgcacccgttttgcgccgtcgcccacgggctatatgcacgtcggcaacctgcgcaccgcactgtacacctatctgcaggcgcgccacaacggcggcacctttatcctgcgcattgaggacaccgaccagggccgcctggtcgagggcgctaccgacatcatctacggcacgctcaaggctaccggcctgacctgggacgagggtcccgacatcggcggccctgtcggcccctatgtccagagcgagcgcatgggcatgttcaagcagtatgccgagcagctggtcaaggccggcaaggcgtactactgcttctgcaccgaggagcgcctgaacgaaatgcacgaggcccagcgcgctgcgggcgaaatgacccactacgacggccactgccgccacctgtccgccgaggaagttgccgccaagctggccgcgggcgagccctatgtcatccgccagaagatccccgaaagcggcgtggcgggctttgacgatgttgtctacggtcatatcgaggtcgatgtcagggagctggacgaccagattttgatcaagaccgacggtatgccgacctacaactttgcgaacgtcgtggacgaccacctgatgggcattacccatgtcatccgcggcagcgagtatctgtcctcgacgccgaagtacaacctgctgtacgatgcgttcggctgggagaagcccgtctacatccactgcccgcccgtcatgaaggacgcgcagaacaagctgtcgaagcgcaacggcgatgccagctatcaggacctcgtggcgaagggctatctgcccgccgccgtgctgaactatctgctgctgctgggctgggcacccgagggcgagcaggagattttctctctggacgagatgatcaagatctgggatccggcccgcatttccaagtccccggccatctttgacccgctgaagctgcgtgccatcaacgcttcctacatccgtgccctgcccgctgaggagttccgccgcctggccgacccgttcatcgacagcgccgtacactgcagcattgaccgtgacctgctctgcgccaacctgcagccccgctgcgaggtgctggaggacatcccgccgcagctcgacttctttgacgccgtgctgcccattgacgctgagatgtaccgcaacaagaagcagaaaacgacccccgagtccgcgaaggaggccctgaccgccctgctgcccgtgctggaggcgcagaccgattggacccgtgacgcgatctttgaggcgtgcaagacgctggccgagagcatggagaagaagaacggctggctgctgttcccgctgggcatcgccctctccggcaagtcccgcaccccgggcggcggcaccgacctggccgcgatgatggggaaagaggagaccgttaagcgcgtgaaggcggcgctggagaagctgtaagtaacggtaagccgcgttttgtaggggcgggcactgctcacccgcggacgttgccgcagccacagggtttccgggcggatatggaatccgcccctacgatgtaggggtcgatgcccgccaccgacccgcgtgtatggcggttgccgctatgtaccgcgggcgaaccatgtccgcccctgcatcctttataaaaagcaacggtgcagctgcaaaatcgcagctgcaccgtatttttgttttcgccccgcggggcgaaaactccaccatatttattatttattattttttatctattatttatagtatcgttcctccgccgacgaccacgtcgccgtcatacagcaccacggcctggccgcgggtgatggcgcgctggggctcgtcaaaaacgaccttcacaaggccgttttccagcgggtaggctgtcgcgggctgctcgacctggcggtagcgggccttggccttgacgcgcatgggggcggtcagctcgggaaccgaaatccagttgaagtccccggcgatcagcgtcgtcttgaacagctcgctctcggggccgacggtgacggtgttcttctccatatccttgccgcagacgtagaccggtgcgcccaacgccagccccagccccttgcgctggccgcaggtgtagcgcaccgcgccgtggtggcggcccacaacgttgccgttcacgtccaaaaagtcgccgtccgggtaatatttgccagtgtagcgctccataaagccgacgtagtcgccgtcgggcacaaagcagatgtcttggctgtcgtgcttgcgcgcgttgcagaagccctgctcctcggcgatcttgcggatggacggtttgtccatgccgcccagcgggaacttcgtgtgcgccagctgatcctgggtcaggacgtagagcacatagctctggtctttatcggtgtacagtgctttttttagcagccagcggcccgtggcggggtcctgctcgatgcgggcgtagtggcctgtgaccacatagtccaggccgtgcgcccgggcaaagtccagcattttgtcaaatttcatcgtgcggttgcagtcgatacaggggttcggcgtgccgcccgcctcgtaggtctcgatgaacttggcaatgaccttttcacggaattcctcggtgtagttcacgacctcaaacgggatgtcgagctggaacgcgacctcggcagcgtcctcgacgtccttcgccgagcagcaggtgtggaacccgctctggcccagatcctcattctggtacaggcgcatggtcgcgcccatgcagcggcagcccgcctgcttcatcaggtaggcggcgacggtgctgtccacgccgccgctcatggcgatcaacgcgccgggggtatttgacataggggcctccttggttaaaaaaatgtgcagcacggttctttcgtgctgcacatttttgcttttgagttgtaggggcgaggcatgcctcgcccgcggcctcgccttatcagggcattgccgggaaagctgcgggccggacatgtccggcccctacggccttcacttcgtatgcaacagtacctttattatagcaaaggtttcctgttattgcaatcagtccgcgaacagcggggtggacagataacggtcaccggtgtcgggcagcagggccacgatggtcttgcccttgttctcggggcgcttggccagctggatggcggcccagatcgcagcgccggaggagatgccaaccagcacgccctccttgtggccgacctgcttgccggtggcaaaggcgtcctcgttggtgacggggatgatctcatcgtagaccttggtgttcagcacgtcgggcacaaagccggcgccgatgccctgaatcttgtgcgcgcccgcagtgcccttgctcagcacgggggaggaagccggctcaacggccacgaccttgacgttggggttctggctcttcaggtactcgccgacaccggtcacagtgccgcccgtaccgacaccggccacgaagatgtcgaccttgccgtcggtgtcctcccagatttcggggccggtggtgcgcttgtgggcatcggggttggccgggtttacaaactggccgggcacaaagctgttggggatctccttcgccagctcgtcggccttggcaatggcgcccttcatgcccttggcaccgtcggtcagcaccagctcggcgccgtaggccttcatcagctggcggcgctcgacgctcatcgtctcgggcatgacgatgatgatgcggtagccgcgggcggcggcaacggacgccagaccgataccggtgttgccggaggtcggctcgatgatgacggagccgggcttcagcttgccggtggcctcggcgtcgtcgatcatggccctggcgatacggtccttgacggaaccggcggggttgaaatattccagtttagcgagaatttttgcctcaaggttctcagcgttttcaatatgggtgagctccagcagcggggtgtggccgatcagctggtctgcggaagtataaatcttgctcatggtagtttcctccatcgtcatttctgtttatttgtaaagcggtcgcggttttacagctcatgacggcgacatcgcgcgtatggcacaaatccctttcgcatatcaattcatacctttcttgtaggttgataggattgtacaacatattttcccgtttgtcaatagggtaacagggaatttcccaaaattattttgcaaaaaggtgttgccatcctatttaccaacctgtataataggttataagaacagtaaggagcataccactatgatgatttcaacgaagggccgttatgcgctgcgtgttatgatcgatattgccgagcaccagcacgacggctatatccccctgaaggagatcgccgcacggcaggaaatttccgaaaagtatctggaggccatcgtgaagagccttgtcaaggagcgctacctgaccggtctgcgcggcaagtccggcggctaccgcctgaccaaagcgcccgaggagtacaccgtcggcagtatcctgcgcctgagcgagggcagcctggccccggtggcctgcctggagcagaaccccgtggagtgccgccgcatggccgagtgccgcaccctgccgatgtggcgcaagctgaatacgatgatcaacgactatttcgacggcatcactctggcggacctggtgaacaccagccagccggggaatgattatgtgatttgaaatcaaacgccttcccccgtgggggaagccttataataaaaaggagctatgcccgtgggcatagctctctttattgctgtcagacgatttcgaccttttccatgacaaccggcgtgcggggcttgtcgttccagtcggtggcaacgttggcgatctcatcgacgacctcaatgccgttcacaacatggccaaaggcggcgtagctgccgtccagatgcggggcatcctggtgcatgatgaagaactggctgccggcggagttcgggtccatcgagcgggccatgctgatgacaccgcgggtgtgcttgatggggttggcaacgccgttctgcaggaactcgcccttgatgtgccagccggggccgcccatgccggtgccctgcgggtcaccgccctggatcatgaagccgggaataatgcggtggaaggtcaggccgttgtaaaagccgtccttgacgagcttctcaaagttctcgcaggtgatgggggctacgctgtggtccagctcaatgtcgatggtcttgccgttctgcatggtaatgcgaatcatacggtgttctccttttcggtttgatttgttgtgtcagggtcgctctcgggggtggcgatgccctgcagatagctcatactgccgagcttttcggcaaattctgcggggggcagccggttcatccagtacagcagcgccgcccccatgaactgctcactgcgaaaaactgcctttggcagcagcgcaaacaggccgccgtcgtgatgctcgccggtaaacgggtcggtccagtcgtcgggcaggcgcttgtccagctgccgcggcgagacgtggcccgtgatgaagccgcgcccgccgaacagcggctccacgagccagaaaaacacccggcgcacgccgtgcttactggggaacagcccgcgcagcctgtaggtgtgccagaacgcatcggccaggtactccacggggatgtcctcgccgtaggtttccagcagacaggtatgcagcagcgccgtgatgtcggccagctcctcccctgtgggcagggggctgacgtcatcgacgggaaccagcgcagagccggtgtcctcggcgtggagcgtcgagtcgagcgcgatctccagatagccgtgcccgcccttacccgcgtagggctggccgggcgcgcacatggcacagatgaacggatgcacgacggtatccgcggcgtagtggctcaaaaagccgagcgtgtactcgacctgcgggcgggtcttgacgttggcgcaaagactgcgcaggaacgcgccggtcttttcctcgtgcatacggttgccgaggccgggcaggtcatagcggcgcttggcgcgctttttccagatttcaaagcagaaaaagctgtccgggccgttggcacccgccgcaaacgccgccgggcactgaatcttgtagtggatggtttccgcagcttttcttgcggtgcgcacatgggtatagccttccggcatgtgggatcccctttcgtatcagcgtaggtataattgtactgcgtggaagggaaaaagtcaaattttcaaaaaggctttcccatcggggctgcgcccgcaggcgcgtgtcggagcgcaaccgccgtaggcggctcttggcgcgtagactgaagctgtcaccgaaggtgacggatgggggcaaagtttgccacagcattccgctcacgggcaatcgtggcaaggttacccctcatccgacctcgggcgtggcctcggccatcttcccccaagggggggaaggcattctgcttcaaatcttcctctcgtcattcgtcataactttcggcagcacgccaaagtacagcacggcaccgacaatgatgatgaggatgacggacaaaatgccgaacggtccggcggcagcattgatggcatcgacctgctcggcggtggctgtggcggcggtcagaccctggtcggccagcattttgttggcggtaaaggcactgacaaagccgacgagcgccgggcccatgatggacgagaacttgccgaagatgtcaaagaagccgaagaactcgccgctgcgggccttgtcgggaatgagcttgccgaacatcgagcgggacagcgcctgaatgccgccctggctggtggcgcagagcacggccagcatccagaactgccacaggctgttcataaagaacgcaaatacgcagataaacatgtagacgcagatgccgacgccgaccatcgtgcgcgcgccgaacttctcggccagcttcatgtagagcaggcagaacggcaggcccagcacctgcaccaacagcagcgccagcagcataccggcggagtccagccccaggttggtgccgtagcttgtagacatgctgatgatggtatgcacaccgtcgatgtagaaaaagtacgatataatgtagatcagcatgggcttatccgcgccaatctccttcatggtcgtgaacacgtttttaatgctggcccccacatcgcccttcttatagggcttgccggaggtttgctcacagtttttgagcagcgggacactgaacacaagccaccacacggcggtcaggccaaagatgaacccgaggcaggtcagcatcggcacgccgacggcgttcatgatgaggaagatcagcaaggggatcgtcgagccgccgatgtagccgaggccgtagcccagcgtcgagaccgagtccatgcggtcctccgtcgtgacgtcggtcaggaaagcgtcgtagtagatgcaggacgcatcaaagccgatggtgcttgtgatgtagagcaccagcactatcgccgcgaccctgcccgccgcatccggcgaggcggtgaagtccatgaacggcgtgaaggaaagccctgctaccgagacaacgccgatgagcataaatgccgtgaacagctttttgcgcataccgcggatgtcgccgaacacgcccaggaacggcgcgctgagggcgacgatggccatagccaggctggtggcaaagccccaggtggacatgctggacacgctgtcggcggtgtagcccgcaacggtgtcaaagaagatgggcaggatggtcacgacgatgaccgagtgggcgctgttggcccagtcgtacatcatccagctgatctcctgtttggtgaattttttcaggaagcccatggaagaaaacctccgcatttgttattgcacgctttttgcgtgcttgtataattattgtaacattttgctccgtcaaaaacaacaagccccgccgacgtttcggtcagcagggcgtaaaagttttgtaatgtttttgtggcagattgacggaggaagtttgcggtgcagcacactgccgggaaatacccgtaggggcgcattccatatgcgcccgtggaattgtgctaaagtcagcgcggcacgggcggatatagaatccgcccctacgatgttcgctattttttatcttgcccgcagctcccagaacgccacggcccctgccgcggccacgttcagtgagtctacgccgtgctgcatggggatcatgacggtgtagtcacagtgggcaatcgtggtgcgggccaggccgtcgccctctgtgcccagcacgatggcaaggcgcggctcggcgcgcagcgcggggtcatcgatgctgacggcgcggctgtccagcgccatggcggcagttttaaagccgagcgcgtgcaggcgggccatcccggcctcgggccagtcggcagggctgtcacccagcgttgcccacggcacctggaacaccgtgcccatgctgacgcggacggcacggcggcagagcgggtcgcagcaggacggcgagagcagcaccgcgtccatgcccagtgcggcggccccgcggaagatggccccgatgttggtggaatccacgataccctccagcaccgcgacgcggcgggcttctctgcacagcgcctcgacgctgcgcggctgcggacggcgcatggcgcagagcacaccccgggtcagcgcgtagccggtcagggcctgcagcacgctgcggtccgcggtgtagacggcggcatcggggcagcgggccagcacgcccgcggcggggccgtcgatctggcggcgctccatcaaaaaggagagcggttcgcacccggcgtccagcgccgtgccgatgaccttggggctttcggcgatgaagatacccttttcgggctccagcttattgcgcagctgggcctcggtgagcctggtgtaaggagccagctcgggggcggataaatctgtgatttcgatgatatggggcatggggatagctcctttgtgggagaatttgtatataaatgatacaacaaacattgacgcagtgcaagccccaagccttcccccttggggctgcgcccgcaggcgcgtgtcggagcgcaaccgccgaaggcggctcttagcgcggagactgaaggtggccccgcagggccggatgaggggcgggtatgtgggggagctatccgtaaacgggcaattgcggcaggtcgcccccccatccgtctgcgggcagagccgcagacaccttcctcctaggggaaaggctctctgcgtaaacaaaacccgccgcccatggggcttgcaacccacgggcggcggtgttctatataatccctgttccctctgaaagtctttacaaattactcgacagcgtcaagagcctgtgccagatcagcgatgatgtcgtcgacgtgctcggtgccgatagacaggcggatcgtgttttcctgaatgccgacgtcggccagctcctcgggggagagctgggcatgggtggtggtggccgggtggatgaccaggctcttcacatcagcgacgttggccagcagagagaagatctgcaggtggtcgatgaacgcaaaggcttccttctggccgcccttgatgttgaaggtaaagatggacgcgccgccgttggggaaatacttctcatacagggcgtggtcggggtggtcgggcaggctgggatggttgaccttttccaccttggggtggtgggtcaggaacgcaacgaccttcttggtgttctcgacgtggcggtccagacgcagggagagggtctcggtgccctgcagcagcaggaaggcgttgaacgggctgatgcacgcgccggtgtcacgcaggatgatggcgcggatgtaggtaacaaacgccgcggggcctgcagcgtccacaaagctgacgccgtggtagctggggttcggctccgagaaggcggggaacttgccgctggccttccagtcaaacttgccggagtcaacgatgacgccgcccagcgtggtgccgtggccgccgatgaacttggtggcggaatggaccacgatgtccgcgccgtgctcgatggggcggatcaggtacggcgtgccgaaggtgttgtcaatgaccagcggaatgccgtgcttgtgggcaatttcagcgatggcgtcgatgtcgggaatgtcggagttggggttgcccagcgtctccagatagacggcgcgggtgttctcctgaatggcaccctcgacctcagccaggttgtgggcatcgacgaaggtcgtcttgacgccgaaagcgggcagggtgtgctccagcaggttggaggtgccgccgtagatggttttctgggcgacgatgtggccgccgttctgggccaaagtctggatggtgtagttgatggcagctgcgccggaggccacagccagcgcggcgacaccgccctcgagcgcggcaatgcgcttctcaaagacatcctcggtggtgttggtcaggcggccatagatgttgccggcatccttgaggccaaagcggtctgcggcgtgctgggcgttatggaaaacataggaagtggtctggtagatgggcaccgcacgggaatcggtgacgggatcggcctgctcctggccgacgtgcagctgaagggtctcaaaatgcagtttacgctcgctcatgataaaatcctcatttctgttttatttctgttttttgtaaaagaaaagccgggggtcgttttggtacaactcccgggcagaatatgcagtgcggcgccggttttacaggcagtgcaaagcattgccctgcgcccggactgcatttgcccgggagttaggcattcggccacagcggaagttctgacgcagcagatcaccgaaaacgtgagccatatactttgcacctccttgcttttttgtaataaacctatgtgatttgtaggttgactgtatgataacacggaattaaccgtatgtcaataggaaaatagggattttttgcaaaaactgtaaacgggctgcaaggcaaagtttgccctcatccgtcagcggacgggaccgctgacagcttttcccgagggagaagcctttccgccgtgagccttcccctgcggggctgcgcccgcaggcgcgtgtcggagcgcaaccgccggaggcggctcttagcgcggagactgaaggtggccgaggccccgcccgaggccggatgagggccgcgttcgtgcagccgtccattcactattcataggcaacaccgcataattcccgccttacggcttaagcaccgctccggcggctgcggcacggcatctgcgttgccaaaatgctcgataatacacaaagtattatctgcgcttttggcttagcagctgccgcacctcgctcgccgtatcggcacttagaattatgcggttttgcccataacttacagttgaaatcttccccgaaatcggttatactgttttgtaataaagttgaaatatggggcattgtcccctttttaaaaaggagcaagcaatggcacacaccgttatggtcaccggcgcagacggctttattggcagccacctgaccgaagaactcgtcaagcgcggcgaaaaggtccgcgcgttctgtctgtacaattcctttggctcgctgggctggatcgacaccctgccgccggagatccgcagcgaaatcgacatcttcatgggcgacgtgcgcgaccccaacggcgtgcgcaccgccatgcgcgggcaggagcgcgtgttccatctggccgcgctcatcgcgatccccttctcctaccacagcccggacagctacgtggacaccaacatcaagggcacgctgaacgtgctgaacgccgcgcgtgagctggacacccagcgcgtgctcgtcacctccaccagcgaggtctacggcacggcgcagtacgtgcccatcgacgagaagcacccgttccagggccagagcccctactccgccaccaaaatcggcgcggaccgcctggccgagagcttctaccgcagctttgacctgcccgtcaccatcgtgcgcccgttcaacacctacggcccgcgccagagcggacgcgccattatcccgaccatcatcacccagctgctggccggtcagaccgagatcaagctcggcagtctgaccccgacccgcgacttcaactatgtcaaggacacggccaacggctttatgacgattgccgactgcgacgccgcgattggccaggagctgaacattgcgacgggcgttgagcattccatcggtgatctggccaacgagctgatcgcccagatcaacccgaacgccaagatcgtctgcgaggccgagcgtctgcgccccgaaaagagcgaggtcaaccgcctgctgggcgattccaccaagctgcgtgagctgaccggctgggcaccccagtacacctttgagcagggcctggctgcgaccatcgagttcctgcgcggcaacctggatcagtacaaggtcgggcagtatattctgtaacatcgcagatttttcatgcactgtaggggccgggtacgcccggcccccgaccttgccaagccggacgccctgcggcgcggcgaacagccgggcgaggcatgcctcgcccctacaggaatctgattttatgtcaaacgtttccaaaaagaagttgtccctacccaccgtgcagcagcccgccgcccggtgggctttcgtgttggcggtctgcgcctcgctgggcgtcgtcgtcagctactactggcgcgtgttctacgggctggacgcccgcggcgtatctgcggcgggcgtgaccggcctttgcgtggggctggccgtgctggccggtgcggcggcgctggcgctgcggcgggtcagggactttgccaaaaagggcgcggcgtgcattctgctgtgcggcgtgctgtttgcctttgccaacccgccgatgcagacccccgacgagaccgaccattatcttcgcacctacgctatatccatgggtcggttcgattttgatgcccagcgcggctaccccgaggacgtggacgagcttgttgcggcgttccccggcgcgtgggtcaacgcgcacacctcggcagggctgggcaccgaccccgacacccacgccgagcagccgttcaactccgccgggtacgcgctgaagcagtacggcaaggatggccgggtggagagcatccgggacagttttgaacagtatcttacctggttgtatagggactctgtgccgcagcgcgtgaccgagccggtcagctttctgattttgccgtttttgcccggtgcgctgggcatggcactggcgcggctgtttgggcttggcgcactgggctgcctgtacggcgggcggctcgtgaacctgctggcctacacggcgctgtgctatgcagcgctgcgcagtgcgcacaaatgcaggcctgcgtttttgtgcattatgcttatgccgatgtcgctctacatgggtgcgtcgctgagctacgacgcgacgcttttgggctgctattacctcatgctggccctgctgacgcgggacgaatggaacgataagacggcgcttttttatgcgctggcctgcgtgtttgccaacggcaccaagccgtatatcaatctgctgtgggtcgtgctgccgctgattttacggaaatccgagtggaaggtgcgtttcagccgcgccgtgtacgccgtactgaccgctgcgggcgcactggcgctgaccctcggtgtggagcagtacggcacgcttttgcgccacaactacggcgcgattgcccgccagggcggcaccaccgtgaacggcggtgcgcagctgctgtttgttttgaaaaatccgctgcgttacatcgcggttttgctgggcacactgtatgagaacgacgggttcctcggccagctggggctgttcggctggaaggatatgccgattgcgtttatcagcatcaccgcaccgccggtgctgctggcggcggcgatgctctgcaccgcgcagaccgacacgctgggccgacgccgcatgggctggctgggcgcgttcggcctggtctacgccgtgggtgcgatgaccgccatgtacatcacctacacaccggtgggcatggtgcgcatcgtcggcttgcagacgcggtatttcctgccggtctggctgctgctggtgctggccgcggcggctgtgctgcggcgggtgctggccccgcggctgaccgcggccaagggcgaggcactggcggtaacgctgtgcggctggtatgcgtttgccggggccgtgcttttgttccagcattactttgtgggaccggtgtatacgatttataagtaaagaaaaggcttctcccctcgggggagaagctgtcaccgaaggtgactgatgaggggcgggtgtgctccggcatgccgttcacgggcaattatggcaaggccgcccctcatccggccctacgggccaccttcccccacgggggaaggcttaccacaacacgaaaggaggctcacgcccatgctgcatctactctacgcccttgcgctgctgcttctgctctgcggggcctgtgcgattctggcggagcggtttaccctctcccccgccttgctgccgctgccggtattgagcggcgcggtggtcgtgctgtatctctgcggggtcgcgggtttcctgcgcgttggcgctgtggctgtactgctggcgctggccgccgtgtgggtcgtcgggcttgtgcaataccgccccgccggggtggccgacgcctggaaaagagcggcctccgttcccggtttcacgctgtttttaggcggtgctgcgtttatctggctgctgttctgtgtacagcagccgatgtttacccagtgggatgagttcacggcgtggggcctggcccccaagatggtcgtggagcgcggcgcattctatgtggccgacccggtcaacctgaaggcgtccttcacctacccggcaacaagtctgatcacatttttgttccagcccttcggcccttgggccgagtgggcctgtctggccgccattgacacgctggcgctggcctgtctggccgctgcgtccgccctgccgcgggagcgctgggcaggcggcgtgcttgtgtttgcggcggggttcctgctgccgtttttcttctcggccacgcccacgggcagctacgcagcgcagtacgtcaacgccatggcagacctgccgctggcgatgctgttcggcggcacgctctgcctgtatttcgcggtgggacgccgcaaaattgcctactggcttgttgcgctgccgctggccgtgctgacgctgaccaaggacatctgctttgcctacgggctgatcacggcattcctgatcgggctggatctgtggctggccgcagacgagccctgcagaaaggcgttccccaaggctctgctccgggcgggcgcactggctgttatcgtgctggcggcgttttcaagctggggccgctacacggcggctgtcacccccacggcggacaccgccgcgagcgtcggcagtgagggcttgagctacggcgcggtattggtcggcggcgtaaagcagctgctgggcatgggccgcaccgaaaagttcgcgcagatcatggccgccatgggcagtgcgttctttacgcggcgcatctgccttttgggcggcggcatcatggctgtggctgccattacgatggtcgccgccgcggcatggctggccgccgacaggggcgcaccgcgccgccgcgtgctggccgcgcatctggggtttgcgttctgctttgcggcgctgtatctgttccatctgattctgtacaactacaacttctccgacctggagggactggcgctcaaggactatgaccgctatctggccccctactatcaggcgtggatgctggcgatgctctgcctgctggcgcgcggtgcgcgggagcggctggcgcagctggcgacgggcggcgcggcggcggtgatttttaccgtattctgctggcgcggtgtgcccgcggcgggcttctggtccggtgccgacagcctgtacacgctgcgcgccgacgtgcagaaccgcgccgacacgatgaacaccgtgctgagctggccggaccgcgtgctggtcatcagccagggcgacgacgccacgcgatggtattattatcggtacgagctgaccgcgcaggtcgtgaacggctttggcggcttctatggccgcctgggcgagacgcaggaccgctgggacagcgattttatgaatctggtcgagagcgaaaactggacgctctacgactacaaggccgtctgcgtgccggacacgctggtcgcctacatggccgagaaggactgcgattatatcctgatcgaccgcgcggacgactatctgcagcgggagttcagccccctgtttgagggcgggctgaccaacgacatgcccgcaacgctctatcattttgagggcgcggacgcggcagtgccgttcaagctggcagctgtggcagaaagcggggtggagtaaatgcgtaaaccgcttttgaaggcgcggcagctgcttttgctggcgtatctgctggcggcggtgctctgggtggtgcggtgtctcgtcggctgcggcgtcatgctgaactacaagctgcagggcaaaatgccccagacgcacgtggacgccgccgagctggtgaccgagagctttgcgccctattcgtccaacgaatggtggacgccgccggacgacgacccggcgtggtatctttccaccgacagcgacccgcatatttactggcagggccaagggtatgtcgagaccgccgtgctggacgcggcgcaccgactgcccccgggcggcgtggcgctgtactatttgaagcccggccagaccgactacaccgaggcgcagaaggtctacgccaaggtcacggcccccggcgtctacacgtttgatttgggcgggcagtgggtcacggggctgcgcattgacccggacagcgtgggcggcgtgccgacgctgtttaccggcattgatctgaaccccccgcgcccatggtacacccgctttgtcccgacggcaggctggtggctggtgctggcgtttgtgccggcagtggcggcggcgatgacgagcgcggtttgttccttctttataaagaaggattcgtaggggatggatttatccctccctgggtgtgtgcgctggcggagacctccccggaggggtcaagacccctccctacggactaatgtttacgggtgccctgtagggagcggtcttgaccgctccgtgcccgtgtgcggcaatggaaaacttcacgggagggatgaatccctcccctactatttccccgtaaaggagctgaccctatggaactactctgcgtactggcggcggtggcggcgctgttctgcggctgcgcggtgctgacgctgaaatgccgcgtcccggcatccgtcgcaccactgacggcgctgtccgccatcgtcgcggtgctgacactggccgcaatggcgggcgttctctaccccgccgcgtggctgctgtatcttctctgtctggcgggcggcgtctgggtcgcggcgtcctgcaggggcagcaccggcgcggcgcagcgccttttcaccccgggcagcgtgctgttctggggcatggcgctggctttcacggtctactttttcgtgcggcagcctatggcgacggactttgacgagctgagcctgtgggcaacggcggtcaagatcacgaaggtcaacgacagcctgtacgccaccgccaagctgggcacgccctgggctgcgacccagaaccccggcctgccgctgctggcgtatttcttccagttttttggcgattattcagattggaaaatttacgtcggttatgacattttgtatttttccgtgtttgccgccgttgtgggggctgtcccgcgggaaaaatggcgcgtggccgtgccgatggctgccgtgctgtggtgcgtgccgttcttcttcacgaactacaaccacacgatctacctgacgaccacctacatgaccagctacggcgacgtgcctgcagggctggtgttcggcggcgcggtggccgcgtggctggcgctgcgccaaaattcagcccccaagtgggccgtgctgccgattctggcgctgtccgcgaacatcaaggccaatacgtttgtattggcgctggtggcggcggggctggtggctgtggacgagtggctgtttgccgacgacggcgatttcaaggccggtctgctcccccgcaccgggttcagccttgcctgctttgccgcgccgatggcaatttactatctgtggaatgtgcgctatgtcggctggctcgtcagccgcagcgccagtgattccggcgtcggcgagacgagcgccccgctgtccgccgtcgtggtcaacggcattaaaattctgctggggcagccggtggagggcttttacgccgagcgcgaggcccagttccgcaccgcgatggccgacatgggccaccagttctggacgagtgacggcaagctgagcatgatcgggcagggccgcaatgtggtcgcgctgattgccatcgtgtttgccgtggcgattctggcggcggcgtcgcggcggctcaaggcacgcatcgccgtcatcggtgcgctgtccggcgtctgctttttgggctacaacctcatgctggcgctgagctacggctttatcttcaagacctttcaggccgagcagctgaccgattacaaccgctacatttacagctattacatcggctggttcattctggcgctggggtgtctgtcggttgcgctgctgccgcagatcacagtcaagtgtgaggccgacggcccgacagcggtttttgctgcgacccgccgccagccgcgccctgtgtttgagctgtttgtgctggtgctggcctgcgggatgctgttccgccagggccagctgattctgccgcagctgagcgtgctgggctttgccgacagcgagttcacggaccgccgcgccgagcgcgccgaggccgagctggtgtgcagctacctcgcccccgatgaccgcgtgttctacgtcgggcagggcgacaacggcgagggctggttcagcgccgtgtttgacttctacccgattctggtggattactccggcacggtcacgaccgaccccgacaccggcgaaaccaagatgatcggcggcggcggtgagctgggcctgcccgaattgcagcccgccgagggtgtgaaaaacacctattaccacggctttacggcgcaggagctggacgacatcgtgcgcggcaacggctgcacggtgctgtacatccagacgctggacgatatttttgtgcagagctacgccgatttgtttaccgacaagctggcggcggcgcagagcggcgagacgcttttgtaccgcgtgaccgatgcgggctttgccccgatgccgatggaggtgagcgcgcagtgaaggctttgaaaaactggttctcccgccgcggcgcgctgccgctgacggcgtatctgctggcgctggccgtctggctggtgctgggcgcggtgcactttggcagtgacgccgccgcccgggcgcagggccgtctggccgaggagacgatggccgtgaccgactggcagctggtgggccttgtgcagggcgcggacggcacgctgacgacacaggacggcgacccgcagatgattttggaggacgtgggcagccgcgtggtgcgcacgatttcttacaccgccgaatttgacggtgaggcgcgggaaatgtgcctgtactacacgacaagggtcggcgaggattactctgcggaccgccgggtgttcccgcagagtctgggaagcgggcagtacgtctacacgctgccgcgcacgagtctggccgcgctgcggctggacccctgcagccccgaggaaaacaagaccgtgacgctgacaatgagcgacatcacgctgaacgccgccgacaccctgcccgccgtatggcagtattttgtgccgacgtggtatcaggcgttttgtctggtgctctaccccgcactggccgccgcagcggtgagcatggtcggggccgtggttacggagagaaagagaaaatgattttggggtcaggcggatgcttcacgcaggtggagcacctgcctttttatgtcgcggcccgcagccttgcgcgtctgcccttgaacggtgtgcctgccgcaaagctgcgggccgggcatgcccggcccctacgttctacgcgggggagcgatttacccctccccggggtgttttccggtgccaccggcgggcacggagcggtcaagaccgctccctacaaaccacccgctatcgctgcatcgcggggagggatgacagactgtcgaaaaaggtgtgctcaccccttggccccctctgcgagggggctccgcccgcaggcggtgggggagagaactgtacggctgcccgaaatatttcgggctatggcaaggttctctccctccgccccttcggggcacctccctcgcagagggaggtttttcggcacgctgcccccccctttgccaagggaggctttttcattttggcacattttttcatcttttttgctctattggaatatttttcgattgttttgcacaaattggttgcttttgcggttcctattatactataatgataaagtatagaagaatgtacatttttaccgcgcgtttgctccgcttggaattataggtgaggtcatgagtgataaagagaaaatcctgattgcggacgactccgcgatgaaccgtgccatcctgacggagatgctgggtgacggttatgagattctggaggcggaaaacggcagacaggctgtggccattttgcagtccgcgacggacatcgacctgcttttgctcgatattatgatgcccgagatggacggctttgaagtgctggccatgatgaacaaataccactggatcgacgaggtccccgtcatcatgatttcggcggagaatgcgtccagctacgtcgagcgtgcctatgatctgggcgctaccgactatatcagccgcccgtttgacatggccgtcgtgcgccgccgcgtcatcaataccctgatgctttacgccaaacagaagcggctggtccgccttgtggccgagcaggtctatgaaaaagagaaaagcaactccacgatgatcaacatactgagccatattgtggagttccgcaacggggagagcggtatgcacgtgctgcatatccagacagccaccgatattctgctgcacacgcttgtgcagaaaaccgacaaataccacctgaccgccgcggatatttcgctcatcagcaccgcttcggcgctgcatgacatcggcaagatcaacattcccgaatccatcctgaacaagcccggcaggctgacgaaggaagaattcgaggtcatgaaaactcacaccacaattggttcggagatcctggaaaagctgccgttccagcaggagtccgaccttgtcaagacggcctacgctatatgccgctggcatcatgagcgttgggacgggcacggctacccggacgggcttaaaggtgagcagatccccatcgccgcgcaggtcgtgtctatggccgatgtatacgacgcattgacgagcgagcgctgctacaaaaaagcgttcgaccacgacaccgcggtgaagatgatcctgaacggggagtgcgggcagttcaacccactgctactggaatgcctgaccgagtgcggcgcgcagctgcatgccgagctgagcattgcttcgggcaccggcagccagctgcaccgtctggcagatgcacagcatatttccgatgccctcctgcgggagaacgcactgcccgggcaaaatcatatcgtgcagtcgctgtcccgcatgcagcagaagggtcggttctttaaccagagcgtccgctgcatacagtttgactatgacggtgccaccggtcatctttccttctcggcgtgggcggcggagcacatgggcgtgcccaaagatctgcacctgcccgatgaagtcgaggaaaccgggttcgcccttgcggacattgcgcgtatccagaaggcgctgcgcgccaccagcgcagagcacccctacaccgagctttcgatgctgctgcccgttgacggcgagcttcgctggcatcacgtgcggctgtgctccctgtggagcgatgacagcgtacccgcgtatatcggcgctgccgggcaggccgaccctgcagagcagttttttgactaccatcatgacctctaccatgatgtcctgaccaacgcctataaccgccgcttctttgagaagcagctgcggaagctcatggaagtggatgccatagccatgctggaccttgaccagttcaagcagatcaacgacgtctacggccatcaggccggcgacgacgcgctgcgcatgctggtgagtgcggtaacggcctgcgtgcgcaaccgcagcgatgcactggtgcggtacggcggcgacgagtttttgctgattttcccgcatatcccgaagcatgtctttataaagcggcttgagcagatccgcgcgacggtgcaggcgctgcacatgatcgaataccccgacctgcatctgacggtcagcatcggcggtgtgtacggcacctgcacccttgaccccggcatccgtcaggcggacaagctgctgtatcaggccaaggagtgccggaacaaatgtatcaccgcagcattttccgcagaagaagcagaaaaaccaaagccaaatcaggaatccgataaattgtaagaaagaagaaggtcccctatgacattgcaggaattttatgaccgcatcggcggcgattacaaggcaaccatcagccgactgcccagcgaggcactcatcaaaaagtttgtgctgaaataccccggcgaccccagcttcaaccagctgaaggacgcgctggccgcccaggactgggagctggccttccgcgccagccacacgctgaagggcgtggcccagaaccttggcatggaccgcttgtataagaccgccgccacgctctgcgacgccgtccgcggcccgaagccgctggaggatgccagcctctggccgccggtggtggccgcgcatgaggaagtgctggccgcgatccgggagctgtaaaaacatccgagatgatgcccgcggcggacgacaccgaagctggccgggccatgcctgcaaaatatacgtgcggcgccgcgggccctgcatccctgcccggctgccgcgctaaaaagaccggagctgttttcgatgaataagaaggagaatcccggcgtaagcagacgcggggcagccatgctgctgttgttcagcctggctgtcagcgttctgcttggctttgccatgcctgtgcacgccgcggacggtggccggaccaccctgcgcaccctgctcgtcggcttctacccctacaccggctacatggccaccgctgcagacggcagccgcagcggctacgcctatgagctgctgcaggacattgcccagcatgagaacgtaacctttgcatactcctgcctgaacggcaacacccagcaggccatgcagcagctggctgccgggcagatcgacctgatcccggtgctgcgaaggaccgaggagcgcgacgaactgtcgatgcctactatacctacacctaccaggccgagcgcacggtctttgacgacacgcgcaacgagctgcgctcgatgctgagcggcgagcagcgcaatttctgcatcggcgtccggcaggactacgatgtgctgctgcgcactgtgctgaacaagagcatcgacagcctgacccgcgccgagatcagcaccatcaccaacgcctacatcaacctggggcagcagccgttctccctgacgcggctggcctatcagtacccggccattatcgtgctgacctgcctgtgtgttctggttaccgcggtctgcatcgcacttgccatccgcgcccaacggttccgcgccgagaccgaaaaagccctgcgcaaggccgaggaagccagcgtcgccaagacggagttcctgtccaacatgtcccacgacatccgcacgcccatcaacggcattatgggtatgctggacattgccgaggacaactttgacaacaaggcccgcgtgcgggactgcatgaccaagatgcgcggtgcggcgtcccacctgctctccctcatcaacgacgtgctggacatgaccaaaatcgaatccggcaatatgcagatgctggacacatcgtttgatctgcgggcgctgctggattcctgctgctccatcgtggagggccagatcgtggaccggcacatgaccttcacaaagcagatcggcccgttctggcacccgtacctgatcggcagtgagctgcatatccggcaggtgcttatcaacattttttccaacgccgtcaagtacacgcccgacggcggcgagatcaacttccgcgccaaggaaacgctgtttgaagaaggtcttgtccacctgcggatggagatcaaggacaacggcatcggtatgagcgaggaattcctgcagcatatttttgagccgttcacgcaggagcagcgctcgagccgcacccactacaagggcacgggtctgggcatggccatcacaaagaagctcgttgaccagatgcacggctcgctcgatgtcgagagtgagcccggcaagagttcgcccatcatcgccatgacggccaatgtctttgccgacgacgtgaaggcctgcctggacgcgggcatgaacagccatgtgggcaagccgctggacatgaaggtgctgatcggcgagatcctgaagtacacgaacgcgcgctgaagaatccaaagtaaaacccactttttgcaaatttaataaagaaaatatgcccgccatattgcaaaaactgttttttccgatgtataatggaaaggataattttttgggatatggcgggcgctgttgtttggcatccgccgacatggagggtgaattatggcaacgaagtatatttttgtgaccggcggcgttgtgtcgggcctgggcaagggcatcacagcggccagcctgggacgtctgctcaagacccgcggactgaaggtggccagccagaagctggacccctacatcaacgttgacccgggcacgatgagcccgctgcagcacggcgaggtgttcgtgaccgacgacggcaccgagacagacctcgacctcggccattatgagcgctttatcgacgaaaacctgaacaaatactcgaacctgaccaccggcaaggtctactggaacgtcctgaacaaggagcgtcagggcgcttatctgggccagaccgtgcagatcatcccccacattaccaacgagatcaagagctacatctataatctggccaagagcaccgaggcggacgtcgtcatcaccgagatcggcggcaccaccggcgacatcgagagccagcccttcctggaggccatccgtcaggtcggtctggagcagggccccgagaactgctgctatatccacgtcgtactggtgccctacatctccggctccgacgaatacaagtccaagcccgcgcagcactcctgcaaggagctgcagggcatgggcattgcgccgaacatcatcgtcctgcgcgccgacggccctgtaggcaacgacatcaagcgcaagatcagcatgttctgcaacgtgcgccccgactgcgtcattgaaaacctgacgatgccgagcctgtacgagtgcccgctgatgctggaatccgccggtctgacgaacgtcgtggcccgccagctgcacctgcagaccccgccgagcgatctgaccgagtggaaggcgctcatcagccgcattgcgacccgcagcaagacctgcacgattgcgctggtcggcaagtatgtcaagctgcacgacgcttatttgagcgtcatggagagcctgtaccacgcgggctttgagaacgagagcaaggtcgagatcaagtgggtcgacagtgagcatctcgtcgaccaggactgctgcgccgacgagctgggcgacgtggacggcatcattgtgccgggcggctttggtgaccgcggcatcgagggcatgatccaggctgcgcagtacgcgcgtgagaaccacgtgccctatttcggcatctgcctgggcatgcagatcatggtcatggagtacgcccgcaacgtgctgggctacgccgacgccaactccagcgaatttacgcccgatggccagcacaacgtcattgacctgatgccggaccagcagggcgttgagacgaagggcggcacgatgcgtctgggcaagtacccctgcgtcatcacgccgggcacgaagatggccgactgctacggcacgacggagatcgacgagcgccaccgccaccgctatgagttcaacaacgagttccgcgccgagttcgaggagaagggtctggtcatcgccggtaccagcccggacggacgccttgtggaggctgtggagatcccgggccgcgatttccatctgggcgcgcagttccaccccgagttcaagagccgcccgaaccgtgcgcaccccctgttcaagggcttcatcgccgccgcgctgaaattccagagcgagcacaccccgaccggccatcccgcggtgctgggagagtaaaatacagtataagccgaggagctcgtcccttcgtgacgggctcctttttgctgccctgtagggccgggcatgcccggccgctaccgctccgccatttgtttgtttacaactctttcacatctgtaacgcattattcccgcgcggccattcgtattagtatacagaaggcggcatagacaaaatctccacaatatcctgtcgaaaacgcagctgcgaattgtgcagattgtcgcttgttttgtgcgccgcgtgcggcgtataatagtacatcatcgaaagggtgtaaatgtatgcgtaactggtgttcgcgccatccggtctggttcatggcgctctatgctttgttttacttatcgttttttgcgctgctggagcgcacgatccagacaccggatctgtgggtacactgccagctggacgatttgatcccgttctgcaaatatgccattgtaccgtatattttgtggtttccgtggatcccgtttacgctgttttatctgctgtataaggccccgcgggaggatttctggcggctgtgcattccgctgttcaccggcatgacgatgacgcttctgttctatgccattgtgcctaacggtcttgccctgcgcccgaaatacgtgccgggcaccgacatttttgcgcagcttgtgcggatgatctaccgcagcgacacgccgatgaacgtctgcccgtccatccatgtgttcaattcggtcacgctgatgctggcgtactaccgcagtgcaatctttgatgccccgcgccgccgctggatgcgctccgccgccatggtgctgtgtgtgtcgatctcgctgtccacgatactgctcaaacagcacagtgtcattgacgtggtgtttggtctgctgctggcgctgttgctggattatgccgccaccgttttgcagagaagtccggtgcagcgccgcgagcgccgcgtgccggagaggctgtaaacaagagtacgggtgttctttctttgcaaagaaagaaccaaagaaattccaaatgcccaaataaaaaacgtcctgtctgcgcaatgttgcaggcaggacgtttttagttacagcgcatatacaaggatgccgaccaaaatcatcgccagtgcggcgagctttttggggttcatcttctcgtggaagatcgtaacgccgaaaatcgtgacgtaaatatagcctgttgcttccagtacaggcccgacgttgagcggtacgcccttgtaggccagcatcgttaagagcgtgcagcccacaaagagggcatagcctaaaatcacccgccagtcggtgtactccgccaagaccgacttgtgctcccgcagcgcggccttcttcaaaagcacctgcgagaccgcggagaggaacgtgctgcacagatacagcaacacatagggcagctgtgcctgactcatttgccgccctccccctcattgtcggcccgtacaaaaagcacgatgccgcatataatgatgaccgcaccgatgacctggcgcggcgtgacggcctcaccaaaaacggccagacccagcagaatgccccacaccacggtgacggccttgttcgcgtaggccgtcgtcagcggcagatgcttgatgacctgctgccagcccaccgcataggtgacaagcgccagcagcatcaggccgtacagcacgataaacgccgcgctcaaaaacggctgctgcgcggccagcttgctgcacacgctgctgcccgcatagatgcccaggatcacatgcagcagcaggaaccatttcgcctgcctcatgcgtcgtcctcctcatgccggatgacctcgcgctcgacgtactggggcgcggcgttggcgcacatgtagatgcggcccacgtactcgcccataatgcccagtacgaccaggatcatgccgccgagcagcagcagcagcgccgtggtggacgcccacccgatgggggccgccgcgcgggtaaagtggtcgatgatgatatagataaagtagagaaagcccgccacggcaaacagcgtgccgatataggtcgcaatgcgcagcggcttgacggaaaacgacgtaaagccgttcatccagagattcagcagcttgctcagcgtgtagccgctgcggccctcctcacgggcgcggtggtgcaccggcacgttgcagatgcgcttggtggagcgcagcaccagcccgatgacgtaggggtagcagtgctcatagcgcagcatctcgtccacaatgaagcggcgcgccgcaaagtagctgttgacgacgagctccggcggcttgcccagcatgatctcggtcattttgctgttgacccagctgcccaggttgcgccagccggcctgacgcttcgtgtcatagctggcgtagacgacgtcatagccctcgtcaatttttgccagcagcttgccgacctcgtccgccggggtctggccgtcgtcgtcgaggcagacgacgatgtcgccgctgcacttgtgaaagcccgccatcagcgccgcatgctgaccgaagtttttcgccagatcgacgcccacgacatggctgtccgccgccacaaggctgcggatcgtgccgaaggtatcatccggcgagcagtcgttcaccagaatgacctcgtagtcatactgcggcagggtctgcatggtggcggcgatctccgccaccacgccgcccacggtgtgctgggagcggtagcacggaatcacgtaagatattttctgcatagctgtgtacttccttctgcgctcacgggcgcttatagatcaccagatcctcggtggagacgacctgctgccagttttcggccagcagacgggcggcaacgcgggtgtcgtggccgcacatcacgtagcgggaggaaatcgggttttcctcgtcccagaggtagctgtttttatcaaactcaatgcccatacccgcgggcacggcgtagagatagccgtggaacaccccgtcgtcataggcgtaggccagcgtgtggtcccaggggtcggccccggcatcctgcacgctggcggtcagggcggcctcgacgctctgcatctgggcggccatttctgcgtttttctcgggcaggctgccgcgctggaagttcatcggcagcagcaggacgacgagcaccggcagccagacagcggcgggcgcggcgtcctcgacaacaacggcccccagcagcaggatggccagcagcatcatgtggcgcgggtcgatgttgtacatgaacagcagcaccagcgcaatgaccgcgctgcaaaacagcgcacagcccttgagcaccagcgggcggcctttgtgcttatcccagacaaggcagaccaccgcgatgagcacaacggccaaaaacgtcacacagccgccgccgatgtaggtcgtctcaccgtggagtgtgggcagaatatcgtcccgccaggccgcgtgcagcagggccgcggcgcgggcgcactcatagcgggccgccgccacgggatggagctgcaataacagacggatgccgtcaaagtccatgccgccgtcgctgaaatagggcgcagcgagcttggccatggcgaacagcgaaaccgcgaacccgcccgccgccgcgcccaaacaggccgcgcggcggcgcttattctgccagaccgccgtgagcgggaacacccagaacagcagcgcgtaggggcggaagatcgtttccaccgcgcaggccgcggcacaggcaatcagccagccagtcttgccgctgcggtgcagggccgccgccgtgccgacgatgaggagcgccagcatatagtgcatggcctccgacgcgccgctgacgcaggagcgaagcggcagcatgatgctgaacagtgcgccgcacagcgcgatgcactgccagtaattcagccgcgcgcagcgggcaaacaccgcgatgcccacggcaatcagcagtaaattgcaccacagcacgacgtttacactggcaccgaacagcagacccggcagcgcgtaggcccaaatcagcagcgggccccaggtaccgtagcggccaatatccgcggtggattcctgatagccgaagtacccctgcgggccgccgtgggtcagcacgctgacgacctggcggttatagagcgcctcgtcgttgttcatcgtggtgggcagccagacctcgttcagcggcgtgcggtagcacaaaaagtaaaagcccgcaaggaacacgactgcccccaacgcgcagagcagcgcattgggggtcttttgcaggcaggttcggattttctgcatcggttttttcacgtcagttctccgccagcttggccataaagacgacgtcgcggtaggccccgtccagcagctccatatcgcggaaaacaccctcctgcacaaagccggccttttcatagctgcggcgggcggcggtgttttcggccagcacgcgcaggctgatgcggtgcagatgcagccccgcaaagccaaaatcggtgaacagacgggccgtctcggtaccaaggcccttgccgcgggcgctttcctcaccgatgaagatgccgtactctgcgctgcggttgtggttgtcaatatcgcggtaatagaccgacccgacgggcttgccgtcggcgttgtcgaggatgatatactgcacgacctggccggtggcgaccttcgtcgccagccagctgcggtgcatctccggcgtgaaggtctgacggaagatgaagttctgcacgacagacggcgtgttgcgccacttgacgataaggtccgtgtcggcgtcggtgatggggcgcagcgtgaccgccgtgccggtcaggacggggagagtgggtgtgttcatggaggattctccttgctctttttaccttgcttgtaggggcgggcattgcccgcccgtgcccgtttgccacgggaagggccattccgaaaggactctgctgcgtcaggctggcgggcgaacaatgttcgcccctacagtctctacaacgtaaaatcggcgtttggggcagacggcccgggcggatatggaatccgcccctacggtgcggggggcgatgcttgcatcgacccacagctataggacggacgcctgtgggaaggccgcgggccgggcatgcccggcccctacattgtgccgtgttcgtacagcacgcccctgtcgctctcgtacagcaccgtccagccgtcggcttgtaagcgggcggcggtgggggtgtcggcggcggtcaggacgtagcgggaataaatctcatgggccgggtcggtcaggtaggcggcctcgtcaaactggatgcccatgccgtccggcacgccgtagagcagaccacagtgtacggggtcgccaaaggcgtaggccacggtgctgtcccaggggtcggcgctcgtcacagcggaccggctcttggtcagcgcggcctcgatttgctgcaccgcggcgtcccattcggcgctgtagcgcggcatggtgaagccgtccgccagattcagcacgccgagcgcggccagcaccagcgcggcggctgccgtgcccgcggcggggcgggcgtcctccacaaggagcgccgccagcagcagcacatccagtacaagcgtatggcgggagccctcaacggggcggtacatcagcagcagcgccagaaagacgatgaccgcagtcacggcggcgcagcccttccagaacacgggccgcccggcgcgggcatccacgatcaggcagaccagcgtcacgcccagcagcaggaaaaacagcaggtactgtcccccgctgcggtttgccagctggtcggccagcatttcggccacggtgcgcagggcgtccagcagcttgtgtgccacgtccctgacggcggagaccacctgcccgcgggccagctcctgcagcgggcttacatcgacattggtaaagaagtagggcgcgtagaatttggacatcagcacgagcgtgccgcccaaggaaaccgtcccgcccgccacgcagacagcgatgcggcggcggtcctgccggcacagcgccagcgggaacagccagagcacggcctcataggggcgcacgagcgtggccacggcgcacagcacacacagccccgcccacgcggcgcggcttttgtcccgccgcgccagaatgccgcagcccagcaccgccagcatgagcgcatagtgcagcggctcctgcatggcggagaacacatagcgaatcggcgcgttcatggcggccagcgccgcggcaaaggccagctggcgcttccagccaagccgtgcggcccgggcgaaaaacgtccagcccagcacgacgaacagcaggttgcaccacaaaaaggcattctgcccgcgcaaaagcagccccggcagcgcatagaccagaaaaaccgccggcccccacgcggcgtaggtgccgacggcggcgtgcgactcattgaagccgaagtacccctgcggtgcgccgtactgcacggcggcggccagctgtttgctgtagatgacctcgtcgctccaggagctgaccggcaggaagatctccgtcaccggcaccctgtagacgaccagctcatacgccagcaggaacaccagcgcggcggcagcggtgcagagtgtgtacgcccagccgggcagggccttattgcgcataaaattccaggaccttggcaatgaccttattgcggtctgcctcggtcaggccgtagtacatcggcaggcggacgaggcgctcgctctcggcggtggtgtagacgtccgcgccgtcaaaacggccaaacttctggcccgccggggcggagtgcagcgggatatagtggaacacggccagaatatcgtttgccttcaggtggcggatcagcgcggtgcgctcctccagatccctgcatttcaggtagaacatgtgggcgttgtgcacgcagtccgccgggatggtgggcagctcgaccttgcccgcgtcggccagtggccggaaggcatcgtggtaggcgttccaggtcgccatgcggttgtcgttgatctcgtcggcgtggagcagctgcgcccacagataggcggcgttcagctcactgggcaggtagctgtcaccaaaatcgacccatgtgtacttgtccacctgaccgcggaagaacttggcgcggttcgtgcccttctcgcgcaggatctccgcgcgctcattgtacgcgggattgttgatgacgagtgcgccgccctcgcccatcgagtagttctttgtctcgtggaaggagtagcagccgaaatcaccgatggtgcccagtgccttgcccttgtagctgctcataacgccctgcgccgcgtcctcgacgaccttgaggtcatggcggcgggcaatgtccatgatggtgtccatctcacaggcgacaccggcgtagtgcatggcgacgatgacccgcgtcttatcggtgatggcctgctcgatcttcgtctcgtcgatgttcatcgtatcagggcggatgtccacaaagacgagcttcgccccggccagcacagcggcggtggcggtgctggagaaggtgaagctgggcagaatgacctcgtcaccggggtgaatatcgcacagcagcatggccatgtccagcgccgtagtgccgctggtggtcagcaggaccttctgggcgtggaagcgctcctccaaccaggcgttgcactgcttggtaaaggcgccgtcgccgcagattttatgagagtcgatggcctgcttgacgtagtcgagctcgtcgcccacgcagggcggtacgttaaaagggatcatagtaaaagccttccttccgactggatttttataatcgtatttagtataacacagtttgcggtatttgtcactttatcgcggaacagatttgcgcaaaatcgccttatttttttatgcgcgcgtcgttgtaggcgcggatcataatggccgcaaaccagagcatgacgacgctgaacaccacaaagctgacggcggcgacggaggtcagcgacgggataaagtgcgtgacggtgtagacggccagcggcacggcggcaatgtacggcattttgctttgctgccgccctgccagccgcaccagcacgagcgccgcgccccagaacagccacaggtctgccgcgcgcagcgccggggccagccgtgcccacgccccgccggtctggctgccgcagaggatcagctccagcacaagccccgccgcgccgaacacggtaggcagcctggttttggaggccagcagcagatagcccacaagagccagcacggtgagtgagacctcctgtatggcggcattttccggcacggccagcagggcgcgccccgccgccgccacaccgacaagcaggtaagccagagcagttttattgcgtttgtccatagtgataatactcctgatagtaatgcaccggtaggggccgggcatgcccggcccgcggccttcccgcaggcgtccgcccgccatacagctgcgggccgcatatatgcggcccctaccgtatttcaatataatttttattatacctcttttataacccccttgcaagcgctggcgcggcggcgtataatgaggatgtttatacaagaaaatgtgcgttttttgtataaagctacatcaataagcgaggttttgggatatggagttttctcgtcgtctggacctgttcgggccggagattttcgcggcgctcaacgacaaaaaggtcgcgttggaggccgagggccgtcatctttacaatttaagcgtcggcacgccggattttgcaccggcggactacctgaagcaggcgctcatcgacgccgcgcaggacaacgaaaactggaagtacagcctgcgcgacctgcccgagatgctggaggctgtctgcggctactacaagcgccgctttaacgtggacaccatcacccccgacgaggtcatgagcttctccggcagccaggacggcatcggccatctgggcctggcgctctgcaacgacggcgatctggtgctgctgcccgacccctgctaccccgtctttatgaccggctccaagctgggcggtgccgagccgtggtactacaagctgacgaaggagaaccacttcctgcccgacgtcacctccatcccggaggacgtggcccgcagggccaagctcatgctggtcagcctgcccgccaaccccgtgggcagcatcggcacgccggagctctacgccgagatcgtcgatttctgccgtaagtacggcattttgctggtacatgacaacgcttacagcgatattatctttgacgctgcccacggcggcagcatcttcaacacgccgggcgccggggaatgcgcggtagagttcttctctttgagcaagagcttcaacgtcacgggcgcgcgcatcagctttttggtggggcggcgcgatgtcatcgccgcctgcaaaaagctgcgcacccagatcgatttcggtatgttcctgcccattcagaaggtcgccatcgctgccctgaccggtccgctggacggcgtgcagcgccagtgcggcgagtaccagcgccgccgcgacgccctgtgcggcggtctgcgcggcatcggctggaatgtgcccgacagccacggcagcatgtttgtctgggccccggtgcccgccgggtacaagacgagcatggaattctgcctggccctgatcgacaaggccggcgtcatctgcacccccggctcgagctttggcccgagcggcgagggctacgtccgttttgccctggcgatgcccgttgagaagatcggcgaggccgtacaggcgatcaaaaacagcggcatcctggggtaatttgcccgctatttaaggcggctggggggtgcgctgtgtttgcccgccgggcacacgcggcagccgcagaccctccgaaccgatgcaggcatcgttccctaccgcgtaggggcggattccatatccgcacgggcaccttgcccctactacatacggccagcgggcgaacgaaaagttcgccccggcagagccatccttcctaataaagaacaccgccgatccgggtcacgggtcggcggtgcttttttgaacaaatcattgattactgtgcgttttcacgcagggcggcacgcatttccttctggatggcaggggtcgtttccaccttctgcatcagggccgcgatcagctcgggcagctgctttgcgggcagctgctctgcaacgaccgaggccaggtactcagcgtgggacatggcaggctcaaacgtgcgggcataggtcttaccactgcgcacgaagccaacctcccgcagaacccccttctccatcaggctgttcagcatcgagaaaatcgagcgttccttccatttacggtcaacacaggttttcacgacttccgtctgtgccatcgcgtgatccgcctgccaaaaaatttccatgatctgttgttcgctttttgtcagatgcacgttggtatacctcgctttaaaaattgtctacacttctatactatccgcttgtcagcgaaatgtcaatgagtttccgaaaatttttcaagttttttgggttattttataacagctttacaaatctgacacatttagcgggcagcctcgtgcatttcccaatttatgtcatagattcgacagtttacaaatgtgtggcatatatgtggcgcgctctgccgcatcatgccacacatttgccgcaaatggtatttgtgtaccccccccccagtcattttttagttgattgcattctctttgcgccgttcctgtcattccgccggccaccggccgcgcaggtactcgagtgcgcgcttttccagccgcgaaacattccgccgcgcctattgtaaacgattggccctaagaaatcgcttccaactcacggaagcgaaatttgatgatgatttgtttgttttcggtcagttccacacgctcgatgaggctgaccagaagctcccggctggtgtaggcagaatccaaaaactgctgcaccagctctcttgctcggtcttctgtgctgaccgggctttctttttgtgattccagctctttcagcttctcttccagagaagttctgtccatcttcactcgctgatagatgcgttcgaagtccgcttcggcaagaagtccggtcagccgatccatatacatcttatccaggttggcagtcagactgtcgatcttattctgaatggactggatttctgcttcatggttttccgccttgcgggctttctctactgcatcggcagcaattggctgaagcttatttggatcaagataggcttcacagacttctctgactttagccagaactgcttcggtaacgacctgctctttgatggagtggcaggaacagacacctgctttggtgaaacgctggtaggttcgacacacgaaaaacagtcgatcttcaccggataccggcggacgatttagcaccgccattggataaccgcactcatggcagaaaatcaagccttttaataagaagtcataggttctgcttcgggtgtgcctgcggctgttgaccagcatccgcaccttctgaaaggtttctttgtcaatcagcggttcgtgggtgttttcaactacaacccagttttcccgatcttgtttcagacatttcttggacttgtagctgattttcaccgttcgtccttgaaccatattgcccaggtaggtttcgttctgcagcatttcagaaatgcgttcgctggaccaaagtccggcataagggcctttgcgtcccatattccagccacagtaagttgcaggcgtcggaacaccttcttcgttgagagtcgccgcaatctttcggcagctcataccatccaatgccatggcgaagattctgcgcaccacaggagccacttcctcgtcgatgacaatttcgtttttctccgtcggatgcatcttatagccatacatgggcttgccgccaatgaactgccctttccgctgtttatcccgcttgacggatttgatcttcttggaaatgtctttggcatacatatcgttcataatggcacggaacggggtaatgtcattggcggtggattctacaccggtgtcaataccgtccaacaacgaaatgtagcgcactctcttttcggggaagtatctctccatataatgaccggtcatgatatagtcacggcccagacgggataggtctttggtgataaccatgttgaccttcttggcttcgatatcctcaatcatgcgctgaaagtcagggcggtcaaaactggtaccgctccaaccatcatcgacataggtatcgtaaacggaaaggcgatgctgctgaacaaattcattgagcagggatttctggttggttacactttgggatggtccttcggtctcatcctcctttgataaacggatgtacaatgcgacatggtaatccatagggttgcttatttctaagtacatagtttcctccttgaaataagcgaccactcatcgcaaacattgtacaacgggtttctcagatgacgcaaggatgcggacaagataaagccgaaaagactcctccagtaactcagcgaggctcttttcggcttcggtatatatgcagtgcacaacaggcaaggtttgtttcatacgttctacctcctttgttcatcgtatgtaaaggggcaaattttcttgcctgtccatgttgtgaaattgatccattccgtgacaggaatggaattgtctactggaaactcgaaattgtccttggattccatgtatgattcctctttctttcgttatttgaaatatgatttgattccacaagcatagcggccaccagccaaagccggtgaccgccataatctgaaatcaaagtttatatcctattcgacactacttcccggatataagggcgaacccccggcccggctgctggaaacagctcccgcttcctgtaccacattgttggcagtaccgccgacgccttgagagcatcgccacggtgcgtatcatgattgctgacctttcgcttgaggtatgtgttccacgccacctctcccggaccgttaagcgctccgctgccgataaggcggcatcatggcgtcagaacagccgggacgcacctgccgtcgctcattgggttgcggcaaggtcagttgtatgtagccggtgattcggatattcggttgccaaggtacataaggggaaagagggctttttgtccctctatatatgaatatcgctttaggaagggaaaagttggagaaaaatcttatttttttcaaaaatttaccgccccatctcacgataaggcggtaggagtaaacacctaaggcagcaaaaatctaggtgccgcagccgccgaagtggtgcttaagccatcagtcgggaattttgcggtgttgccttagattttgaattccgaaatcgctctccagaactcaatcagcaagacctgatagagatcttcatccacgcggccgttcacacggctacacttgtgcaagagcgattcatactgaacaaacaatttttccatagcatcctgatcaccgcgctttgcgctcagaagcaaatccttaaaactctccatagtattgttcctccattgcattgcgaatcttgtcgcaagcattcttgcgatgcgtgcttacggtactatcttctactttcagtttggctgcggtttctcgcacagaaagatgttctacacataaagaaatcataacctcgcactctttcgacgtcagcttgtgcagatactttttgattccttcccacatcagcttggactcgacgctttcctcaatcggattcatcaggcgtctatacactgtgtctacctcgtcacgacattcctcaatggaaatctcatgcttttcctccctgaagaggatatggtgttcaatgccgtccccgcagtcgagggagtagtaggctttggcacggtaacggcgcagggcgacgttgtttccctcgcgcacaaactgttccagcgcgtcagctacttcgttggaaacgagaagaatggtgtcctctcccccatgggagtggatgagcataatattttgtaaggtcgatggatttcatgaaagggtacctccgtctgattttgtcgttcatgagaaaggcaaaaccagaacggcggcccgcggggaaagatgataaaaaagaaggacggcatggtatttcaccatgccgtcctgtgcttgttcgtccgcttcccagtgggcttggatggaggcggcctcattatcctttacttattttgcgtggatctgcggtcatatttcagcaggagcagcagaatgagcgcaccaaaactggctgctgttatgagaagacagagccccagtgggaatggatccgccgtctgaggaatcgaagaaggctgcgtgatggagttcggctcagaaatttcggaaacattctgcgcggtgacagctttcttgtcgtcgggccgggaggttgtctgcccgctgtctccctgatcgggctgttgaggttccgcaggggtgggttgctccgggctggaggaatcgccgcctccctgtggggtgtcgggctgatccgggtcggaggggtcaccaccttcctctggactgtcaggctcgtctggatcgacgggaggttccgccttgtccgcgaataccagttctatggttttggtggtttcaccccggaaaaagtcaatgacaaagttcagtgtaacagtaccctcctgcttggcagtcagcgtgttaccgtccagtatggcaccggcggtgttttcggcgattgtccatttataacggaacaggtcactgttgccgtcaccgcccgtagctgcaaaccctaagtccacagcctgacccaccgggaactgcatggcagtctccgaatattcagtaccgttcacggtcagagtcagtttttcattggtgttgggaggtccgaccaggacttttacatcctggaagatcgtctcatccacagctgactgaatgcggatgctgccgctgactttatctacagtagctgcttgatcatacagtacattcttgtccggcttgatggtgatggtaccgtcactggcaaccgtgatccaatccttcaactcatccgaaacagtgtagatcactgtctggtcagcggcagtaggataaacggtgggggaaagtttggcggtggcgctcagcgccccttccaccggtaccagtttgatgccgtccaccgcgttcagattgacgcagtctaccgtatattcgatactggccggggccaccgaagtgccatataccgagaagttgtcgatgaatgtggtccaggaggcagccgagctgaagtagtgggagaacacgagggcccccacattgtccgcatagtctactgagggatccatggccaggtcagagactgtctggctcttggaaggatctgctgcatcggtgacggtgaaactgatcttccgggtcgtgaaatccagtgtgacccggatgtgatagatctggtcatcaccggtcagcaagccatccagtaccttacagtcggcaaaggttgctttggggcccagacctccgtggatgtagttgaagttcttgccgctgctggggaaggccgtggaaccatccttatagtagtaggccatgggggcctgcttgccgtccagtatggggaaggctgccagtgccagccaggagttgccgttggcatcctccagcgagatgtgggcaccgcggtagtgcttgtccggggtgaaatggcctacgttccagtcgaaatctaccacaacggtatcgccgctgacggcggaaaacttgcgccggttctgggaggtggcgctgccggtgctgctgctgacttttgcctgcagcgactgtccttcgatcccattttccaccactgcaaaggtgaaggtgttcccatcggtgaaaccaccgctggtatcaggcatgtagttttcccagtcatcactgatcaccggcacatggacaacggcggagtcggtaaaaccgccatcggcagccacagcggtgatggtggcgataccgccctggtgtgcggtgaccacgccattggcgtccactgttgccactgcctcgttgtcgctggtccaggtcacatcggtgttggtcgccaaatcgggggtaaagtgagcggtcagttgatagactggctcagcgtcaccacggcccgccgtatcgggggagaagtagttggatcggatccagacttcctcctcagacaattccatgccggtagccgggatggggtcgctttgcacgaccaccgtgcaggaagcagtaacgccgcttccgtcgttggcggtggccgttacggtgccagtaccttccgccagcgctgtgacggtaccattctgatccaccgagatgtaggcttcgccgccagactccacgctccaggtgacggatggatcatgggcgtttgccggtgtgaccgttacggacagcgtcttgctgctacccgtctggatagccattgtcgtgtgggagagcatcagctgttccaccaggatcggtgtcacctccagggtgatgctatcggagatagcagggtactggtcggaagttgcggtgatctgcaccgttccgggcgagagggccgtcaccttgccgttcgcatctactgttgctacagcggtattactgctggtccaattgatcttgtagaaggtcgcatcggtcggggtaagcactgcctgcaactgcagtgtgcggccggaacgcaccgtcgtatcgccggcaatctccaaagcggtaaggggagtctctacgatgcggacagtaaaatccagttccgggccatcgttggctgcggcagcttttacctgcaccgttcccgccgcgcgcgtatccatctgcacagccggaacggttcgggcggaggaaagttctgttgccagcgtgcgcatgaccccgtctttcgtctgccaggtatcgccataccagctggccgactcggaggcgtccatcgtccagagcacttcgctgctggcgggctccccggccagggacgtagaaaagcggatggaatcataaggggcggtgttcaggggcataccatccgtcacggtgccggtctcgacttcctcgccttcgcgcagaaggcagtaggtcacagtcatgccgctggctgccacgggctcgcctacggtcacctgtacggtgtccgagacgccgcctacagtggcggtgacagttgcaatgcccggcttgcatccctccaccacgccgctctcatacacacgggcgatagaaggatcgctggaggtatacgcgatatggtaccggctgagcagcgcgttctccggcgcgatggtctgttgcaacctctgccgttcccccacacggagcgtcatcgtttcctgtgagagtgtgagggaagccggctcggcaacattatgggtatcagccgtggtgctcagcggagtgtagacttcaccgctcaccgccttggcagtcccacggtgcagataggcgtacattccctcggtcatatcgccggattttcccggctgggagcagcccatctcctgaacggacgcatcgccgccgttgaacagggcgcgttgtgttccgctgatggcttcccccagcttgtgcccggccccgtacacgccgatggcttcgctgttccaatagtagaacccgcgggtcacgccggtaggattgggaacgtccataggggcctgaatatagttcagcaggtaattgtattgtccattggggctgatgtcaaaatattgggtaagccccatggccccatcgaagccgataagacttctgttggaagaataggagaatcctgtctccacattgatgtagtcataatcggccagcgtatcgtctgcaagcgcggctttcatcattgtcagctggaccgaagtatcccgcccgccatacagggagaaccccatgccatcaaattcggtgccataccccagcaagcggccgaagaaactttccaactgtttggggtcgtaccccgtatttgtgtggatggtattgatagctccggggtatacctggcgaacggcgcggctggaggcggtgatgatagccgcatgattctgagagattccgcttgccaccgggaacagcaagcctccgttctgctcgttgccgttcttgacagtgatgacattgtccaccccggcctctttcataccggtcaggaaatcgtatacataattgtagacagcggttcccagcatttcgatgtccgggttggagaggttgccctcgtagtcggtttccagccattcatagggcatgtgggccttggcggcgctgatccaagtatcgctgtaatggaagctgggggtgaaagtcatgcccaactcctggcagcgcagggccagagcggtggtatgggtctcatcaaaatagccgacgacctgctgccgcccggtgacatattcaccatcgaagccggtgacgctggtgcccagatgggtcaacgtatcccaggtatatacttcgttgccggaatggacaaagatcatgcccaacaccgagttgacgccgtggttggacaggattcgcagggcatcctgctgtacgccgttggcaaaatacttgccgccgcaatcctcgatcacctgcaggaaggacatgtctgcccctttgatgtaggtgttgtccacctggaacacatcaaagttgtccacataggcaaagcgcgaaccgttggaggtccagccgtcagccaggtgggtaacatccacctggtcgggatccgggcgctgccagccgttggggtagggattttcgctgccgaaggtgttttcgtgcacggtgacagaatctttgtatgcctcgtcaaaaatcgtgttggcatacagttccacctgggtctgattcgggcccgtgtggaaggcgatggttaccagagaataacccgcggtggcggaaggtgcctgccgcagcacagtgccgtccacgccccgcacgcccaaattgacgcggttgccggtggaagtgcgttccaccagcagtcccatcagggtgctgccgtccaggctgtactgctcggtggaggtaaaggtgtcctccacatccaccttcatgcgcacggtggcgatgtaatcggtatccggctgcaccgaaatggtctggtgcacctcactctggtcggccagctgaacggcctggctgccggtatcggcagcgtcggtcagggcgactgtgccagaggtttcccagccgtccaaccctgattcaaagtcccagttgctgaccgggttgttgtcgttggcatccagcgtgatctggatgtcgtcgagggaaaggccgtctgtgtagtttacaaaggtaagcgtcatctggccgttgtagaccaggacattgcggtgggccgcctgcacccagccgccctggccggaaagggcgttgtccagtttgagcaccgagtccgggccgccagtcccactgaccgacatgcgtgcaccgctggcgctgcctttggcccacagactgaccgtgtaactgccctgcggcagattggtgacggtaatggaggcgctgccgtctttgttgacggtcagcccgctggagccgctgtgggcatctgccgtgacagcggcgttggatagcgcccaggcggcggtatccgattcttcaaaggtaaattcggtctggctggtgccggatggtttataaggatcttccggttccggctcgggctccggttccggctcaggctcgggctggtctgattcgggagtgaaggacaggtcatagagcaggatgtccgaagcattgacggcatacaccgcaaaaccgtacacatgaccggcttgcagggacattgtgccactgtcgctgccggaagtcatttccacagcggccagcgggtcgccggctttctgcaactgggtcaggtctgcggctaccagttccacttcgcccagatctgccgtgtagatgcgagctttgggttttccgccactgagtgtggcggagagcgacatctggatggtgccgttctgcgctggcttgaccagcagataccgtccggtggaagctgctgttatgccatcatcactgacgccgtagccggcaaggtgaagcccgctggcatcggtgtgatcgccggccgccatgccaagacgcaaggcgggggcattttccccggagggagcggcatcatagatggccgaagtttccacggcagtagtcttgccaaaagtccagcgataggcggtatggctgtcatcccagacgccggtcactgcatcgccggcaggggccggcatttcaccgctgcccgaaccgccttcttctccgccttcgccgggaccacccggcacctcggtggtgagcagccgcagggcggtgatctgcgccggggaatcattgtatgtgacaaagccgtatacatggccggcggtcagtgataactgccaggtaacgggatccgaagtggtggcggtgcctatttcggtcccgtttttgttcaggccactcaggttggcagcagcctccaccgaatccaattccccaagatcctggtaatagatccggcatttgcgcgtgttggaagctttgtcaaaccggacgcagatctccagtgtaccgcttaccgccgggcggaccagcagatagcgtccgctttcggcggcgctggcaaagcccttggcgtcgttgggttccaggcagccggcaccgataaaggcgatgccgccggaggagatgctgtcccctgcagccaaccccgcccggatggaagcatacgcatcgctgtaggagacagcggtggggctttcccccgcagccatctcgccaaactgccagatgtaggccgtcgcttccttgtcatagttgccgtaaatcgcgcctggcggggttttcccctctgccaatgccgtcaccggcaggcagaggaccaggaacagcgccgccatcagcaggctcagtgcttttttcattcctcggctctctctttctgttgggctgttttttcacccgttgaaggtctcgaattcatccatacggaaccgcttgtgcataaagcggtagcggaaccgtaccagttcgtttttggccagcacatcctcctcggtgccggtgtattggcagcggatgcagtagtattccttcttgtcctcgtcgtagaacatgtcgatgtccagatcccgcataaagcaggaggggcagcggtagttcagtcttcccttgccagcttgagccatgtggtgaacgcctccttctctttgattgtgcccttgtacccaagggtgaacatggggctgaatgcgtagccctccttgtaataaccggcggcatcgcggccgcttgccgtcatcgagacgacggtgcggatgggcggtaccaccgcccggacctgctcagccccgggagccacgcactcccggcagaggtaggcgtagtccagctcatggttgtcgccgtccttgtcggcgtacaggcggatgcccgtcatatcctcggggtattcggtggtgccgtagcaggccaccatgtactcgtcgatctcgatctccgcgtcggggtcgctcatctccaggatacggcggtcgatgcggatgtcgctctccccttccacaaaagtgagtactgtctgcagcgtgagggtgcagtcagaaaagcggatctccaccgggtccagaatcagtttacgggcagtccggccgttttccagcgtttccgcacggaaatgggcgtgggtgcggcagaggcagaggtccacctcctcaccgttgtggcgtaacttggccgagcggacggtgccctcacccgcatagtgggtgaagtatccggcacggtatttttcctgaatcaggaaggggtaggagcagtcctgcacgtggggcgtgccgatacccaccggccattccagtttggcagcgtaggggcgcaggtccacgatggcaccgccctggtccatgttgacgcaggcccgcataaaggggtcgcaataccagaacagctgcttgtccgacccgtagaggatgtcccgccagagcgcgcactcgggggtggtgtagccatgggtctggcggtagaacccggcaaactcgctcatggtcatgtcggtgagcttgccctcctgtttcagcttgccatagtaggcacagccctcctcgtaggagtggagcagcagctcgtagggggcttcccaccggcccattttgttcatccagcccgggcctacgaacatcatgttgtaggcgtagccgtcgttgaacttctcctggtagcggtactggtcgatcaggttgtacaggtaggggagctcccaggtcttggtgtcatagatcattccccgcagcacattctggggatgggtgccgaagttggaaccgttgccgtcatagcaggcgattagatcccgggacagatgggggatggccacgatgccgctgtcctccgcctcgttggcggcaggggcgtgggtgttggccctggaggggatccagggggcccaggggccgccgtcgaacagggtgtaccagctgttgttgcaggtgtggtaggctttggggccttcctcccagcaggtggccacggcgcattggatcgtagggtacttttccttgatgtagttgatcagcggggcgtccatatagtagctgccggtggaggcggggtagaagccgaaccggtcatagaatttgccgaacacatcgtctacgatctgcttcttggtctccagatcgaacatccagatgcagaaatccttggtgcggtactttttgcggaactcctcgcaggaaaggcccagcagcgtggagccgatctcgtcgccatacatctcatggtcgtgtttggccagggccaccgcctcgtcgttgaacaggctggcgtaggtcatctggatggtggtcttcagcccgttcttgtgggcgatggcctgctgggtcttgaagatatccaggctttcggtcagcagggtcttgcgtcccagattctcctccttgccctggccggtgaccttttcggcgtactccggcaccatctctgggcggtggatcagattgaggatgaatttcgattccataaatacactcctttgtatttgtgatttaaggcaacaccgcaccgttcacacctgacggtttggcacacgtcacaccgtccattgcacgccatctgcgttgagaaagtgctcgggtatacatccagtattccctgcgcttttctcttggcatctgacatgccctggccgccgtgccgcgcaccagaattatgcgatgttaccccaggtgacttccccggggttcggcggaagaaggggccgcagggcttcggtcagggtccgggccatcgcggcatgggcggccgatgcggttgccctcggggtttttgccggacttgatggccaccatgtcgtccccggtggcgaaccggcaggcgaacagcgtgcagcgctggctggagtcgggggtcccggcgggggatggttctttctcgattgtagcagaggccgccgccgccggaaaggtaaaaaaccggcttgtaccgtgcacaaatccgggcattccgccggtcgggctagacaccgcaattttggcgaacttctgccgcagttttggctagtgcggccggattttcccgggtgtatgatgcagaaaaagcaaaaaccagggaggttttatcatgcagtatcgaccccatgaagcccaggtctggtcccagaccgtcaccatccccacttacggtgtgggccagcccgacaagaacccaatgttcctggaaaagcgtgtctaccagggttcctccggcaaggtctacccctacccggtcattgacaagatcctggacgaaaaacaggacaaagagtacaccgctgtctttttggagaacgactacctcaaggtcatgatcctgcccgaactgggcggccgcatccagcgcgccaccgacaagaccaatggctacgactttgtctactacaaccatgtgatcaaaccggcgctggtgggcctgctgggcccctggatcagcggcggcatcgagttcaactggccccagcaccatcgccccaccacctttgcccccaccgactggcagatgctggagaatgccgacggctccaagacggtggagtgcagcgaggtggaccagatgtacggcaccaagggcaaggtatccttcactctctaccccgacaaggcctacatcgaggtcaagggccagctgtacaaccgtagtccgctgccccagacctttttgtggtgggccaacccggccgtgccggtcaacgacaacacccagtccatctttccgcccgatgtgaacgcggtgtttgaccacggcaagcgggcggtcagcgacttccccatcgccaccggcatctactataagcatgactacggcgccggggtggacatttcccgctacaagaacatcccggtccccaccagctatatgtgcgcccactcggactatgactttgtgggcggctacgactacggcgtgggcgcgggcatcctgcatgtagccgaccaccatgtcagccccggcaaaaagcaatggacctggggctgtggggatttcggccaggcatgggaccgcaatctgaccgacgcggacggcccctatgtggagctgatgaccggcatgtactgcgacaatcagcccgacttcacctggctggccccctatgaggaaaaggtgttcacccagtacttcatgccctacaaggcggcggctcaggtcaagaacgccagcaaggaggcggttctcgacctggaggtgcaggacggccgggccagggtcaccgtttataccacccagcccttccccgtcgcccgggtgctgctgacggcggacggtgcgcccctgctggaccgcagcgccgacctctcccccacccagatctttaccgccgaggtgcccttcaccggcgaggagactgccctgaccctggcggtgttcaccgctggcggacgggagctgctccgctatacgccgcgccccaagaccatcgagaaaatccccgaccccatgccaccggccaagcagccggaggagatccagacggtggaggaactggtgttcaccggccagcacatcgagcagtaccgccacgccacctacctgccggacccctactatcaggaagccctgcgccgggatcccggcgacagccgcgccaacacggcctacggcatgctgctgctgcgccggggccgctttgccggtagcgagccctatttccgcgccgccattgcccggctgacagagcgcaaccctaacccctatgacagcgaggcctactatggcctgggcctggccctgttctaccagggccgggaggcggaagcctacgacgccttctacaaggctacctggaccgccgcccagcaggagatgagcttttactatctggcctgcatcgacgcccggcgcggggaatacgccctggcgctggagcatgtggagcgcagcctggtgaaaaacgggcacagcctgaaggcacgggccctgcgtggcctgctgctccaggccctgggccgggacgccgaagccgggacctggctgcaggaaaacctgcggctggacggttttgactacacctcccgcctggcgctgggtgacaccgacaccgccctgcggctgatgggcggccgcccctccacctttgtggaatgtgccatcgacctggccgaggcaggcttctggcagaaggccgccgatttgctggaccgttgccctgagcccacgcctgtggtatactatcataaagcgctgtatgccgcccggttcgacgcggcccgcagccaagcggcgctggacgaagcggccggagcctccagcctctactgcttccccaaccggctggaggacatcgcggccctgcagttcgccatggaacacaaccccgccgacgccaaggccccctactacctgggctgcctgtggtatgaccgccgccagtacgacgatgccatcgccctgtgggagcgcagcgccggatcggacgggcgtttccccacggtgtggcgcaacctggccttggcttactacaacaaacggggcgacggcgcgaaggcccttgcctgcctggaaaaagcctacgtcctggacgaaggggacgctcgggtgctgctggaactggatcagctgacccgcaagctgggccatacccccgcccagcggctggccttcctggaggcgcacctgaataccgccatgcgccgggacgacctgtatgtggagtatgtgacgctgctcaatgatctgggccgctatcaggaggcctacgaccgcatcatggcccacaccttccatccctgggagggcggcgagggcaaggtgaccacccagtacgcggtggccctgacccagctggcccggcaggctctggccgccgggcagcccgccctagccaaggagctgctgcagaaggctctggtgttcccccacaacctgggcgagggcaagctggagggtgccaaggacaacaacatctactactacctgggcctggccgagcgcgccctgggccaggaggcggaggccgccgcccacctgcgctgggccgccgccggggatgaggaacccgccagcgccctctactacaacgaccagcccgccgacctgatcctctacgagggattggccgcccgggccctgggggacgaggatcgggcgtccagccggttccacaagctgatctcctacggcaagaaacactactacgatgaggctcacatcgattacttcgcggtatcactgcccgatctgcagctcttcgacgaggacctgacccagcgcaaccgcgctcactgcgaatacctcatcggtctgggcagctacggtctgggcgatgccgccaccgccgcccgctgctacgaggctgtgctttccatcgacgccgcccaccagggcgccctgctgcacagggctctgctgggataaaccatcacccggggaggggtgctcatgttttcctgtgaaccgctggtcgcacccggttcccgctattacaactacgccgccggggccctggcccggtccagcctgctctgcctgcagtgcatcgggctcttcacctacctgcccggctaccagctgacccgccgttcctacgacagctttctgctggaggtgatcctggacggcgaactggagggagagagcgacggcagacccttccgggcggtgcgcgggaacgctgtattgctggactgctaccatccccaccactatgcctccgccaccggctggcaggcgctgtggctgcactttgacgggcccggtgcccggggctactacgattggatcacccggtccggcggtcccgtgctggcccccgaaaactttgaggaactgcaccgcagcctggctggattgttccagcagttcgacaacggctccattcccggcgaggggcagatggcccgggagatcgccggggcgctggggctgctgctggacccgccggaaacgcccccgggcagcggcgggctggacagggtgctgcgcaccatcaacgaaaacctgcatcgggaactctcggtgcagcagctggcggagcaggcccatttcagtgagtatcactttatccggctgttccgcagccaggtgggcacgacaccgcggcagtacatcatcaccgcccgcatggaacgggcccgccacctgctcaagaccaccgacctgccgctggagaccatcagcgagcaggtgggctacacctccgacagcgtgttctgcacccagttcaagcgccgctacggggtgaccccaaccgagtaccgccaaacctgattcccgacagaaaaccgcccgggcagccttacggctgcccgggcggttcgctgttgcggttttatgacggaccggctttggctttcatggcctcgtagagggccaggtcgtccaggtggttctccatgttggtgatgaggactacccgcgcctgggcgggggtgtagagcacctggcgctgccaggtgtagaagtaggggccgtccccctggttgcgcaggcagcccgtcagggtgctgccgtccaggctatactgttcggtggaagagaaggtgtcctccgtatccaccttcatgcgcacagtggcaatgtagtcggtgtccggctgcacggcgatggtctggtgcactttgctctggtcggccagctgtacagcctggctgccggtatcggcggcattggtcagcgtgaccatgcctttagtctgccagccatccagaccgtcttcaaagttccagttgctgacgggattgttgtcgctggcgtccagtgtgatctcgatgtcatcgagggaaagaccgtctgtgtagttgacaaaggtcagtgtcatctggccgttgtagaccaggacattgcggtgcgcggcttctaaagcgccaacttttccaggtatataaaaagaatttcggaaaatatcaaacttttcgacttggcccttccaaaagaatacgtctcgaattgtacaagctgcacaattcgagacgtattttgcgttccaaggttctcactttacccggctacaaattcagcgaacctcgttttcccatcactttcgcatgcttctttcctgtacggatgggaatcattgtggcaaaagcgggcgcagggcgtccgacaggatttttgccacgccggtatgggccgcggcggaaggatggttgttcgctccgatttgttccgatggcgtaggaggaaggggcacatactgtaccgtatccccgctttcaccggtataccggcggatggcttccataatgtagggttgcatcacctggccaaacatgccgtatgcccagaccagacgcgcgcccgggttgcaacggcgcagtttctttaaaaaagcaacgccgcactgcacaaaacgttccgccgtttccgtgtcaggaagtccgtcagggcctcgccgcagacaaaagccatcctgaaagggaggctcatccagtgcaaaaccgtcattataccccaagtgcaccaggacgatatcaggttgccaggcggcaaagtcgttcggctgtgccgcccccagtgcggcggcctgcaggccgggcaccaggccgcagaccatttcgtaatatggtggtagcgttttggcccggtcattatcccagcctgctaacaatccccaaccgctttgcgataggatgcgcaggtcggcagcgagtgcccgcgctgtttgcagtgcataatggttttcggtagaaaaaaccatggagacaccatccttggtgctgacagcccctgccaatccctcgccgctggaaatgctgtcgccgatcacttcgatcttgtaagggcggggcggtatagcgcgcagttccccttcgcagatgatcgttgccaacgtcagcaacgaagatgggtcacgctgcatgggctgggtctctttatacagccgcacgcgccgccagctgcccgaagtcatgtctcgccacacggtcagggtattttgtccgcggccgagcggctggcgcagtacagtcgcgccgtccacctccacacgcacccacggctcgcgggtagtaaagctggcatccagtacaaaggtcagcatcctggcgtttgtctccagctcgacgccggaggctgtccagaacagcggcagcgggatctgacgcaccgtgcggccatggatgacaacgcgcggatccagcggtgaaattttctgattcattagtcttcctccctgtcaggcgcagtcgcgaagctcacttcgcagcagcgccgcagccgcagttcgcagctattttcagcaagcgtacagccgtaaaaatgcaccctgcatacctcgccgcccggttcctcaaatccttcgacctcgaccgggcagacctcctgccaggccccctgcaccagcgcgcggcctgtcaacgtcacgccggtgaaggtaaagtcagaaaatttcggcggctgcggggccggcgtgccatcgttgttgtagggcacggcgtggatcagaacgcgcggggcgcggcagtcccgcacggtgatgtcccgcgcatccagccggggcagccgcggttcggtggaggcccggcaggtccccagggaccggccctccagccagacttccagggtatattcggtggcgggggcaagtcccgccagggtgcagtgggtgtgggccaccgtcaccggaatgcgccccccggcgcagacctcgtaacggcagtccgccggtgccccggcgggtttgtcccagtagagggtcagggtatcggcggtggcgcaaacgcagatgggcgtatcgtccatggcaggctctcctttcggcggcaggttacggctgctgcagctttttctgtttcatggcctcgtagagggccaggtcgtccaggtggttctccatattggtgatgagcaccacccgcgcctgggcgggggtgtagagcacctggcgctgccaggtgtagaagtaggggccgtccccctggttgcgcaggcagcccatcaggtcccgcagcagccaggccgtgtgcttcacatcggtcaggcactcgttggcgtaaaaaccctgccacttgccgtgctcccggctgcgcagggcggcgtcggcggccaggtattcctcccgggcctgcccggccttgtagaaggcggtcaggtactgccccgccagcccgtcaaggatggcctcggcagccagggcgccgccggcgtagcaccggcgatagacatccatctgcagcagcacgctatcctgcagcagggcgggggcatcaaggtcgggggccggatagcggcgggtgccctcccggcagaggtcccggtaccaggccgcctgctgcgccaaggtgggcagtggggctgcccagtccagctcatgctccgagccctcgccgccgtgcatgtaccggctgatgagcacccgggccggatagttggcgaactgttccccggccacgttatcctcgtggggaccaaaatggagggccgccgtgtaatattggcggaacgcctgctccgcccgggaggcgtcggggccgtaatagcgccggacatagctttgcaggaaagccccggtgggggtggggccgtcctgccagatccgggcgatgtaagccagggtgaacaggtggggctttacgttggaagcattgatgatccagtattccttcacgccccggtccagaacccggcccagttcccgctccacgaattccggcggggtgggcagcatggtgatgtggttggccgcctgcaggtcgtagaaggaggcgtgatagtagatgccgtggggccccggctccccgggcccgggcagggcgggcacccgggggtcgtggttgccctggcggcggctgaccatggcaccgtagccgttgtccgcccagatcttgatgaccgccgggggcagctgcagatagccgtcccggtagagctccatcacctcgccgtacaggttggtggcgcaggccgcgccggggtagcactgctgcaccagctcatactggcggcggataaggcggctcatcagggtgccccgggcggcgggggtgtcgtagcgtgggtcatccacccagaaaggccggtccccctggccgcggaaccccaggttccagaccacatcggggccctgttcttccagagcggcggtccacagcgcctcgaactcggcggggtgttcgtcatagcgggggtccaggtcggggtaggcctcgcagaacaactgcgcccccaggggctcggcgtggtggtgggtcacggccagtcccatgcgctgggccagggcccggtggcgggcggcgttctggccggtgccggggatcaccatgttgccgccgcagcgcagcagggcctccagggccatctcccagggcagctcgctgcttccgccgggctgccaggcgctcagcagcacctcatcgttgaggaaccacccccgccagcgcaccgccgccggacggctctgccgggcgtagcccccggccaccgggatgctctcctgcggggtgaagtgctggtcattccagaaccagaagtcctccacccccagcagttcccggctaatggccaaaaggccgtagagaaagccccggtcattcccggcggtcaccgtcagggtatccccggcggcggtcagctgccagctttccggcggcaggtccgccggtaccagccggatctgccccccgggccgggcagtgggcaggcagacggtgtccaggtcccggcgcaggatgtccatgccgtggcgcaccgggccggagggatgttctgcgatgatccgggtattgcggttcagttccataaaggacctccttatttgggtcgtgccgccaaaagcccgagggggtggacggcgttttgggcggcttccgcccctacttcgttgtaagcttgctgataataaaggtggacataggacagttcccggcacagttcctcctgcgcctggcggatcggtccatagcagacagcggcggatctgccatccgcttcgggccgactccgggcgttccttggcatctgtcagatagtggctgccaggcagccatccttccggtgtttgaaacagaaaccggcaggaacacacgggggaccaggcatttgcccggtctccctgtgttcctgccgtgtttggaaaacgtcgggcgttgcgcaaacggctttgcgggggtatcagcccttgatgccgtcggtggcgatgccctccaccaggtatttctggaagacgatgaacacgatgatgaccgggatcagcgacaccacggacatggcgaagaggccgccgtagttgttgaagctgttggggtcggtgtacatgttcagcgccagcgggatcgtgaagttcttggggctgcccacgaagatcagcggctggaagaagtcctgccagatccagtagaaggcgaagatggaggccgagacgatggcgggcttcaccaccggcaccaagatgcggaacaggatgccgatctttctgcagccgtcgatctgggcggcttcatccagctccttgggcacgccgcgcatgtactgcacgatgaggaagatgaagaaagcgtagccgaaacaccagggcagcaccatggcggccagggtgtcgttgagatgcagcgcccgcagaatgatatactggggcaccaccatgacctggctggggatcatcatcgtcatgatgacgcagccgaaccagaagccggagccccggaacttgacgcgggccagtgcgtaggccgccagcagcgagctgaagatgctggtcaccaccgacaccagggtgacgatcaccgagttcttgaaaaagtgcataaagctgtatccggccacgcccgccagaccgctgaggtagttctgcaccacgtcccaggtctccgggatcagggagtaggtgttgtggaacatggtgtcgttggatttgaaggagctggccagcagccacagcagcgggtagatcatgatgaaacccagcaggcaggaaaatacatggaacagcactgagctaagacgtttgtttttgcattcaccaaccattggtatccctccttattgtgcttcgtagtggacccaggacttctgcgacttgaacagcagcagggtggccacgccgatgatgagcaccagaatccaggccagggcacaggaatagcccatgtggaagttggtgaaagccgagcggtacaggtacagcacataggtcagggtgctgttcatggggccgccgtcggtgatgatcttgctctcggtaaagatgcggaagccgttgatgagctgctggatcaggttgaagaagatggtgggggtcagcatgggcatggtgatcttccagaaccgctgcaagggggtggcgccgtccatggcggcggactcatacagcgaggtggggatctgcttgaggcccgacaggaagatcaacatcgaggaaccgaactgccacacgcccatcaggatgatgaccgacagggcggtgcccgggttgcccaccagggaatactgctgttcgatgccgaacaccttcagcaggctcatgacgacgccgtcgttgccgaagatctgcttccacaccaccgaaacggcgatgcttccgccgatgatggagggcacgtaatacagcacccggtacatcgccatgcccatgtgctttttgttcagcagattggcaacaaagagggcgaaggccagccgaagcggcaccatgacaaagacgtagacaaaggtcacagtcagggcctgccggaagtttttgtcggtggtcaggatggtgacgtagttctgcaggcccacccacttgggcgcggacagcaggttgtagttggtaaaggaatagtagatggacatgaccgccgggatcagccacatcagcaggaatcccaccagccagggtgccagcagcaggtagccggtggcgttgtccttggctcggtagtgggctttgggcttgattgccttcgctttcatcatagcggagaaaacctccttcatcgggaatggaccggggacagaaaaagggggaagggcggcagccctccccccggaacggatcagttattggtcgccaggatggaatcggcctgctcacggaaggaagcggccgcttcctccgccgagacctggccatagaacacgctgtaggcagcgtccttgaaggcctggttcacttcggcaataccgaccggatcgggagccggggtctcaccgcaaagcggtgcggcaatatccacatagtcaaacatctgcttctgctgttcgttcagcatgccagagcccaccaggtattcgcgagccgtggaggagacaggggtaccgcgctcgcccttcatgatggcgttggcttcctcagagttgatgaaccagtcgatgaaggcagcgcattcttccttgtactgggaagtctccgccaccgagaagaacatgccgggcttcatccacaagccgcttacgccaccctccacggtgggaggcgtagccattttcaggttgggattaacgttagccatcaggctggtaaagttgttccagttaaaatggaacccgcactcatcggttgcaatgggaccggcttcgatgcccaaagtcaccagctgctcgtactcgtcagggtcagcagcgccgcctttgtccatcatatccttccacatggtgaaatagtcagcagtcaaagtgtcgtcttcaaagccgaggctcttgttatcgtcggcaaagagctgttcgccatgctgacggatccagtagttgaacatattggtgtcgtccaccgggccggtggaggtgcccagcttgccagtcttttcatagatggtgttgcacatattggcgaaatcatcccaggtccagtcgctggtgggttcttccagaccggcggctttcaggcaggcagggctataacccactgtgacgagcgaagtcgacaacggcatagcgatctgtttgccatccacgttaccgctggacaggatgctctcgtcaatggtggaggtatccatcgtgccgtcctccatgtagggggtcaggtccgccagggagttattggccgcgtaggtggacacatagagatagtccatctggacgatgtcgggcatagcgccggtggcggtgtcggtggccagcttttcaaagtagccgtcccagccggagggggtggcctcaaagtggatgttggggtgcagctcggtgtacttgtccaggatctgctgggtgtactcatgccgggactggccgccccaccaagtgatccgcagagtgatgtcctcatcggaagaagaggcgctctccgctgtggtggaggccgtatcgcttccggcagattcggaagtgccggctcctgcggagccgccgcaggccgccagactcagagccatcgcgccggccatggcggcagcggcggtacgcttgaacagtttacgcatgtgtgatttgctccttcttttattctgtaggcgcaggggagcgtccttccctgccggtggaccgtgcacgtccttttgacagttcctattgtatcggttttttgcacaaagcaaaaggcacaaagccgggggccatggtgcacaaaaccggcaaggcgcgggcccgctcaacgggggcaacacgcgcgcactgccgccgcagcggcgtccggctccacagccccttcgacaaaattttgatttattgcctgtctgcaggctgattccgtatcttctcccggtattccccgggggtcatgccgaactgtttgcggaacacccggctgaaataccgcccgtccggcgggtacccaaccaactcggccagccgggcgttggtcacgttggggtcgcagtcgatcagccgccgggctacctccacccggcggctctcgatgaaatgggtcagccgggtgccggtgcggcggctgaacatccggctcaggtgatcctcgctgacaaacaggcagtcccgggccagcttgagcaggttgagcgcggggtccgccaggtggtcgtagacggcctcgtagatctggcgcatctgcagagccgcccggtcgttccgaggctcatggggcagtgccagccgctgggccagcgcccgggccacgccgcacagggtaagctcaggcagcggcgcgtcggcggccagcagtttccaggccagggtccacagggcttgctgccggtcggagccgtacccgcgcagctgcattttggccaggccggtgtacagttccagcaaaagctgctcgtagtcgggggcgttctggatggcccggtagtcaaagagcgggccgttccccgccgccgcgccgccgtaccgcagcagaccggtctcctccccgccgcccagcgccagcagcgccgcagtctgccgatagagctccggcaggccgcccagggctccgggggcgctcaccgctgcctgcaggggcgctttctcgaaccggcggaactccacctgcagccgggcgaaggcctgttccaggccggcgccagcggcagggtccagcagcaggaaggtgtcctgctcttggccgccggtgcacagcagcgtcccggtgggaagcaggtctgtcataatgttgccgatgacgaaccgttccaggtagtcgaacccgcgggtcagccgcacagtggccagaagcaccggccggccttccccgccaagccgctccataaagtggcaggtggcggtgctgcccacttgggcccgatccagcaccagatcgcagaagatctgctcccgggcgtggggcagcagcacccgggcgtcccggtccttgctggcctgagcctgacgctcggacagctcggccttgaccttgtccagaacctcccggatccttttttcgtcacagggtttcaacaggtagtggcgcaccccctcctccatggcctggctggtgaactcgtactcgccgtagccggacaggatcacatacaccacatcgggaaaggtctgccgcgcctggcggatcatctccaggccgctcatcaccggcatcttcacgtccaccaggacgatgtcggggcggaggcgctccatcatctccagcccctgcacaccgttccatgcggtgcccaccagctggatgccctgctcctcccatgggatgaaatgggccatcccctcgcgctcgatctcctcgtcatccacgatcagcagtttgtacatcctctttctccttcttgggcagcgtcatccgcacccgggtgccctgctccgggtcgctgtcgatctgccagccaaagctgccgaaatacagctgcagccggtcattgatgtttttcagcccgatgccgtggcccttgggtttggccgcaaaacggcgcacggcgtccaattcctccggcgtcatgcaggggccggtgttgtgcacttccagcaggatgtccgctgtctgctcccgggccgtcaccgtgatggtgcagggggtcaggctgttctccaccccgtggaggatggcattctccaccaggggctgcaggatcatcttgggcatggtccagcggtccagggcgccctcggtctctacctggaaggcggcccgcccgtggtagcggaactcctggatggcgatgtagctctggaccagctccacctcccgggccacggtggtggcgctctcccgggccagggcggcccgcaacagctggcccagctccaccaccacccgggcggcgtcctcgctgcgcccggcgcggatcatccagttcacggtattcagcgtgttgttcagaaaatgggggttgatctgggcctggagcatctggtactgggtctgctgcagcaggatctgttttttgtagttttcccggatcagggtgtcgatctgctgcagcatgacccggaactcgccggtcagctggccggtctcgtcccggtaagggtggtcgggcagcatggccagggcggcctcaaagtcgtcgctctccaccaccttcatcgaggcgctcagccgggccagcggccgggtgatgagccgggccagtacccgcatcaccaggccgcccaccacaaagagggccacgaacacccccagcacgatgaagcgaagggccatggtctggccgaagatctggctgtaggggaagatgttcagatacagccagccggtggcagggtcagtcatccagcacacgaagtaggactgcccgtcctgccgccatacccggtacccatggtccccctccaccgccgggggatcgacctcggcgccgcggtagaccatggtgtccccggcggcaacatacagggtgcctggcgaggaggtcatgccctgcagctcccgccggatcacgccggcagcgtcgcaggtgaccaggcagctgcccaggtattccatgctggagtcgatgtgcttgcgaatgtcccgcccgcctaccagatagggatagtccgccgtggggctggtcagcagataagcgccgtaggcctgatggagggcttccagcagggaggctgtgtccatgggaccggtgtcggtgcccaccagcatctcgctgccgttggtgtcgatgaagcggatgttcttgacgatggggtgggcgcgcgcctcctgaatcagctgcacccgcagctggtaacgggcatagtcgtaggcggaggtgccaaaggccagcgttttgagttccgagagctgctgctgcagttcggggctcaccgccagatcgtaggtaaagctctccacatcctccagctcgtcgctgacctgccgggcaaaaaagtccagtgattggagggacttttcgtacaggttctggtcgtagatgccgaaggagatgttcagcgccgccagcatgaccaggcagatcaccagcagcagggtgaaaaaagccgacaccatcttttgggagagagagagattgtgaaagcggcgcagcagtttttgcatcctgtgacttcctccttttttggccgtggcagcccgccaaaaacagggctgcggcgccagcctgcccctgcagtgccgggcacccctgccctgttgtcgatgataccattataggggctgccgcagggcattgtcaacgggtgtggtgccacaggccggtggcgtcgtcccgggtgttgcgcgccatcaaaaagatctgttccgccacctgctgccacagcgccggatggccggtcagggcagcgtatcaggccaggaaggggccgcccatgtacagaccatccagccacatctggccgggcaggtcgggtttgtggcagtagccgccacaggcacagcgcgggatgtgggcatactgggcatacacggcgtccttggtggtagtggaaatgcccttttgggggcaggtcctgtggcgcaaaccgccgcatcatcgtctcgcaagcccacccgcgcgttttatactagaagatcttgccggttcgataccagtattgtagcacgggagctccatcccggtcgggggaagaaaccggctttttcggtgcacaaaaccgggtacttgcaaggcgttgggcgtacgcttgtttgaagctgaaattttcatgatacctttacatagcccagcggatccgtcaacaccccgccaacgctcacctcaaaatgcaggtggtttcccgtggaatcccccgtgctgcctacatacccaataacctgcccagccgtcacggtttcgcccgccgtgacggctgttgctgtcatgtgggcataccgcgtggacaagcccgcgccattatccagcagaacctgattgccgtagctgtcgttccagccactgaccagtaccgtgccgctgtgggcagctaggattggcgttccctccggcgcgggaatatccgtaccgcgatgtccggcattgccgaaggcgtccacttccccaaagtggcaggatatataagtatgtcccggcagcggccagcacagcgcaccatcggcagcggcaatcccaccgcacagggcaagcaggctggggcgcatttcctcggaaagcagctggtgcaaaatgtcccgctggtcctgcgtaaagcggtataaatccgccagcgcatccaccgatttgctgctgaccgtgatgtgcagaatgtactccgtgaccggctccgggtcgggttcgtcctcggtcggttccagcgtggcggtcacttcctccacctcggcatctatttcgtgcatcgcccaaaaggtgtcctgaatcaaccgcttcttgccttcgtctatgacgaccacatcgccgtcgttgttcaggttgttctgcacggcaaagacggccagcacttcgggccagtagctcgcccaagtgtgaccgtcctcgtagtcgtattccatcgtggtttcactgcactccggatgcgccgacacaatatcgttgatggccgcgccgaagtcggcgttggtgtcagatacgatttcggcaatagtgatgctgttgggatcgccggattcatcggcaaacaagatgcccatcggtgagccgatcaccgctgcggccgcgcctatgaccatcgccagcaacaacaccacgctgcctgcgccaagcagcgccagcagcgattgcgcggtgcggcgcacggtttgggagagcagggctttgattttggctgcgatataatgaacgccacggctgattgcttcaaccgtggcttgtttattgctgattgtgggcagcttgggtgcgtgggtaacgttgggagcggtattgcccgccgctgtggcagccgtctgcttttgcagatagcggcgcacagcctcgcgggtcaggtgctgccgctttaagtgctgctgcatttggactcggcagcgcggcggtgccggtgtggccgatgacggcaccggggcttgcggtgctggtgttttggctgcgatggtcttttgccggaaacgctgctttttgaacatttccctgcgctcggtctgcgtgggaacagtgactttctctttttcagtcagctttgatgcagattgggcgctgccctgcaaggtgagatttttccgcttctcctgcattgcacgaaacttgcggtagctcatgcgggcggtacttttggcggtgttgcctgtacgggcagccacatcggaaatgccctgctgcacctcggtttgtgcgtattcttcgggtgattcctgccgctgctcggcggcgcgttccccctgcgccttggcccgcataagtgttttgcgcacaagctgcttgcgctttgctttaattccgggcatcgtcgattaccacatcgtccaactggcgcgtatattccgggtagttatccatcaccttgcagcggttaaggtgggttaagtatgccctacgttggggaggggtcataaatttggggtcggtcatggtggtatcctcctattttatataaaagttgtgcttcttgatttctacggcgagcggcaccccgctttttgtctgtgcagaatcatgatgttatcgttctccgtggtcgatgggcttgactttgccgcccgcgacctttgcagcccagatgagatccgccgcatggatgatagggattgtctggtactgctgcgcagcgaaccgccggtcatagaccacaagtttgatttgatgcgccatcccaatgtaaatctcaccccggacggcggagccgccccttaccgtatgccggacgactatacgcaaaccgcacagaccatatcgcccgatattgtgaccgcgctgaccgagcccacgatcaccgatgtaatgtacgatgaaattcaaaaaatcatggaggaaattcacaatgaacaagaaagaaacctataatacacccgaccgaaacgatgcccgccagcgcaaaatcaaacgcatctatctggtcactgctaccacggctgcccttgcctttaccatggcaatgcccgcctttgccgccaacgacccgctggcgaccatcaatgccctcagcgattttgtgttcagcgccatcaaggcgattggtgccattctgctgggcttcggcattgtgcagatcggtcttgccctcaaaggccacgatgccagccagagggcgcaaggatttatgacgttcttcggcggcgtagtcatttactttgcaaaggacattttggatatgattctgtaatagaaaaagccgccagcgcgctgacggctaacagttaggaactggtgggttcaacggtaagtttcaaccccaagggctgcatgattttcagcagcgtgtcaaggttgggagtggttttgtaagattcaatccgcgccacggaggactgcggaataccacacatagcggcgagatcgcgctggctgatgcccattgcgttgcgttgttcaaccattgcgccgacaatctcggcaatttcctcaacctgctccatgtcgccacgagcctgtgcatcgacgctctttacatgagccttgtaatcattccatgttctcataagtcagccgtctcctttctgcgcaagtaatcatcacgttcggcttttgctttctcaatttcacgttttggtgtcttttgggactttttgcggaattgatgcagcagtacgaaagtgttttcttgaaagtaaaagtagaatactcgattgttgcccggacgaagctcccaaatatcttcttcaagatgtttggtaatattatccggcaaccgagtacctttgctttgcagcaattcaatgtacaagctgatttgcttatattgtatgcgggcgtctttattgttggcagctttcttgcgtaaatcttctaagaaatcccacaactcagaatttccgtctgccttttcgtaaaattcaactgtgtacattgaactactccaaatccctatctttatgcttatgatagcacaaatgctatcataagtcaactactcatctgttatcaaaatacgaaagaagtcctgcaaactactgccgtctactgactgtgtcagcgcttgcagaaacatcccgcggcgttgggcaacataggaggtggaaggttttataggcgacgcttgcagcaccgcttgcatcgtagctcagcacgctgtgggcgctggaggcactctccgcggtgcgtgtgctaatgggaatttctgtgcggtagatttttagtgcgtatccgtaggaactccgcaaagcggcacagacatctttgctcaggttggtgcgccgatccaccatggtcagaacaatgccgtcaatttcaagctccggcttgatgcgccgcgtgatctgattgatggatttgaacaacgacaccacgcctttcaaggcaaaatgctgtgcctgaacgggaatcagcacccggtcagcagccacaagcgaagccaccgtaaggatacccagcgatggcatacagtcaatcagacagtaatcgtatttgtccttgaacggttccaacgcctgcgccattacattgaccagccgaacttccatatctgacagccctatgtccgaaggaataaaatccacctgttcttcatggtgcatcaccatctccggtgccggttcgtctgaaataacggattccatcagatcgctgattgtggcgctgttggcagcgccggtgtagccaaggtaactgctcaggtccccctgcgggtcggcgtccaccaacagcaccttgtagcccatagcggccagcgaggtgccaagattcacagctgtggtcgttttgcccacgccgcccttttgatttgcaacagctattgttttcatgttcaacctcatctttccatggaaatcagctttttggctgctaccagatattcgttatagtccttacccacggcagggggcatatctaccaccacgagatttttttctgtgagtttttttacgactgctttggcaaagttccgccccggctcatcgcggtcaaagcaaagcactaccgttttcacatgggggtgctgagaaagaaaatactcaatcggctggtggttcagcccacccagcgccagataatgcacgctgcgccagggcctatcgtgcttatattgccggatggtcgcaccggacatggcatcaataggcgcttcataaatctccacggtatcgcactccgggtcttcggcggaaatcaaaaagccgtattgcttttgactgccggaaacatcgccacggaaagtgccctgacagcctctctggaacgcgcagcgtgcaacgccatgctcatccttgcccacgaaaacgcagttgcgatagctgccgcgtgtggtctggtacagaataccgctgcccacacagtagcgcaggaccttagggctgatgccacggtgcatcaggtaggcggcaacggcttcggcgtttcgatccggggtaggaagtgtaaatggacgaggctcgtgcggctttacaggcgctgccttagccggttgaaaagaaacagtgaccggtgccatctcgttcagcagacgaaccgcagatacaaagtccatcccctcaaccttagtcagataatcaatggcattattacctcccacatcatgagagtaccaatgaaactttccattgccaattgtgatgatgagactatcatgtgaccgggtgcagtattcccgatcagttttacggacaagttcaccggagcgataagtttcaagatactgtaccacgcttatttgccgggcagcttcgatgttcttttggtattttcccatgggggtgacctccgtttctgtatgaaaaagcacctttcctacaaaataggtaaggtgccaaggatacgactatttgtttttagctggccatttgtcacttcagccagctgagagggggttgttagggggagaggaacctcccaaacccattcctgaaaatagttacacttcccccttgctttgataagatggtttcaaaaggatgcggatacacgcaaattaaccgtcccgcattgtcggatgcggtaagatgattttgttcagcatattatcgataacgatcctggttttgatatgttctctttcgaaggctttaggcctacgttagagataatcaaatcaatcgtagaagatgcagaccgtaactaataatttgatgagtggccgctaaagttaataatcaaaacactgatgcccggggagcctttcggccctccgggcatcgtttacattagtggcggcgctatacataactgcggctgatgtgcagcgcctgcgccgtctgttgctgggtcttgggcgcaccgtcaaatccataccgctgccgcataatagcgcgttcccgggcaggcagagcgtccaccagcgcgcgcagccgggcggcgtcggcgcggctctcgcagccggcctccatgtcggcctcatcgggcagggtgtccgccagcgtcagctgcccgtccgcctcgagcggctcctgcagcgacagcgtcactcccgtccgccgcccccgccgcaggtccatgcgaagctcattctcaatacatctgctcgcatagctggcaaagcgcttgcccttggcggggtcgaaggtatccaccgccttgataagcccaatcgtgccgatggagatcatgtcatcctgtgcgctgttcccggcatagtattttttgcagatatgcgcgacgagccgcagattgtggcggatcagcgtatcccgcgcctgtgcggcggctgccccgcccttttgcagatcggcaaaggccgcgcgctccctgtccggcgggagcggacgcgggaaggacccgctttcgagatgcagcgccagatacagaatatgccctgccgccgcctgcaaaaacaaaccaaaaatgcccagcatacacaccacctcgcggaagtgtatgccgggcatggaaattctattctgtcttttgggtggcaaacgccgggttggcggcgcacgtcggcggggacgtccatatgggcgatgaggcctttttctttacagcgtaaactgcaccgcgcagaaggcggcgtagatcgccaggagcaggatgccctgggcgcggttcagcttgcccttgacgagggcggggaccgtcaggatcaacatgacggccagcatgaccggcagatccagcacaaggctggaattgatgccgaacagcgtggcgctctgcgggatggtgaagggtgccagcgtgatcgacatgccgctgaccagcacaaggttaaagacattcgcaccgacgatgttgcccagcgacaggtcgctgtggcccttgaccagcgaggtgatggccgtgaccagctcgggcagcgaggtgccgagcgcgacaaacgtcagggcgatgacgctctcgggcacgccgagggccttcgcgatcagggtgccgttgtccacgagcaggtttgcgccgacggcgatcagcaccgcgcccagcacaagcaggatcagcgtcttggcgaggggcatttcctcctcctcggacgcctcttgctcaccggcgggggtgtttttcatctgcagcacgttgacggccatgtacgccacaaacattgccagcatgatgatgcccatgacgcgggtgaatctgccgaaaacataggccgcaatgcagtagatggccgccgccgcgaagaagaaggcgacgggggttttcagcgttttggggtctaccctgccggggcgcaccgcaatcgtgatggccgcgatcagtgccgcattgcagatgaccgagccgatggcgttgccgtaggcgatctcgccatggccggacagcgcggacatcgtggagaccatgacctccggcagcgtcgtgccgatggagaccaccgtcgcgccgatgagcagctccggcaggtggaagcggcgggccagtgaggacgcgccgtcaacaaaccagtcgccgcccttgatcaggaacaacagaccgacaataaaaagcagcacagggatgagcatattgattcctccgttaaaaatgcacgttatgtgtcggaaattatattataccacggcagtccgggcgccgtcaaacggggcggggtttaaaatgtaaaaatgcagcctttcgcgcgcatggcttccccccggagggggaagctgtcagtggccccgaccactgactgatgagggtcgaccttgcagatgctgcccgtttacaagctgttgccgtgcacacgcccctcatccggccctgcgggccaccttcccccgcgggggaaggcaaaaagcccccaattcttgcacactttcccgcattgtgtcctgccaacacaaacacaaaaccccgcaggggatacctgcggggctttgtgcatagaggggtgggaaagtatataaaggtcagtgaatgtcttgattgattacaaatattattatagcaagttttcttaaaatgtcaaatgtcagacttgcattttggttttcaaaagattataataaagtcattcccacttaattttatttagcaagcgcacaaaaaagcatacttttccaattttgttaaagataacagtgattgtatacttcactttatttttttgtgcgcattacacaaaacaacaacaaggagtcaatccatggacgatttggaccacaaaatcctacaactgctggcggaaaatgcgcgtatgcccgttaaggacatcgcccagcgggtcagcctgaccagtcccgccgtatccagccgcatccaccgcctggagcaggagggcgtcatcggcgggtacactgtcgtgctgcgccaccccgacgcgcccgcccgggtcgaggcgctgatctcggtgctggtggacgcagcgacccgcgcgagctttctgaccatgatcgagcaggagccgcaggtcttgcagtgcttccgcgtgacaggcagctacaactttataattaaggtaagctgcaccgacattgacgcgctggagcacctgctgaccaagatgcagaagatgggctccaccaacacccagatcatcctgaacacccagctggatcgcggtctggcattcgacgaataagcgaggtttttatggcacatttttgcaaaagctgcggtctgctgactgccccgtacgacgagcggtgccccaagtgcggcgcaccgctgccgcatatcccgatgggcgaggctctgttggagtccatgcgtcagtccccggagggtaccgttgaaaccggcgagccgctgtacgagcaggacctggaggaggaccgcatcgacgccatgagccagggcgcaacgacggcggccatgctgctgttcgccatccccatcgccgggttcgtgctggcggtggtgtggagctttggcggcacgcaggaccctgcccgcaggcggctggcccgggcgtacctgatccgtgcgctggtcgtggcggggctggtcatcctgtttgtggctgtggccgcgatggtgtttaccgccgcgctgcacagccagctggcctactactattaccgttgaggaggcgccatgaaagcatctgtcatcatcccgaacctgaacggcgcgggctggctgcgggattccatcgagtccgtctgggcgcagaccgagcaggattttgagctgatcgtcattgacaacggctccaccgacgagagcctggacatcgcccgcagctactgcgggcgggaccgctacactttaattgagaacgccgggaacaccggcttttcccatgcggtgaaccagggcattgcgattgccaaaggcgaatacatggcgctgttcaacaacgacgcctttgcggagccggattggctggcggagctgatcaaaactgccgacgccgacccgaaaatttttgcggtcagcagcctgatgctgcgctactatgagccggagctggccgacgacgcgggcgactacgtgacgatcctgggctttgcctgcaagcgcggcgacggcttaaaggccagccgctatacaaagccctgccgtgtgttcagcgcgtgcggcggcgcggcgctctaccgcaagtcgattctggacgagatcggcgtgtttgacgagctgttcttcgcgtattacgaggacgtcgatttgagctggcgtgcgaacaatttcggctacaggaacgtctactgccccacggcccgctgccgccacatctgcggcgcgaccaccggcgcggtgcgctacaacccgtttaagagcatccagagcgggcgcaacagcattctgctgccctacaagaaccagccgattttgatgttggttttgaattttatcccgatgctgctggggtatctgctcaaagtgcttatgttccggctgcgcggcttcggtggggattacgcgaagggcttccgcgaggcgtgggcggcgctgccgaagatgaacagaccgaaattcaagtggcggaacctgcccaattatgtctgggtggagttcagtctgattgccgggctgttcaagtacattgtgtaccgcgtgcagcgggcgttgaagatcacgtgatgggggccttgcctttcattttgctgcgctgtaggggccgggcatgcccggcccgccgcttcccggagggccggtgctagcgggtaacggcaagaagcccctccggccatcgctgcgctcggccacctcccctgtgaggggaggcttttctcgggcggagcccgcaaaaaaggctcctcgcattgcggggtgactccccgctgcgcggggagatgtcgcgaagcgacagaggggttcgggtccgaaggactggccgagcctgcgaggcctgaggggttttggcacctttccgcaggctcccttatctcttactttcttcgagaagaaagtaagcaaagaagctttcaatatctcaaccaaaaagcacctgctggccggtcacacgcataccggtcagcaggtgcttttatttacgatttaatcctcatccgcaaagttgcccaatgcctttgcctgctcgatgaccttgttctcgagcatctgtggcaaggtctcataccggacgaactcgaaggtgaagtagccgcggccctgggtcagctggcgcaggaaggtggtgaagtcctgcatctcggccacggggacctcggcctcgacgacctgcaggccgtcgtcatcggggttcatgcccagcacgcggccgcggcgcttcgtgacctcgcccataatatcgccggtgttgtcggcggggacgtgggctttcaatgcgccgatgggctcaagcaggacggggccggcctcagggatggcggccttatacgcgagtttggcggccataatgaacgccatttcgctggaatcaacagggtggtagctgccgtccagcagtgtggccttcatgccgaccatcgggtaaccggccagcacgccgtgctcggcggcctgacggacgcccttctcgactgccgggaagaagttcttcggcacgctgccgccgaacacgttctcggcaaactcgatgccctcgccctcgatgggctcgaactggatccacacgtcgccgaactggccgtggccgccggtctgcttcttgtggcggccctgcgccttgcagctcttgcggatggactcacggtacggcacgcgcggattctcgagcgtgatctcgacgccgaacttattcttcagcttggccagcgcgacctccagatgctgggtgcccagaccgctgatgatctgctgcttcgtctcggggtcgaccacgaaccggatggcggggtcctcctcgatcaggcgggccagcgcactgccgaccttaccctcgtcgcccttcttggcgaccttgacggccatgcggtagctgctgatggggtacacaggtgcgggcagcgccacgacgcgggcggggtcacacagggtatcgccggtcttggcggtggccagcttggcaactgcgccgatgtcaccggctgcgatttcgggcgtatcggtctgctttttgccgcagacggtcagcgtcttgcccaggcgctccggctggccggtgcgggcgttgacggcgttgctcgtcgcggtcagcctgccggacagcaccttaataaagctcagcttgccgacaaacgggtcggccacagtcttaaagacgtaggcgcacagcggggcggcggggtcggcggtgatctccaccggctcgccgccagactctcccacggcggacgcggtgtccgcgccgggcagcagcacgttcatgttgtagagcagcatatccagcgcctgcgcgttgacggcggagccgcagaacacgggcgtgatctggccgctgcgcacgccggaggccatgccctggacgatctcctctgtggtgaaagcctcaccctcgaagaacttctccatcaaagcctcgtcggtctcggcgatggcctcactcatggcctggatcaggccctcaaagcggtggccgatgtcgggcaggtcgatcttgacctgcttgccgccttcgtatttgaaggccttctggctgaacaggttgatgtaggcgacggtgccgtcgtccagacggacgggcacgacgcaggggcagacactggggccgaacttgatcttcatctgctccaggatcttaaagtagtcggcgttttccaaatcagccttggtgacaaagatcatccgcgccttgttgtttttcagcgccagctggtacgccttctcggcaccgacggtcacgccggaacgcccggacacacagatcagcacgctctcggcggccatgatgccctcggcagcgccggtctcaaaatcaaacagacccggtgcgtcgatcaggttgtacttgatgccctcgtactcgacggggacaacgctcgagttgagcgatgccttgcggcggatctcctcggggtcaaagtcgctggcggtggtgccgtcctcgacacggcccatacgctcggaagcgccgctcatgtacagcagtgcctcggtcagcgtcgttttgccgcagccggcgtggccggccaccagaatgttgcggatgtctttgcttgcgtagcccatggatcgtcaaacctcttttcgcgccggggctgcttccggcagccctgcggcgtagaatttcattgcggcgcagtgatttttgaacactcccgcctgtttgatactactttaccacattgttgtggaaatttaaacagttttttcggattttttgtaaaaatttttaggcaaaagattgtggaaagtgtaaaaaatcgttcctcgacatacagcgagtgtaggggcgagcattgctcgcccgccaacttggcgcagcatcgtcttttcgggaaaatttatcacagggcaaacgggcacgggcgggcaacgcccgcccccaccaagcgtttctttgccggtccgtgcagcaaaaaagccgcacagctttcactgtacggcttaacggctcacttatttttccttcttcgccgtctttttgcggcggcgggcgcgcccgctgtcggccttggcctcgggaacatagaggctatagctcaacaggtagcggccatgggcagggatgcggtagaacgcggccttgatgcgctccatcgggccggtgccgctctcggcggtgctgccgctcagcataacaacatactgcatatcggtgtagcgggcggccacatcgcactggcgcagattcatgtggatcagatcgcccagctgctccaccatcagagcggtctcggcagcatcggtgttctggctgggagccacggtcaggatcgccaggaatacctgcagaccgtagcgggcctgcacgccgcgctgtacgcggtaaatttccttgaacgtctcaaagtcgcagatacaggcccccgtgttctcggtatccggcagagcagagagcagcttggagacctcgctctccatattgcggtctgcctggcgcatctggcggtaggcagagcctgcgcggcccggctcaatggtatgatgcaggcaacccatggcgctgccgcggcgtgccagatcctgcgcctcctcgtggcggcccagcgtctccagcgcgacgatcttttccagataaaggcgctcctcgtaggggtccagctccagcgcgcgggtacacagcgcaacgatgcgggtgctctcgccccattttttgcagagctccagcaggtttaaaatggctgtgcggtactgcccgtgcaggcgcacgctgacgctttcgacccacggctcggacgcagaccgcggcagcaggcgcccgtcgtacaggttgacgatctgttcataaatgcggctgcgcttctcggcgtcgctctccttgcgggccagctccgacaggtcgttgacctcaaacacatccacgctgcagtccagatgggggttccactggtagtagccgcggctggtcacgatgcagccctccatctcatccagaccctccgcgtcgatcatattgcggaagcgatgcaagatggcgcgcagggccatgtccgggttggtggaccgctcccctgcccacagggtatcggtcagtaccttgtgggagacgcgctccccgcgccgcaaaacgagatactgcaccagcgccgttgccttgcgggactgcgccagctgtgccagcacgggcttgccgttcacacggatctcaaagccgcccagcattttgatttcaattgttgccatcctagtcatcctctctgctctgatgcccatgacgttcctgcatttttgtccggcacacaggtattcatgttttaaagtataacgaatccatttgaatttgtccagtacatctgccgggattgtaataaacttttcaaaaatagtcccggagggcaccgttcacgcctccgacgatgccttgccgtcccaggtgccgggttcatacaggatgaccggctcaccgggcaactgcacaatggctttttgggtgcatagcggcacgatctggttgttggtgtcccgcttggccacagtcagcaccaccgtcatagccgtaatgcgcggggtcttggtttcgtcgccgtcctgcgtccagctgcgggcgtagaaatgcagttcgctgatgaacagccccatataggcatcccggggataggccgttgtgtagccgtaggcaacgtagggccgtgtgaccgtcacggtaccgtcctcggccttgttctcttttgtgtgctgcgggttgccgtagtgtccggcgccattcagttcatcgcggtaaaagcgcatgtgcaggtagccgttcagcgcattggcctgttccgctgtcagcagcgctgtgccgtctgtctttgtcagcatcggcacacagtccttgtcgatcagttcaatgtggttggggtagacgctgaattccaatgccgtgccctcgctgtagtcatccttggacgcaaaaacgctgtccaaatttttagggtccgttgcgccgtcggtgaagcggatatagccgttcgcctcgagcacctcgccgcggatcgtctcaatgagcgcatcggccagattttgcgcgcgcgtctgctgctggatgtccatgtacgcctgtgcgctgggctgtatcagcgtgaccgccgccagcgtaaagatcgccagcagcaccatgcagacgatcagctccaccagcgttgtgccgttctggtttttcaaacgctgcttcatgggttggtcgtcccttctgccgtgctcttgctgtagcggtaaaacttgtgctgttccgtcgtttcttggccgttttccgtaacttttgcgcttgtctccacgctgtccagctcgacgccttccaccgtaaattcaccgtaatcgccaaaggagaacttcagcccatcccgctccttcgcccagctgggggccgcgttattggccgggtacagcccggcgcagaaggcataggctgtctcccgcagagactcggccttttgggacatggcgcgggcgtaccgcagcgaaacgacaaacatcgacgtaaaaatcatcagcagcaggaacgacacaagcacttccacaatggtctcgccgcgctgactttgtaaagtatgtttcatagcgggtcactcctgtgttgtgccggtgctctgtttggcaccgcgggtgtaggtgatggaatcgggctgctggctggtgtcgcagtggaacgtcaggcggtagctgccaatgttttcgtcagtaatggtcaggtcaggactgccgggggcgtagaacgtcagggctttaatgcggtaatactttgttggaccgtcgtttattgtgtagtacacctttggtaattttttgctttttgcctggctgccgtcgctgtcgtacttcactgtgcggtcataggtccgcgtgaaggcaaagctctcgccgtttttcgtgactgtcactgtaatatccagctgtaaatcgacgatctccatgcccttgcggttttcgccctccagtgtgtcgagcaggttgcgcaggtctgtggcattggtactgttcgccgtctggttcagcttgtcggcaccgtctcccgggcggcggcgcagtgttaccgtgatggcctcggcgccgccatcaggctggttaccgttcggtttccaggcgaactccttgggctgggattccaaatcatagatgtccttgccgtagctttgggagaacatgaactgctcattgacgaacttggcaaagctgctgtccttcttgttcagctccccttccagcacgtcggaaaagctggttgccagctggtaggcttcctgttccagcagctggcggttggcattggccgtcagcacggaggccgcatagaccagcgctgccgacagcgccacaaacagcgcgccgatgcagaggaccagtatcatcgaaagtccctgctccccgcgcagaatgctgcgtgccctgcagtgcataatgccaccttctttcctgaaataaaattacgatgcgtcgcttgtttccgtccgttccgggggcgcggtttccgccgcgtccgtctcatccggggcagcggcggtctccggggtcgccatgggcagtgccgcacgggcccgcatcaggaccgggggcacgcttgcgggggcgctttccgccgccgtgctttctgcagtctcggcaggctcgacgctctccgcggagtccatgctctgggcatcctccgtcgcatcggcggtgttcgtctcgttgacggggactttgaccgaagcggacgcaacggtcttaccgttgtcatccgagtgcgccagcgtctgcagcgtcacacttgcggtgaacttttgcagattgagcgagtcgtcctgcaccttttcctgcagctcgggcagggtgatgcggtaaacaggctcggcaccgtcctcctgcaccagctccagcatgggaaccgtctgtgccttgtagtacagcgtaccgccgtccttttccaccgtgccggtgacgtcatagggtttctgttcccatgtcacgttgccgttctcgtcggtcacaggctcgacgctcaggtcgtaccagatgcgggtcttgccggtctccttgtccacaacggtggtctgctctttaagctccgtcgttttgccgtcataggtcttggtgacggttttgatttcaccgcgcgggtgaatcgtgccgtctgcgtccgtctcgtccctgtcgtaggtcgtcaccgtaatgctgtagggcgttttgtcctcgcccagcggcgtgacggtaaaggtatagctgtcggtcaggttgcgcaccgtgccgtcggcctgggtgtacttgttcaccgcggtccactccaccgtaaagcggcgcagctccagcggggccgtaccgcgactggtcttaaactcggggtcgttgtacaggttgacctcctgcgtgtaaacggcattgccaagcgcgcgttccggttcggcggtgtccacgggggcgtccagcgtgatggccggcagctgtgcctttgcggcatcctgctgcaagaagtagaaccagttcgacgctgtcgtgccgtcggtgggcataacgcgcaccgcgggcagcaggtattgttttgcatggtcgggcgtcagcgtaaagccgttgccgtcgggcacgaaggtatagctggcggtggtgccgttgacgctggcgctcccgcccaccgtgcggctgtccttcgggatgaccagctcggcgtcgcgacttttcagcatctcgtccagtgcttgggtcaacttctgctgggccttgtacttgtcctgtccggtgggggtattctgccaaacctcggccagtttggcaatttctgtatacttggcctcatcgctgaagatatagccggtaaagtagacattgccctgtgcggctgcgtccagcgtcatgttgagcttgaggtcgttcaggaacgtctcctgattcgggctgtcgggcgcaaagctgctggccgtaaccgtgggtgcagcggcgcggcggacgatggtctcgggctggctcaacgcgccgtccgggccgtcaaagcagctatcgtcattggcctcgcggcgggcaatgacgcggaagcgcaatgccttgccctgatactgctccagatccagcgtcaggctgccgacgttgcccgtggtgggcagcatcagcacagtattgccgccgtcatcgacgacgcacaggtcatagtggtcaatgcgctcgtcgtcggacggcgaccagccgaccgtgtagagcagggcatccgcgttgtcggtctcgccgttgacgcgggtgatggagctcggcgcgctgatgccgggcaggcgctgcttaacgctgtaatccgccacagcggacgcgccgatttcatcggtgccggctgccgccacgcgggttacctcgagccggaccttgtcatagcgccagctgtcgctgccgttggccagcatggtatccacattgacaggcagggtaaagctgttgccgctgcgctgaacctcattggccagatttacgccgtccttcagcgcaatttgctcctgaccggtcacattgccgtcctcgtccgtcaacaggccgtagagcttgatctggtagtcgggggctgcgtcagtggcctccatgtcgccctgtgtccatttgaatgtgtaggtcagctgattgttggccgggttcaccacgccgccgtcggtatcttccgccagcgtcggggctttcaggacattcaggttcagctgcttgaagatgatctgcggggtcgtctgcgtggcctgtttagcccattccgtgtcatcggtgcggctcacgtcggagaagcagagcggcgtcagatgggcataggtatagctgtgctcgcccgtgcggacgatttcatagccgttcttccaccagatttctttgtcggtgtcgtttgcatggctggcgatggctgtggacacttcctccgccgtggcatcccagcgatacttcatatcgcccttgccgctggtaacgggcatcgcgacagcgaggaagtcggtgtagttggacatagcatccgacggcaggctgttcaggttgaaggtgacgggagactctgtcacaatgctttcccgcgcggccagcgtgatgtactggccgttcaaagatacgccgttgacttcgtcattgcccagatattttgccagcagcatgacgcggtaggtcgggctgccgtgctcgctgctgtcgctcttgaccttcggggtaaagctgaacttcacggttgcttcaaagctctccgctgtctggccggtgtaggtcacatactccgtgtcgccgtccttgttcagcgtgcccagcggcagaccgtcctcgtccttaccggagtcaccgttgtggtctcgccactgggaagggagataggtctctgacttatactgggccgagcgcagatactttgtgctgttgcccggggttgccagcgccgtaagcgtcaaagtgcgttccaaatttttagtcaggcggatgtactgcttgccattctttgtaaaataataattatactttccatcggtcagcttgacggtccaagcctcgtctgtcgggtattcggtgtagtttttcagcaccgcgacaacctcatacttgaattctctccatttttcatccggcgtctggcactgattccagtcaaagccgccgttctcgcgtttgaccagccggaactcaatctccggtgtcggtagggcgtgcataaaggtctgcacgccgctggttcgggggttgacggactgcgccgggtcgtcgttggtattgtagggcgttacacgcacgacgaagttacccgtccacgctttatcagccacaaaagtatagctgcgctggtagacgtcagctttgagatagggaactgcatccggtgcgacagtacccgcagcgtcgcagggcagaatctcaacacggtagtaagcggcggggctggctgtcttgtcgttcggctcgctccacgtcacttcataacggccatagacgttgttgtccgcgtcctgcacctggctggccttgacgttgatttctcccggctgggcgggcttggtgctgtccagcacgtacttatagtagttctggatgacctcgtcggtgatgtcggtaatatcaacgtcgtttgtgaccttgctattcgcagcttcgccgaatcgcagcatcacagtcgctctctggttgccgggattggtatcatcgcccgcgccggtatcatcgtaaatgtaggctttctgaccgacggtcttgatataggcagagtttggttgggcagacgggcccgcagatgtaagaccgctaatccaccacaggctgtacgctgcaccgttctcatcctctgccaaagtgggcaggaacgcaatataaggatcggttgcttcatcagtgacgttataacctatgtacagacggtgtgcttttactttttccgaggacggataccacgctgtttcattgtaggccgagtcataattaggcgaattccagttacctgttttttcggctggttttgtcgtggtcagtttacgggaatctttcttaaagaagctcttgcctgcactttcggaattttcaatataatagttgccgtggccggtgacattctcgtaactctggcgcaaataggcaataggataccaatctgtaccaaccgtggcaaagcagtttgtgacattggttgctttactcgaccctctaccgtcgccgcggctgccgacaattccgatttttctgccacacgtaaagtttgtattaaggtttcggcagcggtcaatatttaccgtaacgttgtcaattcttcctccattccacgggccgatccatgccagaatgccgactgcctgcgattctgccttgattgcaccgctattgacgcagtcgatgatgttcagcgtcataatatcggtgaccttcttcatctcgattttaccgataatgcccgcacagtcattcgcgccgtttgatttataccaaatctgaccgtagttacggcaggaaagcacatttgtggtgccgccggaaataggctggtcaataaagccgacaacaccgccgactgcaccgtaacccgggtttccgtcgttcgtgtttgttgtgattttgccaaaattgaagcatttctgcacggttccgccgtaatccagccaataggcgatcacgccgcccacattggccgagcggctgttgaacacactaccgcagttgactaccttgctgacagaccaccggtcatcgctgcggttctgctgctggccaatgacaccgcccacatggacaacaacacggctgccgcctttgtaaatgttttcattgtctgtatcgtctttattttgatttccaatccatgcccacgtttcaaacacgcgcgtaaagcggcgcacagcggcacagtttaccacagtgtccagcacgcttttgtctgtgacgttggattcgttctggccgacaataccgccgacggtggatgccgttgtcgcattgtcagaatagacaaaccacttgccggtggcagaagtgttaatcgtaccgcggagagagttaaagcctgccagaccgcccagataaccgtcggcacggacggtctcgctgttgttgctgccgcgcagggcgacaagcagatcattggcggcaagaccgctttggctatagaccttcccatagccttgtgcagacacagtgtcaacacccatgagatttgcgtaggtcttgcctgtggtcagctctgccgccatgctgttgatgccggtattggcatctgccgcacccagccaattatcaacctgtgtaacaagggcgggtgttgcttcttcgtcgctgaccagcgcttttttgctgccgctgcccgtaatagtgccgttgttggagccagcgacgccgcccacaaagccgtaacgcgccgtgatgatgctgcccgcgccgctgctgcgctcggtggcgacatagctgttgacgatttcggcattgttgcggcccgcaatgccgcccacatggctggcactagcgagcttttcgtctgcggtctgggtcgtggtgatgttgctgataccgctgacctgcagtttgatgtatttgacctcacagccggtgatcgtgctgttgttcagaccggcaatgccgcctaccgtgctgccggtgctgcgtgcaccgacggagacaaggccgtccgcgcccacgtcgccgcccatcgtgccggaataggtacactgatccagggtaccgtcgttctggcctgcgacgccgcccaaatttgtatatttatcaagattttgtgtaaggtccagcagaacgccggttctgctgaccgtgccgtccttcgtggtgcggcccaccgcgccgcccagcgtgacggtgttggtgcccgcgcgcaggccgtcgttcagcgccagtgcgccgttttcgacctgacagccggttacagtgccctcgttcatgcccgcaaaaccgccgatggtgactgccggggtgctgaactgcacgttggcgttctccgccagcttcacattgcggatggtcgcgtctttgccgttgtacgccgcaatggcgccgatgctctccgacgtgccggtgatcgtgcagccgcttacgctgctgctgctttccagctcgctgtcttggccgatggtaccgaagttcgtggccgtgacgccgcccgccgtgccgttggctgcggtgacggcggcgctgacctgcacattctcaatcagcgcgtctttattattattgcccgcgatgccgcccgcctcgccgttggtggcgtagacctgattctgggcatggacgcaggcgctgattttgccgccctcgtcgttcacgcccgcaataccgcccgcatattttgtgctggcgcgcattgaggcgtagttatccacacgggtgatttcggcacggttcgtaccggccacgccgcccgcgtagttggcggcagtgacgctgcccccgaccgcgccggtggcgttttcagcgccgtaaatgctgcccttataggccttatacgtcgtattgataccggccacaccgcccgcatagtcggtggcggtgacactgctttgcatctggccggacagcgaaatgctgccgacgttggcaccggccacgccgcccgcgtaccggttggcctccaccgtgccagtgctgttgttctctgtgcagatgatgaggcccttgcttgccgcagcgtcaacgcccaggttgacgcccgcaatgccgccgacatagctgtcgccgcgcacggcgcagtctttagccgggtaggcagactgaatacgaccgccgttgacgcccgcaacgccgcccagataggtatacccggcttcacggttgccgagggacgccgccatgttgccgtcggtgatcgtgccctcgttccagcccgcaaagccgcccgcggcgcacttgtgagccactgtgccgtagtttatgcagttttccagcgttgtgttgggtgtggcatagccgatgataccgcccgccagtgcgccgcgcacgtcgtcgaaatcatagcggccaccggccagcgcgttcagcgatacgccgcctttaaacgcgccgttgttggacgggttcaggccgccgacggacaaggcgttctgcgttgcgccgttggttgccttttgaatcgtcagcttcgttttagcgtcgtttgcgccgacgatgccgccgacgtagatgttggcctgcaggttgagtttgttccagaaaccggtcaggatgattggggtatccgttttcgtttccgcgtcggtgctgtcggtcagcacgccggtgctcttgtcaatcttcggcagcagcgcctccagcgtgacgcccgcgggcttggccgccagcagacggttgtagccgatgatgccgcccgcgacggcgtcggcctcgacgcggcccgaggtcacattggttataaacgcgccgcccgtcacggtgaagccgcccaccggcaggttggcgccgatgacgccgccgacaagctgctgacccgccacgcggctgaccttcacagtggcagagggcagcgtggaggcgcagttcaggccgatcatgccgccgacagccttgcccgccgccacgatctggccgctgatggtcaggtcctgggtggaggtgttggagatcgtcgcattttcatcgttataaccggccacgccgcccacgtagttgttgccgtacagaatggcacccagcgtcggggtgccgttcttatcccacgtcacaacgccgttttttccgttgcagcctgcgatgccgccgacgtagtcggcgtagccgcccgcggagctgctcaactcctttaacaggttgatgcggcgggtgtcggtggcgttgtcgccggacatacggttggcgcagttctgcacggtggctgtggcagtcgtgttttcactgccgccccagccggcatcattgacgccgacgatgccgccgacgtaggccgcgttctttccaaaggccgcgaccagacccgtattggtcatgccgttgatttggctgttgctgccgttgaccgacacgatgccgccgacgtagcggctgccaaagacgtcactgctgttcgtatcgttctgttttacgccgctgccggtaaagccaccggccagaccgcccacaaaccggttgccgagcacgtagcccttgccggtcttgcagtcctccagcacaatatccttgccgtagccgacaaggccgccgacgaaatcacccttgagggggctggcgtcggtcaatgtgccggtttcgtcgaagcccgccttgacctgctccttgagctgggtctcggtcaggtcgctgcgggtcacgctttcgcagccttgcagggtcacgcccctgccgtagcccgcaatgccgccgaagaactgccccagcaccaggctgcgcgcatcgcccgcggtatcgcccttatagttggcgcccgcgctgaccgtgccgttgttcctcaggcccgtcaggctcggcgtgctggtatttgcacctgtcgtaaacaggttgccgacgatgccgcccgtaaagccgttgccggtcacaaagccgttgttgacgatgttcgttttactgtctgttttcatctgggccgcgtccaccgtgccgaacacgccgcccacgccgacgctgcgccagagggagttctcgtcatccggctcagccgccgcggcagcgtagcgggccttctcggcctgctggtctggcgctgtgtttgtaacggtttgcgtgcccttgtccacaagcagacccgccaccgccacctccgacgcgacggtcagattctgcataacggaatccgtttcgggtatggcaacgccgacgagaccgccaatgccgcgcggctcgtctgtataataggtatagcttttgctgccagcgttttgcgtctgcgctttgcgctgcgttgcggtggtagtgttgtcaaacgccagcgccgcggccaccagcgcactggtcgaggagttcgtgccgcgggtcagggcgcagttttccagcgtgccggtattgacgccgcagagtgcgccgacagcgcgaacatcgcgccagttctcgtcttccttcgccagcgccgtgacgaatttggtcgcggtcagcttgagctggtctgccttcggcagcgtatcggcggcgacggtctcggtcttgacgttgacctgaatgtccgggtcgcgcagtgtgatgtaagaaatgtcgcccttgttctcgccgataaggccgacatagtggtcggccagctcgtccttccctgccctgccggtttttgcaacggacttgctgctcaattgcagattgaggatgggcacacgggtcgtcttggttgcaaggaccgttgttttgctcgtaagttcgattttttcacccagctccgggatcgtcggccatgcgacagggtcattgagggacggcaccttggccgccgggtaccgctcacccgacgcgcagtagaccgtgacgccgccgcccgtccagttcaggccggtgctgttgctggcctggggggtcagcgtgtaggtgccctcgccggcaatcttccaatcggcagaccagcgcaggttgtacagatggcggaaatatttcaggtcagccgtgaccgccgtgccgcccttggccagcagggtgttttcctcgttcgtcgtttcctctttgctggctgtgtaggtatcgctgtagttctcccgcggctcggcgcgcatggcaatgtagatgtccttcgggtcgttcagcaggcgggtgatgctgtacaggctcgtggcggcaacgtcagcgctgttctcacacgcacgcagcagcgccgcgtccgccatggcgtccagcgtcagcacaaagctgcccttgttgtagcttaacgggaagtagagttctttcttggtttccgtccgttggcccgcattatcatacgtataaatcgtgacaggcatcttggtgatgacctgcttgttatcatccgccgcacccgcggtgtcgcgcttgatcgtgatggtaaacagcggcttcgtcttgccggtatccttggcatcgtaggccgtggccgtgtaggaggtgtccagatcgccgaggctggagttgccgctccagctcagggtcagcgtctcgccgttcgtcaggcggggattcttgaccttcagcttcgtctgcaccagctgcacaacgttgacgcggtcctcggcagagtagtagccgacaaggctgtcattgcggcggtggtcatagctgcggtcataaatattcgtagcaccgtcctgattgaagcggaacttatcggatttggtatcgtaaaagaccgagtagacctgcccgctctgcacgtcgatctcgacgcagatcgaggcattcagcagcgaggcgtcgtagatataatcgcccagcagccgctccaccagcgcgttatggttgcccgcggcagcgcccgtgcggtcatagtagagcgcggccacgttctggttcagttcggccttggtgcggctcacaaggggtttgccgtccgcgccggtcacggtgacgtcgttctggaagtggtcgcccgtgtcgccctcctccatgacctgccggcggaacgcatccagctcccccgccgtctccatccgggtcagggagatctgcgccgtctggaacagcgtgcgggcgttggcctcgttcttttcgaaccgggccagccgcgtgtaggcgatcagcccgccgccgaccagcgccgccagaatggccgtgatagccagaacgaccatcagctccaccagcgtaaagcctttctttttgttttttatatttttattgtactgcaccatagatgctcccgtcgtttctccggtgaaaggttacaattagacacaatatcagattatatatattgtcattatactcggaatgtgacgttttcgcaataaactccgcgagatttcagcaaatttacaccaaatatagtgggtcagcggcaagttgtgcacgatttcgccataatttccgttagctttgaacaaaaaacagagtttttttcgcgaaattccttgcaaatacaggcccggcacgatatactaaatagtgcgttattatatggtagaggatgtgtaacaatgctggcagcacgactgggcgcatggctgcgccataccggggaacgctgggccaaagctgcgtttgcggaaaagctcgccgtactgctggcgctgggcgctgtcctgtatactattgtgaccggcgcggcggagctgcgctatcaggcccgtgcgcgggaggccctggctcaggtcaaggctgcgcggctggcggccagtgccgtgtctgcccagtgctactctgccgggcagacgttcgccgaccagacaagcgcagacggctttgcggacggcatcgccgaggaaatccgcacgctgggctcactgcccggcaccgtgacgcttttgcagatcgacccgaacggctacaccgtgcagcggctcctgtatcaggagaacggcatgtacgccatctatgatgccgacggcggttaccgcgttttccgcgtggaggaccggctacaatacggcgcgggggtgggccatgctgctgcttgagcttctgctgggactcattcgttttctgctgggcgcggcgctgttcagctttatgaacgtcgtcgcgtggcggctgccgcggggcatggacccgctgaagggccgcagcgtatgcccgcagtgcggccacaagctgggtgctccggacttagtgcctgtgttcagctggttattcttgcgcgggcggtgccgccactgcggtgcgcacattccggcgcggtacctgctggtagagcttctgggcggcgtgctggcgctgggctgcacttggcggtacggcgctgcctacgccctgccgggcgggctgttcggcatgagctgggccgcgctgctggcgctggcagtctgcgggatcttgctgagcgtttcgctcattgatgccgagacgcagaccatcccggaccggctgaatctggcgctggcggtctgcggcgcggtgagcgtgctgctctcccctgccgactggctgccgcacgtcatcggtgcgctctgcgtcagtgtgccgatgtttctgctctgccttgtcattgatggcgcgttcggcggcggcgacatcaagctgatggcagccgccgggctgttcctgggctggcagaatacgctgctggcgatgtttttcggcattgtttttggcggtatgtacggcatatacctgctggccaccaaaaaggcagggaagaaggaccacttcgccttcggcccgtttctgtgtgcgggcatcgtgatcgcgatgctgtttggcgggcccgttttggaatggtactgcgcgtttttgtgaagttcagaccgtcaaaaaattgcattcttgccttattgcgtgtgtaggggcgaccattggtcgcccgtcaacttaccgcagcaacgctttttccgggacagttgtcttacaaagcaaacgggcgcgggcgagcaatgctcgcccctacaagagtttttcgacaatctgaaagtttttaacctgttttcggaggaatctccctcatgccacgttttcgttatactgccaccaatgagaagggcaagaccgtccgcggactgcttgaggcccccagcgaggaggcgctctacgccaagctgcgcaatgacggcctgtacatgaccgacgcgcaggaggcccagaaggcccacgcgacgttccgcccgctgaaaaccgctgtgctggcggatttctgccgcaacctgggcaccctgctgaccgccggtgtgccactggtgcgtgcgttccgcatcatggcggacgagcgcaccatcgacgtccgccagaaggccctgtacgaggccatcctgagcgagctgcgcaagggcgtgccgctgtccgatgcgatggagtcctgcgcacccgcgttccccaccctgctgctggccatgatccgcagcgccgagggcaccggcagcatcgaccacgcctgtgcccgcatggcgacctactatgagcgcgagcacaagatgaaccagcaggtcggcaacagcatgatgtaccccattatcctgtccgtgctgatcgtcggcgttattgcgattttgatgacctttgttctgccgcagttcaaaccgatgtttgaccagatggagaccctgccgttcctgacccagctgctgtttgacgtcagcgactttgtcggtgccaactggccggtgctgcttgtcgcggcggcgctcatcgtctttggcggcaagctcctgctggcgcagccgaaggtccgccgccagtgggaccgcttcatcctgcacgcgccggtggtcggcgtgctgaaccgcaagatctgcacggcgcgctttgccagcacgctgtccaacctgtacggcagcggcgtgcccatcatcacgacactggccgcggcacgcgacgccatcggcaaccgctggatcgagagccagttcggtgacgcgctggacagcatccgcgcaggccacagcctgtcggaggcgattgcgggcatcgacggttttgaagtgaagctctcctcctccgtcgctgtcggcgaggagaccggcaagctggacagcctgctggcgaccatcagcgagacgctcgactatgaggccgagatggcgaccaagcgccttgtcacgctgctggagcccgttatgatcgttgttatgggtctcgtggtcggcggcatcgtggccgcggtcatcgtgcccatctaccagtcctacggcaccatcggcgcgtcgagcggcgcgatttaaattctattccgggaggcccaccatggcacttcttacctctttatatctgtgcagccgcacggtgtatgccgccgtcggcacgcccacgggcagcggggcgcgcgttctcgccgccgcccagaccgagctgcccgagggctgcctgatcaacggcgtcatcacaaacgaggcggacctgaccgccgcgctcaaagagttttttaccgccaacaagctgccgatgaaccgcgtggcgctgattgcgggcggcagccagttcatgcaccgcatcctgtcgctgcccgccatgagcgagaaaaagcggatggccgtgctctcccatgagcttgccagcggcggcgccgaggtcagggctccgctggacgactacatgctgctctcccgcgatgccaggacccgcgtggataccgtgctggccacccgcgtggagcagagcgtcattgccgggtacgacgcgctggccaaggccgtcggcttcaagctgtacagcatcgacttagggctggccgcgccgatcaaggccgtgcgcacgatccccgatttgcagcagaaaaccttcgtgctgctgcaatttgacgatgacacgatctctgcctgcctgtttgtgcaggggcagtacacctactcgacccgcagccgcctgttcaacccgcgcggctcggcggagtccggcaccgagatcgcgcagaagctctcgggcctgatccagttccacacgaccagcaagagcgagcaccgcattgagacggtctgctttgccggctccacggcggacgaccttgcggtctgccgcccgggctgtgaggcgctgggcctgcaggtggcccgcttcccggattcacccaccgtcaggctgccgtccggcaccgagctggccgatgtgctctacgcggcgggcaacctgatcgcacgctgatttttacctgcaaatacttgccccgggggcttatcattatggctatgaaacagaacaacttttatctgcgctggcagaaggccgccggtgcggccaagtcggagtcccgcagccagggcctgcggacgctggtgcccggccttgctgtcgtggctgtctccatgctgggctggggtgtgctgacactgcacacctcaatgctgaaaagccagcgggaggacatcctgaactggtgcagcgacaataccgagccataccgcgccgcaacgcaggattccgagtctgcggcgcagttccgctcgctgaccgactattccgacgggatgaccgcgctgctgaacagctaccccgacgtgaccagcagtctgctgcaccgcgtcgaggctgccggcgggtccggcatcacgatccagttcaccgactacaacgcatcgacgggcgagctgctctttaacgcgaactcctcccaggtcatcgacattccggcctacatccgttccctgcagaactgcggggtgttttccaccgtcagctacaccggctacaaggccgatgacgacggctattccatcgatctgcgctgtgtgctggcagcgccgcagcagtaaaggagggcgctatggaaattgcaccaatgacaaggcgcgataaaattctgctgtacgtcgttctgatgctggcgttcgttgtgctttttgtccggttcctgctgattccgggcattgagaaccaccagcaggccgacgccgatctgcgcgaggcgcaggacgcccagacctccatgcaggatgcgatcatgctggccggcacctacgccgccgagaaaaacaacaactggggcgaactgcagaccgccaacgccaactactacagcctgctgagcagtgacgagctggacacgctggtgacaagcctggagctgaaccacaatttacagcccgactcgctgaccatcggcgagcccgtgacccagagccttacctattataccgccagtgagaacgccggacagagcgctgcccccagcgcagccgcgtccgtctttgccggtgacgacgacagtgacgacgacagcatcaccgccgacaccgccgacacgacggcccagggcaacgccattttgcagcagatcttagcctccgacctcatcccggactatgaccagccgggctattaccgcagcgtggcgatcagcttctgctgcacgggcgaggacagtgattttctttcgatgctggacgacatggccgcgaactacccgtccgtacagcttgtatccttctccatcgatacccgcagcttcgccgacaccgacggcagcgccgtgacggccacggcgttcaatgtatccctgaacgtgatcctctgtgacaaaggaggcgtacagccgtgaaaaacatccgcctcggcgacgttctgatcgagttcggctatatcacgcccgaccagctgaacaccgcccttgcctaccagaaagagcaccgcgacctgcgcgtcggccaggctttgcaggagcttggctacgtcaatgagcgtcaggtcctggaggcactggcccagcgcctccagcttacaatgatcgacatcgagcacaccaacgtcgatgtgaccgccgttgagaaggtcccgcaggagcttgcgcagaagtacgatatgctgccgattgcgcagagtccgcgcgcgctgacgattgccgccaacgacccgctgaactactacgcccttgaggacatccgccagctgaccggcctcgaaccggagatcgtgctggccgagctggagccgctgcgccgcgccatccgctactattacgccgaggtcagcgcccgcaaggcggcccgcaccgccaacgacagtgacatggccgccgcccagaccgaggatctggccatcgacatgactgccgagggcggcgacctcgacgcgcccatcatccgtctgctgaacagccttgtgcagcgtgccgtcacgacggcggcgtcggatattcacatcgagccgttcgagggcgagacgaaggtccgtatgcgcatcgacggcgtcatcattgactatgtgacgctgcagcgtgctttgcaccagccgctgatcgcgcgtatcaaaatcatgtcgaaccttgacattgccgagcaccgcatcccgcaggacggccacttccgcgcacgcctcgagaccggccccgacgtcaacgtccgtgtttcgatcctgccgacggtctttggcgagaaggccgttctgcgtattctgtccagcaacacttacatcaaaaatgccagccatttcggcatgaacgacgagacctacaagcgctttctgccgctgctgaaccgcccgaacggcatcgtctacctgaccggaccgacaggctccggcaaaacgacgacgctgtacatggtcctgcagacgattgccgagcggcaggtcaacgtctcgacgatcgaggaccccgtggagcgcaacctggcccgcatcaaccagacgcaggtcaacaacattgccggcctgacgtttgagagcggtctgcgcgccctgctgcgccaggaccccgacgtcatcatggtcggcgagacgcgcgacgccgagacagcgtccatctcggtgcgtgcggccatcacgggccacatggttttctcaacgctgcacacaaacgacgcactgtcgtccattgtccgtttggaggatatgggtgtcgagcggtacatggtcgcaaactccgtcgcgggcctcgtggctcagcgtctgatgcgccgcgtctgcccgcactgcgccaagcagatgccggtcacggcggaggagcgcacctatttagggcctgacatcccgtttgtgcgccgcggcacgggctgtacccagtgcaacggcacgggctaccgcgggcgtatcgccatccacgagctggtcatcatcaaccgtgagctgcgcgaactgatttctgccggggcaacgcaggcgcagctgaccgaggccgcccgccgcagccagggcatgacgagcctgcgcgaggccgccctgcagctcgtccgcgagggcgaaaccacccccgaggagctgctgaaaatcacgttctatgatgagtgacgggaggagtaactgccatgcagatccatgagctcaccgcgctggcgcggaacagcaaggccagcgatattcatatctccgaggggctgccgctgatgttccgcatcgacgggcatctggcggaggcaccggtccagctttcggcggcagagacgcgctcgctgattttgagcctgatggacgaggcccaccgcgaggccatcacatcggagcgcatcgacgcagactttgcgcttgtcgcgcccgacggtacccgcagccgtgtgaacgtcttttaccagcagggcagggccgcggccacactgcgcctgctgaacgactccatcccgaccttggaggagctggccatgccgcccgttctgacaaagctggccgacgagccgcgcggcctgatcctggtcaccggccccacgggcagcggcaaatccaccacgctggccgccatgatcgaccacatcaataagacgcgcagcgaccacatcatcacgattgaggaccccatcgagtacgtctatcagggccgctgctcgctgatccaccagcgcgaggtcggtgccgatgtgcgcagctttgcttcggcgctgcgcagcgccctgcgtgaggaccccgacgtcatcctcgtcggcgagatgcgcgactatgagacgatttccgctgccgtcacggctgccgagaccggacaccttgtcatgagcacgctgcacaccatcggcgcggcgcagacgattgaccgcatcatcgacgtctgccctgccggtgcgcagaaccagatccgcggccagctggccgccgtgctgcgcggcgtcatcacccagcagctgctgccgctggccgtcggcaagggccgctgtgccgccacggagattctggtgggcaccgacgccgtcgcaaacctgatccgcgagggcaagtgctaccagatcccgagcatcctgcaatccggcgcggcccttggtatgcacagcctgaacgccgacctggcccgccttgtcagcacaggccgcatcacccgcgaggccgccgagcgctgcgccaccaacaagagcgacctgaaaaattacctgtaagcaaaataaaaaaggggtatctgccgttcatgcgacagataccccttcttttttaccgactcgcaagttcacgttgtcagccttcccccttgggggaaggtgcccgaggccccgcccgagggcggatgaggggcagccctgcggtgatttcccgttcgcgctctgcttttcgcaagctcatccctcatccggccctgcggggccaccttcccccacttgggggaaggcaaagctgccgcccattcacgggcaaagcccctccggccatcgctgccgcgtacctcacttttctgccccttccttcccctgcgccaggatccttaccagccacccgggcacgggtgcgcccatggcggcggcgttctcggcaatggaaccgagctcggtaaaaatgtaccacaccagcaccaccggcagcaccacgccgttcacctcaaggcccagcccgggaaggttggcaacggccaccgccagcacggcgtcggtcagggcgcacaccagcacaacgaccaccatcccggccttgtgccagatgccggcccgggcggcggcgctcgaccacgcgcccctgctggccgcggcggcgctgccgctgacccagtccagcgccatgcaggcggcccacgccacaacaagccagcccagccagccgaacgctgccgtgaacgccccgcacaccgccgccacaacggccttgccgctgacaaacagatttcgtttttccattaagcatccctccattcgcttctgtacagtccggcatccaccagcccgcgggcccggcagacttccaaaaccgcgtccgcatcgccctgggtgaccggccccaccgtgatgacctgcatccgtcccgccgcgccgtacacgccgacagcgttctcacaccccgcatacaccgtcgggtccagcccgacgccgcccgctgcggcgcgcacctccaggtggcagtgcctgtacggcgggtcggccagcgccgcattgccggtattgcccatgacagccagcgcgtccccgcttgccacgcgctgcccggccttgaccaaaagcgacgaacagtgggcaaaatacaaaaagttcacggcgtcgggcgtctgcccgcggtccagctgaacacagacataatagccccactcccaggtcttgtcgcgcctgtccgtgacgatacgcgcccgggtcacgcggcccgtgatgcgcttgcctttatagtagggcattcggatcgtcgcgtcgtccagcccggccaggtcaagcccgccgtgccagaccttgcccccgccgcgggtccagccccagcgggcgtaggggaagcgcacctcggtgcggcccgcaaaaattcctgtctgctgcatcttcagcctcctctgcgcagggtgtagatgactttcatcgtcttgtcggcggtcttttccaccgacttcggcaggtcattgatcgtcgccagatagtttgcccgcagcacacgctcggtacggatgcggctgtcgccgtagtagcggcgcagcggcgtcagcggctcgcccagcaccggcgctgttgtggaaaagcccgacgtcgtgttgtcgtagcccgccgcctcgcaggagaacagctcgttcttcccggtgttcagcaccacggcgcgggtgcggtagtagcagtacagccgcccgtcgtgggcgtcggacaggtacgccatgtcgtcgccgtgcatcgtcacggcctgcacatcggtggggtcagccagcggaaagcgatagatctgctcagcctggtcctgaaccatgtaaaggctgccgccgtagaccgtgccgttcagcggcgtgccgcgattctcgctgatgaaggactgcagatcaacgccggtgttgttcggcacggtgtagtcctttgccgccagcgtttttctgtcgtactcacgtatttttacaacgcccgttgcgtcaatgtagtcaacctccggcgcagacaccagatagattttatccgcctccgcgtcaaagcagatgcggcagtagtcctccccggcggaggaatccacctgcaaaaagtccgccacattcagcgtgtcggtgctccgcaggctgtcccacaggccggtggggtcgcggcggaacaggtccagcgttttcagccccagcgcatgatgccgcagctccagcatgccctcgtcagcgttcagatacccggccacggcctcgtccgcctcggggtcggcgtagagcagcacgcccttctcgtcggtggggtaggtcgttttggccaaaaggcccgtcagcaactggtcaccgcccagcgccccgccaaagccgagccggtccgcgttgcaggcggctgcgtccggcgcgtcgatcatctcggagtagtacgcacccatcgggtgggtcaggcagaccgagccgatgacgccgttggcctggctcgtcgcgaactcatagacgtaggtcacgacgccgctccacgggtcgatcttcgtctcggtcaagttggcgctgccgcgcaccgtgtttttggtcgcgttgacctgcccggccatcgccgtgcccacaacgcccgcgcccgccggggcaaacactgtggccgggtcgctgcccagcggcgtgtcgtacagcagcaggccgccgtaaaacatcgtcaccagatccttcggggcattcgtgtacccctggtcgccgcgccacagcagcatggccttgttcaggctgccgccgtagccgttaaaaatgtccgacactgcgttggtgataagattatcgctctccaccacctccaccgcgccggtgtgcacatcggtcagttcaatgcgcgtatgaccgtgcagggtcattgcatccgctcccttctttttatacatcgatgctgcgtgcttttattgcaataggcagcagtgtctcctcacattccagcgtgccgtcccacggcgtctcgcttgccatgccctgcccggtcacggtggccttgatgccgtagggcgcgatcttcactgtgccgcccgcgcagaccagccgcaccgacagccgcgtgaccgtcccggcctccaccgacgcaaacgggtagaacagcgccagcgtgtgtgcgcccgtctccagccgctgccgcggcgcaaaattttccacaggcacgtcgtttatatagtaccacacggtcagcgtcagtaccttgccggtgtcgggcgctgcgtccagcagcagctgcgccaggaacatagcgctcgtctcctccactgccgtgaaggcaattgccacggcgggcgtctccacggtctgcaccgccagctccgccgggttcgtgaagctgtaatacacgatccgcttgctctcggcgctgttctgtaagcggcgcagcgctttttccgtcgcgccgtccgttgtgccgcctaagtaagggttgcggcccacgccctttaaggtctgccgcccgcggtagcgccagacgaaatgcgtcacgagcatctcgggcgcagtgccgtcctccatcggcagcgccacgcggtcccccggctcaaacgccgggtcgccgggcatcgtcacggtggccgggacgtagtccagcctttgcagcgccgcaaacaggttgtcggtgatctgctgccgtgtggcgggcaggcccttttcggccagcgtcatgttggaaatgcgcatcgtcaggccggtatcctggctgcggcccgcggcaaagctgccgtcgtcggtctcgatgctcagcgccgcgtagtggcaggcaaagtccgagaccgccgcctcgctgcgcgccgccgcggtcagcgcggcacagggcttttcggcaaaggtgcgcagcaccagccgccccgcgcggtccgccgccgcaaagccgcccaccagctgtgccacagcggcggcgcactcccgccaggtagacaggccgtccgcgccgctcagctggcagacgagggcagcgttcgggttcagcgcgccgatctcggcctcggtctggcccagcgtcagcccgcaggccgccgcgatctgccccagcaacgcataggccgtgccctgcatcgtcgtaccatcgtatttttgctgcaaggccagaatgttgtcataggccttgatgctcacatacagcgcgcgccgctcggcctcggccaccgtgtaaacgccaagcggcacggtctcccaccgcccgccgggcagctgcaggccgtagtgcagcacgagcgttgcgccgtaaaacgcatagcggctcaggtcggtgcgcaggttgagcgccgcctggccgaggtaggcgcagccaaagaccagctcctcccccgtgacgcactggttgtccagcgtcagcgacccgctcatgaggtctgccgcgtccagattcagcaccgtgccgtttgtcagcgtcagcgtgcccgtcacccggtcggtccgcgtccgtgcgcggatcgcggttttataggcatccgatacggaataaattgtcactcacctcgtttccacatccaagtaggggcggggcatgccccgcccgcagccatcccatagacggcctgttgcggtaaggccgcgggccggacatgtccggcccctaccacctgcaaaattctgcattaaaactcgatcagattcaccgccacctcccacacggcctgcccgtcgcgggcggccttcaggtcggcggtgcggtccccggcgtacatcttcgccgtgcgcacgccgccaaaaaaatactgcacggtcatgctgtccggggctgtggcgttcagcaccttggcgcagtccgccgtcgagagtgccgcccagccggcgctgatctttgccacgccgccgcgcacccgctcccgcacaagaacgccgtcctcggtgcggcccgtgccgctgctgtccagatcggagagctgcaccttgtacgcactcggcgcgggcagcgccgtgccgtcaatgttcagaatttccacgcttcacctcccgccgctgcgcagggcgcggcgattctggctgttggcgatgacgctgtccagcagctcctcgccgatgtaaatgttgatgggctggccgtccgcgctgccctgccagccggccagcgtctccgccatggcctgcttgatggtcgccagcggcgcttccacgttcgtgccggttgtctggtcaccgagcatcgccaaaaactgccggttcggcgggatgaccgccccctgcgccagcgccgggaccggcaccgacgccgcgtagcccagcccgggcagcgcactttggctgctgaccagcttgcccgcgccgcccagcacgctgcccgccatgcttttggcacgtccgatggccgacagcagcccgttgatggccgccgcaatggccgcaaccatgctgcgcacaacgcccagcaccgtggagaccgccgtctgcacaatggagacaatgcgtccccacacggtagagaccgtcgcggccatcgcagcccaggcagcgtcccactcgccccgcagcacggcggtcaaaaagtcggccataccgcgcagcaccgccagcgcaatcgtgatgccgtccgcaatgatgcccgccgcaccggtcaccgccgtgcccagcgccgcaaacacctgcacggccacgggggccagcgccgtgatgagccactgcacaaacggtgccagcacggtgttccacagcgtcagcagcagcgttgtcaccgcgccgaggcacgccgtcagctcgttccagagcggctgcaggtgcgcggtccagagcgcacccagcaggtcaaacagctgcaccagcacaggctgcagcacctcgctccacagcgccgaaacgatgccgacgacgttctgccacccctgcgcaaggccgtccagaatcggctggccgtaggcggcccacgcctgctccatgcccgcccaaagcccctgccagaccgtgtccagcagcgccagcgcgggctggaccaccgtagagagcgccgcgcagagctgctcccatacgccggctgccgccgcggaaagcccctgccaaaccgtctgccacgccgcggcgaacggcgcaaaaaatgcctgcaggtacgcccagaaatccgcccacgcgctgcgcaggctctccagtacgctctgccagactgccgtcaggccgctcaggtcgctgcccgctgtaccgctgcggcgtgccgcggtgccggtggtggatcttgcggccttctcggccttcgccgcggcctcggcggcctttttctgcttttccggcgccgccgttttgtcctccgccggggcggacaggcggttgatctcgtcaaattttgccagactgcgggccgatttcacgctctgtgccgccgcagcccgcagcgacacacgcagctcgtccacaacgctgcgcgcctgctgcccggcgtcgcccacgctccccagcgccgcagaaattttatccagcgccgtgcgcagggacgccgagggctgcttcagcgttgacagctcgtcaaaagtcaattccgtcgtgtatcctcacttcctctcctgaatacccattgccctgtaggggccgggcacgcccggcccgcatgcttcccacaagcggctgcttaccgtacagcgcacatttcctgcacgtcagcctcatcctcccagcagcgccagcagccgctttttctccgcctgttcctcggcgctctccacgccccgcagctccaccacggcgcggtgggtgcggtaatagtccagctcccagttttccagccgcttgccgcggcgcagcttatcacggatggccaccaccgtcgcaaagcttccctcgccgatggcatcgaaccacgccagaaagctccaccagtgcaggtagggcagcgtgcgcacatcctgccccgcggccttgctgatgcccgcggcgatcagcggtgcgtcctgctgccagtccatcagcgcggggccggggcgtggctgctcgcggcggcccgccgccaaaaactccgtcaaaaactgcgtggcatcgggccaaagcgactgcggcagcgcggcaaactccgggtagaacagccgcatggccacataccagcgctcgctctggtccagtgccgggtctgcctggccgttcagccagcgcagcagctccagcacgtcgcggtaatcgctgcggatggcataccgcacgccgcccagctccgcctgcatcggcagtccccacgccccggtcatactgcgccccgctcggcgcgggcggcatcggcccgggcttcggcggcatcggcggcagcggtcaggcggcgctcggcgccctcgcgcaggatcggcgtcagcgcctccaaaaggttctgcaccacacgcttgccgttggccccgacgcccgccaggttcaccccgcccaggatcgcgtcaaagtcgttctccgcgccaaagatgccggtcaacagcttcttgatcttgccgtcgtactcgttcagcagggccagccccgccgcggcgcgctgctgctcgtcgccgtccagcgccgccagcgcctttgtcagcgcggcgtcgtagccgtcaagctctgcccccgccgcaaaaaagcggtggtagaggttcgggtctgccgggttaaagcgcagcaccccgcgcccgttgacgcggaattcctccacgccggtgtcaatgttcagctccatcgtactctcctttcttcaaagccttccccgaggggctgcgctcgcaagctcgtgtcggagcgcaaccgccgaaggcggcttttagcgcgtagactgaaggtggcgccgcagcgccggatgaggggcagccttccggcagccgctcttttgcctgtcacgcctgcgtaaacttcttggctgccgggtcaaacgtgcccttcgtcttgacgccggtgtaatgcacgttgaacgggatctggtaaccggtggtgtcgccgccgtagctgacgacctcgatgtagcattcctcgcgcactgcggggtacgcccccgccgtatccttgtcccagagcttgacctcgacgatgtcggttttcaggtcatccagcaccagatcgccgtcgatgatggcctgcagacgctcaaacagcgggtcgcccggctcggcatagtaggggctgacctcgccctgtttctggtagccgttgatcgtaaccgtcgtctcaccgacgatattcgactttttctccacgttcgcggtcagctcgggggagtattcctccagatcgctgcccaggcgggtgtagctggcgtcgccgctgccaaaggcggcgttcaggtagtgggccatgtacttgcgttcaattttcatgtggtttcctccgtataaacttgtgtgtattccgcttgtaaacgcacggtgtagaccgccgtgccgcccgcgtcggcgcgctccatgcggccctgctcggcgcgcaggacctcgcgccccgcgttgcccagcaccggcccgcggcctgcggcgctctccgctgccgcccaggtctgcagatccagcagccgcgcggcgttgtcggcatcggtgcgcggcaggcagagccgcagcgtgaactccgcccggcagcgctgtgtcacgcggcccagcaggttttcccgccggtccagcaccgtgatgccccggcaccacagccccgccgtgtacggcgcggggccaacgtcccccaccgtcaaagaaagcccctgcagggcaggggcccgggccagaaaggccgtcatttttgtaagcatggtttgcctccttctctaaagccttctccgaggggctgcgctcgcaagcgcgtgtcggagcgcaaccgccgaaggcggcttttagcgcgtagactgaaggtggcgccgcagcgccggatgagggcagacttcgcgcggccctcccgttcatcgttcggccacgcaagctcgcccctcatcagccgcctgcgggcggcagcttttccccccccggggagaagccaaaaagattttcaccttgtcaagctcctcacgcccgttccgcttccgttccaccaggcaccggcctcgacatggtgcggtttaccgcgcagccgcatcggcagcacgtactgcaccagcgccgcaccctccaccgccgcaggcacaaagcccggccagtcggcccaggtcagcgccgggccctcgccggggaacagcctgtcccccggtgccagcgtatagtccgcgccgtaccgggccgtcgtctccgggatgaccaccagcagcgcagtgccccggcgtgtgccgcctgcgtcgggcagctcccggcggccctgctgccagcagacgccccgcagtacggtgcgcaccacggtctgcgccgccgcgtcggcgtggtagagcgtcacggtatcgcggtacagcttattcatggggcagccaccgcccgatccgcagatagtagcccgcctcgtggcggaaatgcgccgcccggtctgccagcgtgcgggagcacagctcgggcggcgcggtgtaggtctcgctcacgctgccgacgctcaccttcgcaatgccccgggcttcgtcctcctgcgcgaactcgtacattgcgtcggccacagcgcagagcgccatgctctcggccagctccgggtccagcccctggcgcggtgccacggcgtacatctcccgcatacggcgcagctcgtccccggcgcgtctgatgaagcggggaaactccttctccgggatgtcctcgcccaggtaatcctctacgtaaaaggtataatccggcacgcgcacgcccccttacgccttgaactttgccagcacgaccttagcctcattggacagcacagcgacgtaaaattcgtccgccgtgatttcggtggtgcgggtcttgggcttgcgctcggtctcaatgttgacctcgcgcttgcggtagatggtcagcgccgggatctcgtcgtcgacctcggggtcggcctccagcttgacgatggggcaggcgtagacgccttcggtcagcgggaccttcttgctgggcacaaggcggcagcccgcgatcatgccgatctcgccggtcaggctgacgccgggcgtgtacttgtcggcgctcaggaagtcggggttcttgcgcagctgggtgacctgcttcgggtggatgaacagcaccttgtcggagcagcccatctcctcctcaaacaggtcaaccgcatcgacgatggcgttgtagctgatctgggcctggctgccgtcgtagatcaggcttgcggtctgcaaagcgtccatgcagtcattgtcgaccttggcggcaatggcctgcgccagctgggtgttggcctcgcccaccgggttgccgtagccggacagcacggcctcgtcggtcaggccgatgcccttcatggcctttttgatggtggccttgcgggtggaggtcgtcatcttctcaatggcgacctcgccgccctcggccacgtcggaggcgtcgccgatgtaggtgtaggcaggcacggtgatggtatcgccgggcacgccctgcagcgtatcgtcaattttggcaaacggtgccacgcgcagcttcttcgggatgcgcgcggacaccatatcccccataacctcagggtcgatcagttcggacagcttcgtgatgaaatcagacatatagtttctccttttttgtgtttttactttcgcagagggggccgagatgccgcccctcacttcctcaactctttataaacctccgggttctccttcttcagcgccagtctctcccggtatcccatccgcgcaaaggcgtcgcggtccagcgctaccggcacgctgccggtccccgcggcatagggcgcgggggtctgcatcggcttgttctgctcgttctccattgtatttcacctcactttctgcagcatcgtagggcggggtgacctcacccccgccgcactgcagggcaggctcattgcgcccgccctgcatcgcccataaaccggcggcgaatctctgccagctccgcctcggtctcatgcggcagatcaaaataccacgccagcgccagctcggggcgcagaagccccgcgtccaccagctcacgctgctcggcccagatgcgcgcacggtcatacaaaacaccgtcgccccagtcgatagccggggctgcggtctgcggcagaccgtccagcccgtacaccgcgcccagcgcactgcacagcgccatggcctgctgcaccgtatccgtccatgcgctctgcaggtcgcggatcgtcaggtcgtagtccaccgacgttgcggtgatctccgtcgccgtgcgcggctcggcgggggtctcgacctcgctcagaatgccgcggcgcaggcccagcaggctctcacacccgcgcagaagatcctgcttgcgggccagatagctgccctcccgcaatgtcgggctgtagaccgtcacgccgacattggccgggtcgtccggcaggccgacaaacagatcgtcctgcagcgcacggcggccctgggcatcggggcgcagcagatcctccgacgcaaaaacgcgggacgcaccgttcgcaaattcggcgttcagctgctcctcgcagcgggccagtgcgtgcagcagccccgccgccggggcgtagatgctgaccgcgtcggtgctgccgtccacacagttcatcagcggcgttttcagcacggccagcccgacgccctgcacccccggcagcacaagctgcgggaccagttccgcacaggcgggcagcgtggccagcggcacacagcggcccaatgtctggccgttcagctcaaacagccgcgtttcgatggtcaggccgtccgcgcccgcggtgcggcgctccaaaagggcgtactgccgcccatcgacgctgtgccgctccatcgtgccgacggccagaaggctgccgtgggcatcgcgggccagcggcacgtagcagtcgcgccggatggccgcaaagtcgaacgccccgtcccgcggcaccggtttcagcagacactctccgcccaccagcgcgtactgcatcgcggtcttggccgccgcattcagcgccgacaggctgcggcgcagcgggtccggtgcctcgggcggcagacgggtctcgtactcggcaaagaccgtgcggcagagcttgccgacgatcagcgccgccacacggggcgcggtatcctcgcccgcgcgcggcacgccgtagtacagatcaaaccattcccgcaccgccgcccgcattttgacagatgtaacgtcacttttcccaaatgcctgttccaaataagattgtatggtcgtttcctcctttctctaagccgtcccccttgggggaaggcgcaaactgtcgaaaaactcttgtaggggcgagcattgctcgcccgtgcccgtttgccttgtaagcaaaccgtcccgggaaatgcgttgctgcggtaagttgacgggcgaccaatggtcgcccctacacgcactcctcacttctaactcctcactgattcacgcccctctccttctccacaccccctccaccgcgtaccgcaccgcgtcaatgtggtggttgttcacgtcgggatagcccggcagcacctcgcccgtccgcgggtcgcgctcgtactcgtactcactgaactccgccgccgtggccgggcagcgcaccgggtcaatgatgattgccgccagcccctgcagccacttcatgctctcacgcacgctgccggggcccttctgggctgcgcggcagggcagcccggcggcgcggtagtcggcgcaggatttcggctcggcggcatccgccgtcagcgggccgtccgtgcctgcgccgcgcgccagcaaaagctctgccgtctcgcggttcggcgtgcggctgcgcgtcagctcgtcaaaaatcaccagcacccgccgcgccgcatcgtaggccgcggcattgtaggcccaggggtcggggtaccagccccagtccacgccgtagtagacgcggtcataccgttccagttcgtcgtctggcacggcccgcagctgcaaattggcaaacaccgccgcgccgctgcccacgacctcgccgccgtactcatggcggaacgccgccgggttcgtccgctgcaggtgctcggcgtcggcccagaaccgctcgcccagcatggcccgcggcagatcgcggtaggtcgaatggtgcaccagcttgccggggcgggtctccagcgcgtagcggttggcccagctgcgggccatggccggcgggttgaagctctttaacgtcagcgtccagctgccgccgcgcagcacggtctgctcgacgttgcgcacctcctcggggccgtcgaactggtcaagctcctcaaaccaacaaatgcccacagcgccgaacggcagctttaagctcttgagcttgcccgggtcgtccgtcccgaagaataagatcttctgcccggtgggcagataggtacactccatcgggctgaccgtgcagcggaaataccccgcgcaccccagctccccgatggcccatacgatctggttgtacacgctgttgcgcagcgtgccgccgaccttgcgcagcaccacggcgtggcagtccgggtggcgcagcagctgccagaccagctccatcgaaagatagctcgacttaccggacccgcgcccgcccttggccacgacctctgtcacctcgccgcgccgtatcgcctgatgcacgggccagaacacgccgggtatcttctccttcagccgcacttccaccttggcgcctctctcctctctcttctctcctaactttcactgtccacaatgaccaccccctctgttttcgccccgtcgcccaggcccagatgcttgtacagcatttccagcgcgcgcagcttgtcggccaccttgaccggcagaccaccctcctcgccggggacagcaaaggcgatctcggccagctcgtccagcacatggtccgcgtcgatctcacacaacggcatccctccttttcccgaatgggtataaaaaaacccgtgggaggaatcacttcctctcacgagtttcgatggtatcatattaccactgttggttgtgaaatacaatgaaattttgcgaaatcttcgggaaatttactgaaatctttttcacgcccgcttcggcacggccatcccctccacagccgtccggtgcagctggtacgcccggcgctgaactacccccatcgcctccgcgatttccgaaaaattctgccccatcacatagcggcggcgcagcacctcctgccccggcctatcccgcaccgtcatgatgccgcacataatctccgcgcgcgtttccatgcagctttccagctgctgctccagccttttctgcgcttcttcgatacgttctacggcccgcggcagcctgtccgcgttagggccgctgcgcccgggcatgccgctcatgcaggccgtcacccgctcggcgtcgctgcgcagcacctcgatttcttcttccagcatgtgctggcagctgacagacgcctgatagcgacccagccactccactttttccttatagtccatcgctgtcctccttatatgttgccgctcctgtcaggtattgttggttactctcatcttaatgcaacaacatatagttgtcaatatatttttgcaaattcccgcctggtaatcccaaaaaccggacttccgcttctctttccgctttcccgctggacacccgccgcccccaacgccgacggcctgcgcatcatcgacccggtacattttatagaaacgctggagcgcgaatacgcctcctgaaaccacaaagcccgccccggtctgacccgggacgggctttgcgtatttctcagaatgtcaaaaaactcttgtaggggcgagcattgctcgcccgccagcttacaccgccgcctgtttccggggcgtttgcgtcagcggtccactttcccggaggggtcaagacccctccctacggtctgccatacacgggtgccttgtagggagcggtcttgaccgctccgtgcccgtttgcgtcagcggaagcccccgcgtcgtcggggactcccccctgccttcccccttggggacagactcccccggtacgggggaggtggcgcgtagcgccagaaggggagcaggtggccccgcagggccggatgaggggcgggttcacggcaggctcccctaagcgggtatcctccgcaagcctcccgccttcagcacaacggtgccaccagccgcagcaccgcgctgtacagcgtgccaaaaaatccggtccgacagtccgccagcgtcaccgcggcacttcccttttcgatctccgccagatcgcgccgcacatcgtccagcaccgcgccgccgtagagcagcacgccgttctcaaaatgcaggtacaggctgcggtaatccagattcaccgtgcccaccgcggcaatgcggtcatccaccagccaggtcttggcgtgtagaaaacccggcgtgtagctgtaaattttaacgcctgcccgcagcaaatgcgggaaatagctccgcgtcagctggtagatcgtcggcttgtccggcacaccgggcgtgtagatgcgcacatcgacgccgcgcttggccgccagccgcaggcaggacagcaggtcgttgtccagaatcaggtacggcgtgcagatgtacagccgcttctgcgcctggttgataagctccagatacacattcttcgctacagcctcgcggtccaccgggctgtcggcaaagggctgcaccagacagtccgtttccaccggcacggcggcgggcaggtcgcagcccgcgtccaggtcctcgtcggggtattttgccttccagaacgtcaaaaagatgtttgccaggctcgctgcgccggggccatccagccggacgccgctgtccttccagtagccgaaccgcacgattttattgatatactcgtccgccagattcacgccgcccgtaaaggcgatctgtccgtcgatgaccatgatcttgcggtggtcgcggttgttcatgaccaggttcagcaccggcacgcagcggttgaagctgaacgcccggatgccgtcggcccgcatcatctcggcgtagttgtggggcagcaggctcaggcagcccgcgtcgtcgtagatgacccgcacgtccagccctgccgcggccttccggcgcaaaatctcgtggatctgcccccacatctcgcccatgccgatgataaagctctccacataaatgctgtgctgtgccccctgcaatgcgggcagcatatcggcaaacatgctctggccgtccgggtaatatttcgccgccgtgccgccgcagaccggcatcgggccgtagtcgtgcaggtagcgggccgtcagcgcggcgcgggggtcctgccgctgcaaggccgccgcggcgtcggggtcgtccttccgcgccggggccattgcgtcctcggcgcgctccagccggtggcgcaagcccagcgccgggcgcttatcgccccacagcaggtacaaaatgccgccctgcaccggcataacggaaaacaggatcatccagctgatcttaaactccggcaccgtggaatcctgccggatcagcgccaggcacatgataacgctcatggcaacgcccacgccgccgaaccatttggcgtagtccgccagccagtagaacagcgcaaacagccagaacgcctgcagcagcagaagcacgccggtcacaacaatgcggctgaacaccaggttcagcacccggcgcagcatcagacgccagttccgttttttcatacaaacctcgtatacaaatgcaaaaagccgcacgtcatcccccaaaggacggcgtgcggcagacttcctttttacaattacaggcggtcaatggcggccatgcagtcgtccatggacaggaaggtcacggcgcagttggagccgataaaccaccgttcatccccattgcagacgattttgcggataagcttgccgtggtactcagtctggatgtagatcccgttgggcactctctttccctcccatatcttgtagtgtgggccgggcggctgcctcatatcatgggctttccgcaccgcggctgtacttaaattatgccacaaatgcccgctttgtgcaagatgctttttgctgtagtttatgtacgaatcgccccattttttggcattacgcacaaagggtgcataacagcgggcttttgggcgtgtcaactttaccgcgaatgttccaaaacagccttttttcacgaaatttgtaaaaaaatgttgcgggattccgcgaaacgtgtataatataagatagtatattgtgtagcagtatccatatatactgcccgattttaccataagtgaccggaggagcttagctatgacaaaactggaaacgctgcagttaaaactgactgcgacccgcgtgcgcatgggtgtgatcgaagccacccacggtgccgggtgcggtcatccgggcggcagcctgtccgcagcggacgttctgacctatctgtatttccgcgagatgcgcattgaccccgaacagccgcaggaccccaaccgcgaccgttttgtacttagcaagggccactgcgcccccggcctgtatgccacgctggcggagcgcggcttcttcccggtggccgacctgcccaccctgcgccactccaacagctacctgcaggggcaccccaacatgaacaccgtgcccggtgtcgatatgagcaccggcagcctgggccagggcgtttctgccgcctgcggcatggcgctggcggccaagaagtccggcagcgacatcaacgtctacaccctgctgggcgacggtgagatcgaggagggcgaatgctgggaggccttcatgttcgccaaccactacaagctcgataacctgtgcatcatgatcgatgtcaacggcctgcagatcgacggcgcgacccgcgacgtcatgaactccgagccgctggaccacaagatggatgccttcggcttcaacaccatcgtctgcaacggcaactccttctccgatctggagcaggccttcaagatgtttgacctgtcccacggcagcggcaagcccacctgcttcctgctgcgcacgaccaagggtctgggcgtcagcttcatggaaaacgccgtcgattggcacggcaaggcccccaacgacgaagaatacgcccaggctatgaccgagctgcgcgccgcccacgccacgctggaaaaggagatcgagttcaacaatggctgatattaaaaaaattgctacccgtgtcagctacggcaacacgctggtagagctggcccagcagggcgctgacaatctggtggtctttgacgccgacttggccgctgccaccaaaaccgaaatcttccgcaaggagtacccggatcgtcactttgactgcggcattgccgagcagaacatggtcggcgtcgccgccggtatgtccacgatgggctatgttcccttcgtgtccagctttgccatgttcgttgcgggccgcggctttgagcagatccgcaactccatcggctacccgcacctgaacgtcaagatcggcgccacccacgcggggctctccgtcggtgaggacggcgcgtcccaccagtgctgcgaggacatcgccctcatgcgctcgatccccggcatggtggtcttgagcccggctgacgatgtggaggcccgcgccgccgtcatcgccgcctacaactatcagggtcccgtctatctgcgcttctcccgtctggccacgcccgttttccacgatcccgagacctacgagttccagatcggcaagggcgaaaagctgaccgatggctatgatattgccgtcatctccaccggcctgatgaccaacgaggcgctgcgcgccgccgtgctggccaagcgtcagggtctgaatgtccgcgtcatcaacatgccgaccatcaagcccatcgacgaggagatcatcctgaccgccgcccgcgagtgcggccgcatcatcaccgtcgaggagcacagcatcatcggcggcctgggcgaggccgtctgctccgtcgtcagcgagaagctgcccgtccccgtgcgccgcatcggcgtcatggatcagttcggtcactccggccccgccaatgaggtcctgcgtgactacggcctgaccgctgacaacattgtcaacgtcatccgtgacatcgtccgcccggacgcgaaggcctgattttccatcacaagtacaacagccccgaaaggcaactgccttccggggctgtttttgtaggggcgaacattgttcgcccgtcaaccttgccgcaccgtgcactttccgggtcgatgcgagcatcgacccctacaccgtaggggcggattccatatccgcccgggagccttgcggccggctgcatattctgcgtgcgaacaaggttccccctgcatcacagttcttaagtcaataccgcacaattcccgcctaacggctcaagcaccgctccggcggctgcggcacggcatctgcgttgccaaaatgctcgataagacatccagtattatctgcgcttttggcttagcagctgccgcacctcgctcgccgtatcggcacttagaattatgcggtattgccttaaaattgctccaccctgaatacccttgccccgctggccttggccgcggtcaggccgatgcccgagtcctcaaagatcattgtatcggtgggcgtaacgcggaaatgctccatcgcccggcaatacccctccgggtcgggcttctgcttttccacgtcctctccggtcacgatcaagccgaaccattcccgcaccccgaaatgctccagcacctcggtagcgttctgtttgctgccggtggtcacgcaggccaggtcatgcccggcggcgcgcatcgttttcaaaatttccatcagtgccgtgttcgggcgcaccgcatcgagaaagtcactgtacagcgcctttttcctgtcatgcacgcgctccacatcggcggtgctcggcgcgccgcccatcagcggcggcaggaaccgtgtgtaatgtccgccgttgcagcgctcggcgtaatattcatcggtcacggtaaagcccagctcctccagtgccgcgcggtaggatgccgcgttggccggcactgtgtccagcagggtcccgtccagatccacgcaaatcagcatagtgtctcctttttatgctccgaaaaatccgccacatcgttggcgaccatgaccagcccggcgtagaacattgccgcgcgcttgcggtcctttttcagcttgtagggcatcagccgcagccagtggatgacctcgtgcatcagaatgctctcgacctgctcccgcgggtagcgggcgctcagatcctccatcacggcggccaacagcgcgtcataggccgcactgcgcgtcagctggaagtcaatacggttgtcctgcacggccacgcgcggcgttttcatcataaattcgtagctgccgtgcagactttgcagcagcttaccgtaatccaggaacggactttcgtggaggttgccggtattcgggtcgatcagataccagctgtcgttgtcggtgcggcagatgatattctctatcgtcaggtcgccgtggatcgtgcccacagggtccttcgcaaacaggttgcgcagccggtcatggtcaaacatccagtccagcgcgggcaggttcttgtactccacgccgttgatgcgcagcgtgtcatagctcatcagctcgcgcagcatccggtcctcatgcagctttttcaggttgccgtcaaccttcgtctcgatgtacttttcgattttctccgcgtccgccgggaccgccgtcggcttgtagagcttatcctccagcgtcgccagcaccgcacgcaggatggcgcggctcttttccacggggttcgagtgcaggtagcggaacatccccacggcctgcgggttgtagaccatgtcgtaccagcagcagccgtcggcctcctcgctgcgcagaatatcgcacagcggcaggcggtcttgctgggcacgcagccagtcgagctgctcggccagctttgcgccgtccttgccaaaggcatatttgcggtagaatgtcgattgcgtgtccatgcagagcatcgtcgtggcgttcgacccggcggagtagtcctccaaaatcgtaatgccgcggttcatctgcaaaaaccgcttgacgtagtccttgttttccagaccgaaataccggctcaagaacaccgcgcggtcatgctcgtcggcctgcggcagcaggttcaggtagctttccccggcgggggcggcctgcgtggcctggttcatcgcgccgcgcacgccctcgggcagcagcgtggccgcccacatggccagcagcggcagcacaaaccatgccagcagcagccagcgggccgcgggggccgccgtgcccagcgcaccgccgggcagcagcgcggcaaagtccgcggcgttgcgcccgaacagcagcccgaacacatccaccagctgcatcggctccccggccacggtcagcgccgccgccagcgcggtgtaggagcccagatacgccgcccacatcagcagtgtattgacgaccagccgcccgattttcacgcggcccagatccttgaaggtattgatgaggctccagaagaacatcatgccgtccagcttcagcgtgtcattgaacagcccgcagaacgcaaggcagatcttcttcaaaaaatcccgcagcgccacgaccagcaccaatcccagcaccagcagcagcgagaacacaaggtaataccgcgccgcgccgtccaccggcgcaccgcccagccccagcagccggaacgcaataaacccgaacgccacaaaccagacgtcgaggaaccgatccatgatgaccgtcgccagcgcaaagccgatgccgctcttcatcctgcggcccgtgtagaccgcgcggaaggcatcgcccagatggaacggcagcacaaagttcagcgcatagccgccggccatgccgcgcagcatctgcccgcggggcgggcgctcataaatgcggatgaactgctcccaccgcagcaggcggaacgcatggcccaccagcaccagcagcagggccagcagcaaaaaaagtgcaagcatcagcccgtgatcctttccgatttcaatttccgtttcagcactgcgtacagcaccgcagccgcagccaccgcatacccggcgataaacggcgtcagatagtacataaagtaggtgtccggcgcggtcaaaaacacaagcgggatgcgtgcaaaaaacgtgcctgcggcaaaaaacagcatccagcgccgctgcaccagcagcaccgccagtgccaggcccagcagcacgaacggcggcagcatccaccacgtcaggtcgatcagcccgcccgcaaagtcggtgctggacgccatatccacaataaacgcccggcgcagctccttgttcaacggctgcacggcggcgctgtcctgcaaaaagctcttttggtcgtcctgcgtcggctcgccctcatacagcaaaaatgccgatgcaaacgcgatcttctggttggactggccgttctggcgctggcgcagcgtgttgtagaacacacccgcacgctcccgcagcatgctcttgggatacttgagggccagctttataatggacttctggcaggccgaccagtcctccgccgagccgccgcgcccggcgatcatccccccgcgcagttcattgccgtgggtctcggggttggcgcggcagaattccacatcaaacacgcggtcaatgtcggccagcgcctcggcgtcctccacggggtcggcgtcctgtaccagcgccgccgtctgatagcacagtgcgatcatcttgtactgccacgcctcgcccatcagcgcgctgctgtagcgggagcaggcgaaataccccaccagcaccagcgccgtcaccgcgcccaccgtcagcgggcgcagcagcctgcgggcgcagagcagcgccagcagcaccgggatggcggccagatagtagacgcactcgctgcgccacgacgcagccagcgtgcccagaatcacgatagcggccagctcctttttgttcagcttcgtgccgcgcaggtagatggccaccagcatgaacaccaaaaacagctcggtccacgttgaccaggtcgtgcggaaaggctgctgggtgtgcatcagcacgggcggcagcaaaaacggcaggtagaccagcgcaaaccacgccgggcgcaccgggcgggtcagccgcttttcggccaggtcctgcgccgtggccgcaaagcagcccacaatgccgctgatgagcaggttctgcaccagcacgacgccgccgggcatcggcacaaacatcagcgacagaatgaacgcgccgctggtcagaaagtgctgccatgagttgggctgcagcgtccgcgccagatacagcacggccagatcatcattgccccagatgccgggccagacgatgagcaggatgaccagattcaccgccagatacggcagcgtccaggccacccaccgccgggcaaatttgtccccggcgcgcagcttctgcaccagcgtcaccgcgccgtgcaccagcccgaacgccagcaccagaaacagcgccttgtagacaaaaaacgccggtgtgcgccagtcatagcggaagaacagcctgtccgttcccagcgtcagggcgcaccacagcaccgcagccgccagctctgccgccgttcgcttttttgcaggtgttttcattcttactccttcaggtcagcgcgtcaaaaccggccttattggcgggtgcctccgccgcgcggtactcgtccggcgtgccgaacggcagatgtaaatcacacgcaaagcccgcaattcttgcgccctgcgcggccagcacattgtaaatgccggagacaaaaaattccttgtactcgcagtttttcaggtattcggcgcaggcgtcggcgtaggttttcttatccttgaaatagtacgcgccgcagatggcatcatggctgacgacctgcttttccaccgtatggcagacattgccgtccgcgccgtactgcagatagctgtacgcgggggaatcgctctcaaacgtcagcagtgcgccctccgggccgtttgcaaagccgcccttagcgcagaactcgttgaacgccctgcaaacaaacagatggtcgcagtcgttgaacaaaatcggctcaccgtctggcaggccctcgcagcccttcagcgccgtgacggccgcgccctcggtcacctcgggcagcgccacaatgcgggccgcaggccagtacgccttgatcttttcgtcgatggcaaagtcgcggatatgctcctcgagcaccacaaacgtgaggtccgcgcagtccacgaacttttccacgctgcgcgccgcccagtaaaagaacggctttccgttaatttcaatcagcggtttcgggcagacaaagccgtttttaaaaaaacggctgcccctgccggccatggggagaatcaggtgaagtttagacatgatgtacctcttttcaaaaagccttcctctgcggggaaaggtggcgcgcagcgccggatgaggggcggcctgccgccattgcctgtgcaattttccgcagaagagctgctccattcactctgccctcatcagtcgcctgcggcgacagctttcccccgatggggaagcctttttacttttccagccccgccagcatccgcgtctctgcctcaatgactctgcccagccccgtctcaatatcgacctgcggctgccagccgtagacctcgcgggcgtgggtgttgtcgcactggctgaacttgttgacctcgtggtccaggatctccggtttgatgccgtaggccccgccgtacagctcggggtacttggcccagtaatggctgctcgggcagtatttggcctccatatttttgcccatcaggcggttggcaatggcgtacagctcgcgcacggaatagctctggttgctggacacgttcaccgcgtcaaagcccttctgcgggtgttcgacgacgcgcagcgccagcgcgatcaaatcatccacgtagatgtaatcgcggcgctggttgccgtcggagtggaactccggcgtgcggtcatagtacagctcgcggatcatgtagccgacgaacggcggctgcttgcgcaggcagtcgatgtgcgggccgtagacgttggcaaagcgcaggcaggtcacagtcatgccgtaggtgtcggcaaagctctgggcaaagcgctcaccgcagtatttcgtgttcgggtaaataagcgtcggcgggttgaacttaccctccaccgtcgggaactcggtctcattctcgtacatggcgttggtggatgcctgcacgagctgtttgatgccggtgcggcggcccgcctccagcaggttgaccaggcccagggtgttgacctcaatggcctgcacggggtcgctctggcagtccggcagcggcgcaatgcccgcaatgttatacacaacatcgaacttttctgcctcgaacagagccagcatcccggtcttgtcgcggatgtccattctgcgcacctctgcgccaaaatcatggtcgtcaaacttcaggttgtccggattgccgtaggagaagttgtcaatgccgacgacctcatccccgcgcttccacagcgtatgccacagctggccgccgataaacccggcagcgcccgtcaccagaatcttcataccaaagccctccttacaggttggaagctacgacctcgtagctgtaatcctcaatgattttctcgcgccattcgcgctccacaaaggcccgcggcccggccagatacttgccgcagagcttgagcaggctgatgccgaagctcgtcagcttgttgttgctgacctggtcctcctcccgccagctgatggggaagaacagcacccgctgcttcatctggcagagcgccaggatcatgcagtcgttaaaatacagcgtatccgggaactttttgtagtactcgtttttcagcggttccacggcatacaggttcagcccgctgcccagatcggtgatttttttgcgggccactaagctgaagagccagttgaagccgtagttgccccaggtgcgcagcgcactgtagccgccggtcttgctgcccttcataaagcgggagccaaggcagcagtcgtattttttgtaggtgccgtcgttcagaatcggcagcaggtccgcaatagcgccctgatcgtcgccgtgcagcacgaccagatgctcgtacccgtgggccgccgcatagccgaacgcgaccttgtggctgccgcccagaccgtagttctggtcattgcgcagcaggcggaccggcgcgtcggggtggcgggccatccagtcctgcacggcggcctcggtgccgtcggcagagcggttgtttacgacgatgcactcccccacccacggggcaatgcgctgatccaacagctgcgaaagcacccgcgtgacctgcttttcgcagttataagcagggataaaaaccagcagtttttccatggaaagctccttttctgcacacagttctacataataaagattatacaacaccgcgccgccaatcgcaagaaaaaaagccccctcttggaaaaagaggaagcaatttttgcgggtcaggacagcgcagacctccgcgggcggatacggggtccacccctacatctgtaggggtcggcgtccccgacgacccgtacccgtctgcggcgcggaaaagcacgtgggcctgtatcggcatacaccttttcgtgcgggaggattccacacaatgccgtctgccgcaaaaggattattgtatcggcatacaccttttcgtaggggcggattccatatccgcccgtgcccgctcacgataccgcaaacctgaccctctgtgcatccaaattccgatacagcacataccccaccgggcacgccgcgtccgccttttccaacgcgctcgtatccaccggcacgccgtccgctgccagcacccagtccgccgtgtccaaatcggtatatgccctgcccgggtactccggcccgacggcctcggcggtcaggtccagcacgccgtctgccagcgcaccgctctgcaaaagcgtctcatactcgacgatatagacatcccgcgcgacatacgtttctatgagctggctgtcccgctggcgcacgccgtaggggataaacaagactctgccgtccagttccgccagcgtgtcgttcagcgccgacgcctgctgtgctgtcccggcggggacctcatacgtccagcggttgatgcgccactcgcccgcgtagcacagcacgcagagcaccagcgccgcaccggccagcacgcggcggcccctgcggcgcaccagcagcacgcccagcacggccacgccaaccgcaatcactgcacgccacaccgccagccacgccccctgccccagcacgggcaggcggtccgtgcggtccgccacgaagtcaaaccactgcaaaagggtgttgtcgcccgcgcccgcgccgatggcccggcagacggccacgaacagcacgccccaggctatcgtcaaaaccgccaagatccggcggcgcgttttggtcagcttttcatccagcgtgtccagcgtcaccgccagcagcgggatcagcagcggctccagataccgcgtatgctgccgcggcgacggcgagcctaaatcctcgcgcaccgtgatggaccacgcgatgaccgccacgccgatgccaagggacagcagcaaaaagagcggcagctgggtgcggcgggcatcactgcccctgcgcgggcggtgcagcccgcagagcggcagcagcaccgggaacacccagaacgccagcacagcaaacaacgcgtcgcacaccagcgcaaacggcagaaagcgccactgctccgccgtcagccagccggtctggttgtaggagttgcccagcccgcggaacagcgtcgccttggccagcagaaagcagaccagaaagctgcccaacagcgcggcattgcaggccagctccgcccgccacgacgccttgtcatgccaccagacccacgcgcgcacaagcacccaggcgatcagataatagagcgcgacctccttgttcagatacaacaggtagcagaacgcccccgccgccgcgcaccagcccacgcgggccttcggctctgccagcatcgcctgcaggaaaaaatacacctgccacagcgacagcggcagaaacaccgtctcgctcataaacgtactcgcagcggacatcgtgggcagcaccgccgtaacgccgacgagaaacgccgtgcggcggcggttcatgcccatggcccgtgccagcgcataggccgggaacaccgcgcttgccatatatacagcgttcagccagccgatggccgtgatctgcgcgacggtggttttcagcagcagcgccggcaggatgcagagcgggtatagaattttctggtagtcgctgggcatattgcgcacccgcagtccgcgcccctgcaaaaggctgcgcgccacatccagataccgcagctcgtcgctgtagacggccagctcccgcgggtagctgctcagcaccccgtacacaacggcgcacaccgcaaacagcatcacgacccacagccagccgtttctttttttagaaagcatacacgcccccttttctctaaaaagccttccccgaggggctgcgctcgcaagcgcgtgtcggagcgcaaccgccgaaagcggcttttagcgcgtagactgaaggtggcgcgaagcgccggatgagggccggccttccgccattaccagtgcaagggtcgcccccttcaccctgccctcatcagtcgcctgcggcgacagcttccccctcgggggaagccttttttcctcacttcagctcaatataatacaccgggcaccgttccccgtcggtcacaagctcgattttttccacgtccagcgtatcctcggccagggcacgcagctcgtcggcgtcgtaaatgtagccgtacagcaaaaatccgtcgtgcaggtcccggctctccaccgccgcgcgcaggctggcggcatcgtcctcgccgcttgcctggtcaacggcctcgcgcttggcgaactcctccaagaacaggtcgggcgcgacctcataccccgccttgttcagcacaacggcgggcagcctctcggtgtcggccagcgcagccttgcgcggggcggcgtcctcatacaggtaggcgttggggtcggtccggtgcgccgcaaggatcggcaccagtgccagcagcagcagggtctcgtgctgcggggccagcctggccagcaccacagccacagccagcaccacagcggcgtagatcaccacatagtagcggtccgcctcaaacggcgcggccttatcgatcagcgccacgtaccccgccgacgccagcagcagcccggcggcaaacaggcccttgccgcgcagacggcagccgcgccgccacagcaccaccgccgcggcagccacaaccacggcccacagccagagcccgccgaactgggccgccagcagctgcaccaccgtgccgatgctcctgccccactccgccagcgcagacagatcaaagacgctcgcaaacgcctcttttccgcgggagccggagaagatatgggccttcatcgtggggaaggccgcatacgccgcagccagcgcggcaaactcggcgatcacatagccgcccgccgtcttgaaccgccgcgcagccagcagccagatgccgaacagcccgcagacaaaaaggcagaacaccaaaaagaaatactgcgtcagcgccccggccattgtgaccgcaaacagacccggccagaccgcccgcggcggcttttgccccgcctgcagcgcctgccacaaaaccacatggcagtacaaaagcacgatgccctccagcatcatcaggctgtacatccgggtgaacaccgccatgccctgcacgccgacacagagcagccagcaggccgccgccgtccacgcgggccagaaccgcccgatcagccgcttcgccgtgcagtacagcaccgccgcgcccgccaggatgcagacaaagttcggcagcagccccacccacggcagacccagctgcgggaacagtgactccgctgtatagatcaggcaatagtagagcggcgggtggacatcgatcttctggttgttccacgggacggtatagtcaaacaggcggcccggcgtcagggcagcgctgtaaaagctgccgtcgtgccagctgtccatatagccgtcctccagcgcgtagaacccgccgggatagtttgccagctcataggtgtacagctcgtccacatggtagccctgcttgtgcgccgcgtagtagatcatcagcgccagccccacggccagcagcgccgccaccgccagcatacgcttggtttttgtgtttttcatgattcccgctttccgtatctgcctgaccgtaggggcgcattctatatgcgcccgcgcacctcgcgccgccgcaaacctcccgggcggatatggaatccgcccctacgggaatgcgcgcccgttcgtttacacacctgcataccaaaaaggcctgccccaaaaggcaggcccttcgtttgttttactcctgtgcgttttcttccttgtcacgcacaaaacgccacagctcaccgatggtgaaatcctcgctcagctcactctcgtcgatctcctcgccgattgcctcgcccagtgcccacgccagctcgatcatatcctcatggtcggcgcccaggtcagccagcgctgtgccgcggctcaaatcgcccgtgtcgcagctgaactgctctgccagcagatcctgcaattcttcaaaggtcattccgttttccccctctcactgggaagttttgtgttcttatcatacaagcccacagcggttccgtcaaggggcaaaccagcaacaaccgcacaaatttattgcgcccgatttgtggaatctgccgaaggccccgccggtaactgcggctgtgcgttcaaaatgcgcataaactcctcgccggagatcgtctctttttcgtacagatactgggcaatttcgtccagcttgcgcttgttgtcggccaacagctggtaggccttcttgtgctcggcctgcacgatctccacgaccttggcatcgacctgagccgccgtctgctcgctgcaggccaggctcgcgtcgccgcccaggtaggcgttgttcacagtctccagcgcgaccatatcgaaatcctcggtcatgccgtagcgggtgaccagtgcgcgggccagcttggtggcctgctcaatatcgttcgacgcgcccgtcgtgatggagtggaagatcagctcctccgccgcgcgtccgccggtcagcgtcgcgatcttgttcaggatctcctctttcgtcatcagcgtgtggtcgccgtcctccacctgcatggtgaagcccagcgcaccggacgtgcgcggcacaatggtaattttctgcacgggggcgctattcgtctgcaaggccgccaccagcgcgtggccgacctcatggtaggagacgatgcacttttccttattgttgaggatcttgttcttcttctgcgcaccggccaggatcgtgtccacggcctcctgcaggtcgaactgggtcacggccttgcggcgatggcgcacagcgcagagcgcggcctcgttcacgatgttagccagctcggcgccggacgcaccgggcgtcatgcgggccacaacaccaaagtcacagtcggggccgagcttgactttcttagcgtgcaggcgcaggatgctctcgcggcccttcagatcgggcagctcgacgggcacgcggcggtcaaaacggcccgggcgggtcagcgcagggtccagggattccgggcggttcgtcgccgccaggatgacgacgcccttcgtggcgtcaaagccgtccatctcggtcagcagctggttcagcgtctgctcgcgctcgtcgttgccgccaaggttggagccgccgtcacgcttcttgccgatcgtatcgatctcgtcaataaagacgatgcagggcgctttttcacccgcctgcttgaacaggtcgcgcaccttggacgcgcccatgccgacgaacatctccacaaactcactgccggcgatggagaagaacggcacacctgcctcaccggccacggcgcgggccagcagcgttttgccggtgcccggagggccgacgagcagcacgcccttgggcatcttcgcgccgatctcctcatactttttggggttgtgcaggaagtctacaatttcctgcaggctctccttggcctcgtcctcgcccgctacatcgttaaatttgatgccggtctcatcgtccactacgtactgcttcgcgccggacttgccgccgaacagcatggcgttgccgccggcgccgcccatctcctgcatctttttggacgcccagcggttgacgaaccagaacaggatgatcatcggcaggaacgagatcagcaggttcagcagcgaatcccagatcgtgggcgactgataaaccgtgccgaactccacccccgcatcctccagccgggtgacgaggttgttgtcctgcgcaatggcgttggttttgtaggaattgtcgttcttgtccacaaagtagatctgctgatcttcgatctggacggtggccagctccttgctctccagcatttgcaggaaggtgctgtagttcacgcttttcacgctcgcctgcatcaaagccgggaacaggaaaacattgcttaaaatgacgatggccagaatgaccgcatagccgatccaaagcttctttttggggtccttcggcggctgtgtcgtctctttcatagggaatgcctcctccttatcttttgtaactattatagcatgctcccaaaaaatgaacagcgtgtgaaacaactttgaacgaaccgcaaaaaatcccgccgcggcgggcttctgcgggctttctccacattttgcacaggttttcgacatctttccactgtggaaatgtggaaaaccatgttgaaactgtggaaaaccccgtgcaaacccacaaaatagcacgataaacagggtttgttgaaatgtggaaaaccggcggctaagcctccccttttaggggaggtggccgagcgcagcgatggccggaagggtccagcccgttcgccccagccgccaacttttctgccaatttctaaacaaaagtcaaaattctgtccaaattttctcgcattttgtaacaactcggaaacatttgtcgttataatagacaatacgccttttcaaaaaacatccttccggaaggaggccccgctatgaatcccatcataaaccgcaaacaggatattctgtataaagaccttgccgttgaccttaccgcccaccgcgtatcccgcgccgggcatgagctgctgctgaccccgcgggagttcgccctgctggctgtgctcgtgaccaactgcgacacagctttaagccgcagccagctgctcgaggctgcctggggctacgcctttatcggcgagagccgcaccgtggacgtacatatcaaccgcctgcgccgcaagctcggcctgcaaaacgacatccagaccgtctacaaggtaggctatcgcctgagcagcgccaactgaaaccgcaaagcgccctgcacttttttaccgtgcagggcgcttttcttccttttcaaaaagttccatattccccgcccggcgtgtagatcgtcccatcggggccgatgaccacattgttcagcgtgtccaggccgccgtagacgtccgggtccagcgtgacacacagagcgaagtcgacctcgtccggggcatagcgcacgacccgcagcacaccggaggtatgcttatattccagcccgtcctccgtggtggtctgctcccagctgccgtccagcgttgtgtccagctgggtcaaaaacgcctgcacctgctcctccggtgtactctctgccgcgggcagtcggttgtcaaggacgctgacctgcaaaaacgcgccgttgccgggcagatacatcagcccgatgctcgtctcatcgtcgatactgtacatctcgccgctttccgtcaccttgtaggcgttcaccgtgtacatctggaagctcacagtctggatattgcccgtgtagctgcacccgtagcactggacctgcacgctgccgttttccggctgcaccggcccggcgtgggcctcgccctcggccacgcggtccagcaggtagtcaagctgctcccggctgagaaggccccgcgtggcggcctgcttcagcttgccgcgcagtacggtaaagacattgtcggaccaatagctgtccgcccgattgatgccgccctgcacgccgtaacggtagagcgccccggccacggggtccaggcgtatctcgtcgctcatcacgccgggcaaggcgggccgcggctgggccgcacggcagcgcaccgtctgcccgtacacggccagcggcggcagtgccagcagagccaggcttaccgcggcaatttttaaaaatttattgttgctgcgctgcttcttcatgctctgcctccttctgcaataaaatcgtcactgtcgtgccctcgcccacacggcttgcaaaggtcatctgcgtgccgaatgcctctgcaatttgtgcgcagagcgccagccccacgccgctgccgccgttggcccgggcgcgggccttgtccacgcggtagaacggctcggtcaggtggggcagcgcctccgccgggataccgcagcccgtgtcctgcacggtcagccgccagcattcgcccgcgtcggtgcagcgcaggtggaccgcgccgtcctgcggcccggcgtgccatgcattcagcgccagattgcgcacaaggtccgccagcagcacccggtccgccagcacaacggcctccgcgggcgcgtcgcagtccagcaccacatccggcagactgcgcacggcatcggcaaaggccgcggccacccgcacggggcgcagcaccacgccgtccgcctgcaagccgttcagcgccaaaagctgctggctcaaactctccagccgtgcagactcatggtagagggcctccgccgccgtgcgccgtcgttccgcatccaacgtgccgccgcgcagcaggtcggcgtagccgatcaggctggtcagcggcgttttcagctcgtgggtcaggtcggccacaaagcggctctggcgggcgttcagctcctgtagacgctcatagtggtacgccgcagccagcgccgccagcgtgatgatcgcctgcacggccagccagctgtacaaaagccggttccgcgcggcgaacgcctcggacgcatccgccgccgtgacgacggccacagggtaggagtagggcgtgttcaacaccccgcccagcagcagcgtctccccgcgcagcaggatgccgtccgtggccgcggcggcctgctgcacatcggcggcggccacgctctccggcagggcgctgtaggcgacgtcgccctcccgcatcagcgcaaacgcggcagtgctgctgcccaggatcagccactggccgcgggtgtacgcctgccctacccgggcgcagaccgagtcggccccgctgctcggatagcccgcgccgctccgggtatcgtactcggcggcaaaggcgtcctccagcccacagacattgcgctggtgctgcaaaaccgcctgttcctccagcgcgtccagccgttcccggaacgtcctgcacgccagcccgccgcccgccagcgccattgccagcgagagtgcaaggacagccgtgtacatggatgtacgcttcataaagtcacctcctgcggtttcccggttgtatgattcattttgatttaccgccatgtaggggccggacatgtccggcccggcagccttccgccatgacccattcacggtctgccgtcttgcagcccgcgggccgggcatgcccggcccctaccgttctgccagcagcttataccccaccttcggcacggtcacgatcttgtccgaccagtccagctttttgcgcagccggtggatgtgcagatccagcgcccgcgggttcggctccgcatcggggccccagacccgctcatacaaaatatcacggtagagcgcctgtccccgcgcccgcaccagaaccaacagcagcgtaaactcccgcggggtcagctccaccgcgcgcccgttttgggtcacggtgcggttgtccgggtctacctcggcatcgaacacccgcagcgtcgccgcccgccgcccggtgtggcgcagaagtccctcgacccgggccagcagctccgccggggcaaacggcttgacgatgtagtcatacgcgcccaacttcaacccgcgcacccggtccgccacggcgtttttcgccgtcagaaagatgaccggcgtgccggttggcgcaatgtagtccatcagtgcaaagccgtccacgcccggcagcatgacgtccagcagcaccagatcaaactgctgcttttccagcaggtcggcggcctgctcgccgtcgcaggccagcacaagcggctgccccagcggctccagcgtcatctcaatgagcctggcaatatgcggctcatcatccacgatcaaaatcggaagcatcgcgttttccccccttcgttgaagccagtatagcacggcagggtttctgaaagttttccgctgcacaaaaagtaggggccgggcatgcccggcccgcagctttcccatcagctccatctcatgggtaagctgcgggcgaggcatgcctcgcccctacccttcgttttattcccccaaaaactcccgtatctccttctccacggccctgacttcctcctcaaacgcccgggcgctcacgcgcagtgcgccgtgccccatgacgatgatctgctccgcgccgtcgctgctgacaacgcgggtgcggtgctccttcgccagctcgtgggtcgcgcgctcaatgtacatatccgccgtctcggcctcgcgggtgtagacaacatacaaattgtggtactgctccacctcccgcgcgccgccgcgcaccttgtaggcgtcaaaaaccaggatcggcacacagcggcggtagcccgcgtagttgcacagaatatccatcagcctgcgccgcgcggcgtccagattgccgtcggccagtttccttaaatcatcccacgcaaaaatcacgttgtacccatccaccagcaggtagtccggcccggcgggcacgggctttgcggacacggacaccgccgcgggggccgtgtgcagggccgcgcgggccgcctttttcgcgtcgcccgtctcgccgcggcggcgtatttttccgtaggttcgttcaaaaatcgccaacagttctttgtcctgctccagcgtgccgcggtaggcgtcggcacggcggcggcgcgcgttggcatcgtcctcagcgtcggcttcttctgccgccgtctcgccgttcagccgccgttccagcccggtggacagatgtgcccgggcgggcacctcgtcccatttgaccagatacccggccccgtgggcgcagaacaccgaatccgccgggttttccacatccgcgtcggggtcataccccgcggcggagacgatctcgtcggcgttatggcaggcgtcgtacccggcaggcagcacagcccagcggcccagcccgtgggtgtaggccgcgacctcccgcgcatagccccgcgccgtcgccacaggcagacggcccgtcagccgcaccgtgccgcctgacgtctccggtgcctcaaagctgccgcacatcctctgcacatcggccatggcgcggcccagcgcgtcggcgggcagctccaacgtaaaatcataccacggctccaacagctgcacgccgtccttcgcctcggccatccgcaggccctgccgcacggcgcggtaggtcgcctggcggaagtccccgccttcggtatgcttctggtgggcacggcccgccgccagcgtgatcttcacatcggtcagcggcgcaccgatcagcacgcccgggtgggtgcgctcggccagatgcgttaagatcagccgctgccagttttcggccagcgtgtcgggcgggcagtccgccgccagctgcacaccgctgccccgcgcccccggctccagcagcagatgtacctcggcatagtggcgcagcggctcatagtggccaatgccctccaccgcccttgtcagcgtctctttatacaaaatgccgccctcgctgaacgctacagtcagcccgaaccgctcctgcaagatcgtctgcaaaatttccagctgcacctcgcccatcagctggacgtgtacctcgcccaggtcgtcccgccagtggacgtgcagctgcgggtcctcgccctccagcgtttgcagcgcctttaataaggtatgggggtcggcgtcacagtccacgcggtagttgagcaccggctctaaaagcggcgtctcggcgtcggattccgcgccaagcccctgcccgggccgcgtactgaccggccccgctgcggccacgaccatgccgggcagcgcctcgctgaccagccggaatttgccgccgttgtacagccgcagcgcgtcggccttctcgccgccgggcagcacatcttttacatgcagcacgccgcccgtgaccttcagccaggtcagccgcgtgcccgcatcctcactgattttgaacacacgcgcgccgaattccggccaccggggcggggtgcgggtcagcgtctgcaggccgcgcagcagcccgtccagcccgtccagccgcagcgccgcgccgaaaaacaccgggaacacctgccgccgcgcaatagcggtctgcacggtttccgccgctgctgcgccggtctcaagcacctcgttcatcagcggctcgctgcacagagccagcgcctccgggtcgggcgcggcggaaaaatccacgcacccgtccccgaaccgcccgcgcagctcccgcaggcgcacggcggcgtccgcgccgggcagatccatcttgttgacaaatacaaacgtaggtacgcggtaacgtgccagcagcttccacaatgtctcggtgtgggcctgcacgccgtcggtgccggagacgaccagcaccgcgtaatccaacacctgcaaggcacgctcggcctcggcggaaaaatccacgtggccgggcgtatccagcagcgtcagctcggtctcgtcggcgccgtccgcggcgggcagcgtcagcacggcctgcttggcaaagatcgtgatgccccgcgcccgctcctggctgtcggtgtcaagaaaggcgtccttgtggtccacgcgccccagcttgcgcagcacccccgcgcggtaaagcagcccttcggccaatgtagttttgccgctgtccacatgtgccagcagcccgacgaccagacgtttcatacccgttccccttagctttcaaaaatcatgcccctattgtacaatttttcttgccatttggcaaacgctgtgctatacttatcccaaatccaccgaggaaggagagcaccctcttatgcgttggcagtttggtgttgtgttccagaaaaaaggaaacccctgacgtactgacgctgtaagtgtgcccttttttacctcggtaacgctgtaagtgtgcagtttttgcgccctgtggctttgccgcggggcgctttttgctgcctttttacaaaatttaagggcacgttttcgtatactatcacgaaagggtgttcccccatgaatttacaaaaacagcttcgctgcgtgtatctgcacgcatttacctctaccctgcacttcaccgacgccgtctgggtcgcgctgctggcggcccgcggctttacgctggcgcagatcggcctggccgagggcgttttccacggcgtcagcctgctgtgtgaggtccccagcggcatggccgccgatttgctggggcggcggcgcacgctgatcttcggcggtgcgcttggcgttgtctccgccgccaccatggcgtttgcgcccagtctcgcgttcatctgcgcgggcatggggctgaaagcgctgggctacaacctgctctccggcaccacggaagccctgacctacgacagcctgaaagccgccggacgggagcgcgactacattaaagtagacgccaaagcgtcaatcttcatgaagctggcctccgccctcggcgcactggccagcctgctggccggggtgctgacctcggcgggctactaccttgcggacgccgcggtcagcgccgtctccgccttggccgcggccaacctgaccgaacctgtcgtcaccgacgaacaggccgcccgcgagaagcacatcttacaagaattgcccgcccggctgcgtgtgcacattttggacagtctcgactgcctgtgcagcagcacaccggcgcggcgcattatcatggccgacgcggtcatctcgctgccgtcctacctgacctcgatgttcgtccagcagcggctgacccagcagggctgggccatggaatggctgttcctgccgggtctgctggccggggccgcgggcatggcgggtgcatcgctgggccgccgcctgcaccccaaacggctgcgcgcgctctatttcggctgtgcgctgctcgtcggcacaggcacgcttctggcgggcgcagccccggcgctgctctgcgccgccgggccggtactcgtacagggggcactctccgtctggttcctgcacagtatgcagcggctcaacgacgcgatccccagtgaccgccgcgcaacgctcatcagcgtggacagcatggcctacagtctgctgatgatccccgccagcccgcttgtgggccttgtgggcgacctgaccggccaggcgggcgcagggctctgtgtactgtgcgcacttgtcgtcgtcagcggccttgcggcagcgggcaaaacgcgctataatgggcgcagagcataattacccgatttttgtaggggccgatgcccgcatcggctcgcagcacaggaggcaaaatccagatgacatataaagaagttttacaggctgcccagggtcagatgggcccctgccgcgcctgcccggtctgcaacggccgcgcctgcggcggcacgatccccggccccggtgccaagggcagcggcacggtggccgtccgcaactttgacgcctggcgcaatgtacggctgaacatggataccatccatgaaaattttgagccggacacatccctgacgctgtttggccgtagcttcaaatatccattctttgccgggcctgtcggcgccatgacgctgcactacggcgacaagtacaacgatctggactacaacaatatccttgtccccgcctgcgcggcggctggcattgctgccttcaccggcgacggcacgaaccacaaggtcatggagggcgcggctgctgccatcacggcctgcggcggtgcgggcatccccaccgtcaagccgtgggacaacgccacggtggcccggaaaatagcgctggcacgcagctccggctgctttgccatggccatggacatcgacgcggcgggtctgccgtttttacagcaccttgacccgcccgcgggcagcaagaccgtggagcagttaaaagaaattgccctggccgcgggcgtgccgtttatcttaaagggcatcatgaccgtcaaaggcgcggaaaaggccatcgaggccggtgccgcgggcattgttgtctcgaaccacggcgggcgcgtgctggacgactgccccgccacgcaggaggtgctggccgacatcgtcgccgccgtggatggccgcgccaaaattctggtggacggcggcatccgcaccggcagcgacgtgttcaaggcgctggccctcggcgcagacgccgtgctgatcgcgcggcccttcgtcaccgccgtctacggtgccggtgccgacggcgtcgccgcctacacagcccagctcggcaatgagctggccgacacgatgcgcctgtgcggtgcgcccacgctggacgccatcacccgcgatatggtacgggtcatcaagtaaaaaacgccatgctttaagattgggtatcccattcttaaagcatggcatttttattgcagtgcagcggcagccgtaaggctcccgggcggatatggaatccgcccctacatgtcgtcctgctggcagctatagcaaaaagaaccgccactcggccaagtgacggttcttaggtctaacctaattaccctagcttgaaagagaccaaccgcttgtcgcagtgcctttttctatacttattataacgctgtgctgtccctttgtcaagccgcagcctgccgcctctcccctgcataaatattcttttttccgcaaaaattccccaaacctcttgcataacccgcggttttgcattactattaaagcataccgccgctttaaaccggcagcgtgagggatctgtgcgaagtataggaggaagtatcatgaaaaaattcatcagcaccgttctggcactcggcatggccgcgagcctggccgcctgcggcggcagcgcatccacggcagcttctacggaaagcaccgcagcttccgccgctgaagccactgccgacagcgaccttgcctacatcaaaaacaagggcaaaatgaccatcggctacaccgtctatgagccgatgaactacactgacgccgacggcaatttcaccggctttgacaccgagcttgccactgccgtctgcgaaaagctgggcgtggagcccgactttgttgagatcaactgggacaccaaaattgtcgagctggacgccaagagcatcgactgcatctggaacggcatgaccctgaccgatgacatcatggccaacaccgcctgcacgaaggcctatgccaagaacgcgcaggtcgtcgtcatgaaagccgatgccgattacagctccaccgccgaccttgtcggcaagaccatcgtggccgaggccggttccgccggtgagagcgccatcagcgaggacgagagcctctcccaggccgactacgtcagcaagtccgtccagactgactgcctgatggaggtcgccgccggtacggctgacgccgccgtgctggatctgacgctggccaccgccatgatcggcgagggcaccgactacgcaaacctcgccatcaaggacgaactgaacgccgaggagtacggcgtcgccttccgcaagggcagcgatgccgccgacgccgtgaacgccgcctttgacgagctgaaggccgacgacacgatgcagaccctggccgacaagtacagcctggcgctggccgactgatgggcgaggcagcagtcatctggggccgcctgaccgaggcgttctggctcaactgccagctgttcggtctgactctattgttcgcactgccgctggggctggtggtgtcgttcggctccatgagcaggcttgccccgctgcgcggcgtcgtcaaaacgtttgtctgggtcatccgcggcacgccgctgatgctgcagatcctggtcatctacttagggcccggcctgctgggcttcaccagcccatggccgtccggcggcagcgggcgtctggtcgccgccgtcgtggcgttcgccatcaactacgcctgctatttctcggaaatttaccgcggcggcatcgaggctgtgcccaggggccagaccgaggccgggcaggtgctgggcatgacaaagacccagattttcttccgcgtcacgctcctgcaggtcatcaagcgcatcctgccgcccatgggcaatgagatcatcacgctggtcaaggatacctcgctggcgaacgtcatcgccaacaaggacatcatcatgatggcgaaagagtacagcgccaagggtctgatctggccgctgttctccacagcggtgttcttcctcgtgttcgtcggtgcgctgacgctgctgttcggctggctggaaaagcggctggactatttcaagtaagggggcgcggctatggcattgttggaagtaaacggcatcggcaagagctttggtgccacaaaggtgctgcgcgacatctcgtttgatctggccgaaggcgaggctctcgccatcatcggctcgtccggctccggcaaaacaacgctgctgcgctgtctgaactttctggagaccgccgacaccggcagcattacggtagcgggtgaaacgctgtggagcgccgccgacaccaaaacgcagagcgaagaagccatccgcaaaaagcggctgcacttcggccttgtgttccagagcttcaacctgtttcctcagtacacggcgctgcagaacgtcatgctggcgggccagcttctggcgaaggagcgccccgactacaagcagaaccggcggcagattctggccgaaattgaaacgcaggcaaaggccctgctggcgcagatggggctttctgaccgggagaaccactacccgcaccagctttccggcgggcagcagcagcgcgtggcgattgcccgcgcactggcgctgcacccggacatcctctgctttgatgagccgacctcggcccttgaccccgagctgaccggcgaggtgctgcgcgtcctgcgcgagctggccgagcacaagacgacgatgatcatcgtcacgcacgagatgaagtttgcccgcgacgctgcggaccgcatcctcttcatggacggcggtgtcgtcgtcgagcagggcgacgccaaggagctcatcgaccaccccaaagaggaacgcacccggcagtttttggcaagctacgggaaataaccgaaaccggcagaccgttttcaggcggcctgccggttatctttttctgtaaggaggggtcttgacccctccgcggcgctttgcgatcggcactcacggcccggaacggtcaagaccgttccctacaaatccgcgtttcccatttgcgattttccctcacggagcctccgtaggggcgcattctatatgcgcccgcgccgtccgcggcggcggaagcatccccgggcggatagggaatccgcccctgcaaagcattttttcgcgtcaatgcgctattaccgcaccgcaatgcactcgatctcgacgagcgctcccttcggcagcgcggcgatctgcacgaagctgcgtgcggggaagccgccgtggaagtaggtgccgtaaatttcattcacggtgccgaaatcccccagatcctgcacaaatactgtcgtcttgacgacattgtccagcgtcagaccggcctcctgcagcacagccttcagattcttgagcgcctggtgcgtctgggcctgcacgccctcggccaatgcgccggtggtggggtccaggccgagctggccgctgcaatagacggtgtcaccggtgtcaacagcctgggcataggggcccagggcggcgggtgcgttcgtggtagcaatacgcttcataatactaaacactcctctatactatttttcaggctcgtcggtctcgggcggccatacaaagccgcgccgggccagacaatcctgcaaaaactccgttgcctgcttcgtgtaggcgtcgttgtcgtggtagtagctcacggcgtgctctgcgccgtgtacagtcaaaaatttcttgcctttcgcgcggcaggcttcatagttgcgcttccccatatcatagggtacaaagccgtccgcgtcgccgtggacaaacaaaatcggcaccttgctctgcgctgcggcggcctcgcagtcagcgtcctcggggtcaaagtggccgaacaggatcgcgcccagccgtccaaccgcataggtcagctccagcggcatgccgggcagatactccggcaggcacttgcgggtgatctcacgcgggctggtgtagccgcagtccgccacaatgccgcagacgttgtccggcaggttcagcccggcggccagcagcacggtggccgcacccatcgagacgcccatcaaaaagatcggcacctcggggccgaagcggctccgcgcccagactgtccagtcgcgggcgtcgtagcgctccttcacgcccatcgtgatcgtatggccgccgctgtagccgtgggcgcgctggtcgggcagcagcacattgtagcccagcgccgtacacagcgtatagccgcctaggccgtcccgctccgcatagccgcggtagccgtggaagatgattgccagcggcgcgccgtcggcgtggtggtagtagcgtgcggccagcggcgtaccgtcctgcgccgtgatgtgcacggccttgaacatatcccgcgccagcgcatcggcgtcggggcccatggccttgcggtagcactcccgcgtgggcatatccgccggggagggcaccttcgtcgtcggcttctggtaaaaggcaacgcggtagacggcatacgccgcgcccagcaccgccgtgcccgccgcggcccctgccgccaaaagaggatgctttttcataacggtcacctcgttttcactttcccagattataacaaatttcccggcatatcgcaacgatgtaccaaaaaagtttacacttgccagcgcggcactttcgcggtatagtaatagcattccataaatggaggccgcccccatgagcgaactgacccagaccctgaagatactcgtcacccgctaccccggcacaatggccgagctggcccgcaaagcgtcgatcgaccgctccacgctgtacaaaattgtaagcggtcagcgcaccccgcgggagttccagctggagcacctggccgacgcgctggaattgagcgaggaacagaaatccgccctgctgctgcaatacaagcagcgtggccgcggccccgatcccaggctgcgcgccgagctgcaccacctgctggaggtctctttccgggtggaggatttcacccaccgcgagggcattatctccaacgaagccgccagccagctgcgctgcagcgagcagtacatagagggcagccgcgcagtcgccgccgccgtggcatcgctggtggccaaccacattctgtccggcgatacccgcccgctgctcctctcgccgttcacaaaccccacgctggaccatgtgctggtggaacgcttttcggcagcggacggcgcacccgtcgcactgtcccagctgctgatttatgccgagaaccgcgacattccccgggaatgggtgtccggcgtgtccgtcctgacccgcacactgccgttccttttcctgcccaagctgaattacgaggcccgcgtcgtgcgccacgtcatgaccgagcccagccccggcacgctgatgcctgtctatctgctgctgcccaaggccgccgtcatgatggacatccagggccagaaggcctacatcatcatggatcgtcaggccgtcgataatctgcgcctttcgttcagccgcaaatatctcaacgccgcgtcggtgctgaagctcgccaccgatgcccacgacttttcggaatccatagcgctgtacaacgacctcttttcggaaaggcgccgctgctccatgatccgctaccagccgccgttcaccctgtttgccgacgagaaaatggccctgcagcttgtccggcccggcgccgcgctgcagtccctgcccgccctgctcgaacagctgcagatgtggagcgcccaggccccggacctctatttctgtgaggaaggtcttttgcagtttgtacgcaccgggaaaatgttcgacattccgccggatctgtgcgatgcgccggacattcccacccgccgggagctgctcctgcggctgcgccgcgctgcggagtctgaccgccgcaccctgcgcatcgtggactctgcccggctggcgctgactccgtcgatgtgcgtcaatgtttttcagggccgcggcgttgtgttctgccaggctattcaggagccggacgggcagtactgccgcgagtatctgatgcaggaccccaacctgaccgaagccctgctgacctacctcgatgacggccacgcctctgattggctgcgcagccaaaaatatacgctcgactttattgattattgcctgcgtctgctgtaaaatagaagcagtatcggtcctgcctgtacggcggggccctttctgcaaaggagaaaagcaatggcacataccgagaccatgctggaaagcaaggagatcttcaatggccgcgtcatccgcgtgaccgtggacaaggtacagcttgaggacggcacgacctcgacgcgggagatcgtccaccaccacggcggcgcctgcatcctgcctgtggacgccgacggcagcgtgacgatggtacgtcagttccgctacgccttcggcgaggagatctgggagctgcccgccggtaagctcgaggcggacgaggacccgtttgaggccgccaagcgcgagctgagcgaggagtgcggcctgaccgccgacaattttatcgatctcggcgtcgtctatgccaccgtcggctacgacagcgagaaaatctatctgtgggccgccaccggcctgcacagcacagcgcagcacctcgacgcgggcgagttccttgatgtcgtcaaaatgccgttcgacgaggctctcggccttgtgatggacggcacgatcaaggacagcaagacccaggtcgcgctgctgaaatacgcgcagctgcgcgcaaaagtctgaatgggcgttgaaattctggacaacggcacccgcgtgctgaccgcgccgggcgcgacgttcggcaccgacgcgctgctgctggcccgcttcgcgcagccccgcagaaacgagcgcgcgctcgacctgtgcagcgggtgcggcatcgtctcactcgtttggcacgacgccgggcaccgcggcccctgcaccgcgctggaggtcgaccccgccgcgtccgccctctgcgccgcggccctggccgaaaacgccgacgccgcgcacatcgcgccggtctgcggcgacctgcggcagctctgcaccgccgggccggagcaggggcagtacgattttgccgcctgcaacccgccgtacttcacagccggtccccgcagcccggacccgcgccgggccgaggcccgccacaccggcagttgcaccaccgccgacgccgtggactgcgcgcgccgcgccctgcgggacggcgggcggttcctgctctgccagcgccccgagcagctggccgagattttagcggccttacgcgccgtgcgccttgagccgaagcgtctggcttttgtcaagaaccgccccgacgccgcgccctggcttttcctcgtcgaagcccagaagggccgcaaaaccggcctgcgcgtcgagccggacattctgatccaatccggcgctgccctctacgggccaactactttgtaggggcgggcaatgctcgcccgtgctcgtttgcggcagcggcaaacaccccgggcggatatggaatccgcccctacggcgcaggggtcgatgcttgcatcgacccgaaaggccgccgcgcccccctttcccccaacatcattcaataaggagctattgtatcatgggacttttcacgcgcaattttgataaacccggcccgggcgtatcgcccgacgccccccgtaaaaagggcgctgcccgcttttttgagattttgggccgcgacttctccaccatctggctggccggcatactggcgatgctcggcggtctgccgtttgccgccggtgtctggttcgccgtcgagacccactctttggttccgctcgtcatcgcgggcgtgctgggcggcatgatcgccgcgccgcagatcgtcggcctgaacgacacgatcctgcgcacgctgcgcgacgagcccggctactggtgggagacctaccgccgcacctggaagcgcaacctcaaggaatccctgctgcccggcgctgtctgcggcttgctgctggccatggagcttttctcactctgccacatcaacattgccggcgggcacgtggccgtgatcgccgtgctggtcgccatcatcctgctggccggcattgcccagtacctctacgtgcaggttgcgctgcttgacctgtccttcgccggactgttgaagaactccctcatgctgttcctgggctacctgccccgcagtggcctgggcctgctgtggcagctgctgtactggggcgctgtggcgctgttctggccaatttccagctttgtgctgattttaaccagcctgtggctgccctgcctgttgagcctgatggccatttaccccgtactggaaaaaagctttgacatcgagaaaaaaatcaaggccatccgtgaggcccagctccacggtgacgacgaccagtaattttaccgcgagggacgcactgcgttcctctttttttgttgcgaaagcgccgcaaaaagggtataatgtcataataggtttattgtctgcaagaggaggcggctgcgtgaaaattctgctgatacactgtcattaccggctgcccggcggcgaggacgccgtctttgccgcggagcgcgccctgctggagcagcacggccacaccgtcgtcgtctatgaacgcagcaatgaggaagccgcccacggcgcggctaaggcgctgctgccctttcgcgccgtctggaaccgccggaccgcccgcgacgtgcggaatatcatagaacagcagcacatcgacgccgtccacatccacaacacgctgctgctcctcagccctgccgtcgtgcgtgctgccaaaaagtgcggcgtgccggtggtgctgacgctccacaacttccgcctgttctgcccgaacggcatcttactgcgggacggacgggtctgtgaggactgcccgcaccacggcctgcactgcgcactgcggcaccgctgctaccgcggcagccgggcgcagacgctcgtcgtcgtggccgcctactggctgcatcgggtgctgggcacatggcgcggcattgccatcaccacccccaccgagtttgaccgggaaaagctgctggaattcaataagattcatcccaccttcgacgaaaatcgccttgtcgtcaagccgaaccccgtgaccgtgcccaccggccccgtcactctctgggaggagcgcaagcgtcagttcgtctttgcgggccgcttggaggaactaaagggtctgcgcaccgtcattgaggcatggcgcattctgggcaaggacgcaccgctgctgcttgtggccggggacggtccgctggccgactgggccaaagcgcagaatctgcccaaggtgcaattcgtcggccagcttccgcgggacgcgctgcaccgcctgatgtccgagagccgcgtcgtcatcgccgccagtctctgctatgagagctttgcccttgtcccggcggaggcccacgcgctgggcacgccggtgctggccagcggcatcggcaatatcggggcgtcggtgcggcccgggtttgacgggctgtgctttgcccccggcgaccccgccgcgctggccggggctgtccgcgctatgagcgccatgcagtttgactgcacggccatcgccaacgccacccgccgccgcttcagcgccgaggaaaactacaagaccctgctaaaactatacggccgccgcgccgccgaggaagtatcatgaaccagttttaccgcgccctgcacatgccgcccaagcggctgctgcgcaaagtcatgggcgaaaaagaaatctacaccatcgccgtgcgcccccgccccactgccgagggcaccgagccgctgcccgctctggaaggcggcccctacaccctgctgcccgggcgggagggctggtggtttgccgacccgctgctctaccaccggcgcggcaagcgctggctgttcgccgaggcgatggacctctccaccggcaagggccgtctcgaggtctgcgagctgcacgacgacggcaccgccgacggctggcgcgtcgcgctggaagaagatttccacctgtcgttcccgatggtctttgactggaacggtgaggtctggatgatccccgagaccggcagtgaccacagcctgcggctctaccgctgcaagaccttccctacccaatgggagctggtgcagcgctttcccacggacgaggagctctgcgacacgattttgctggaccgccgcgccgaggccctgaccctgctttgcagcgagacccgccccgacaaccagctctatgtgcgctaccgccgctacacgctgcgccacgccgtacaggagaccgccgccgtcccgctgcctgccgaggacaccctgcccgccgcgcccggcccgtttgagctgctgcccgacgaagcctacaatctgcagcaccgcgactttgaccttgtcagccgcaacgccgggccgtttttcctgctgggtgagcagatcatccaccccacccaggtcagcaccaccgtggactacggggtctatctgcagtttctcgcccgccgcggcagctcggaggtgcctctctgcgccgccacgccgcagaacgtcgagatcaccggccttgcccccgcggacatcatcggcatccacacctactgccgcgatgacgttttagaaatcatcgacgcaaggtatctgacaaggctgccgaagatcgagacagccgtcgaaaccgtttccgaagcaaagccgtaaaaaatcgtgctctgtaggggcgaacatggttcgcccgccaacctgacgctgcatcgattttccgggaaggctgcgcgcatagcaaacggccacgggcgaaccatgttcgcccctacggtctctataccccaaaagaggtaatcatccattcatgaaaaccatcgtcattccgcaattttaccgcgggccgtcgggccagaagggcctgtataaccggcaggaggtcggcctggcccgcgcctttgccgcgctgggctgccgcgccgtcgtgctctacccggatccgggcgctaaagccccccggatcgagaccccggagccaaacgtaaaaatctgctatatgcccgccgtcgccttcggcgtgcaggcattttataaaagctggcagatcctgctcgacgagcatgccgacgccgtccacgtcatgggcgacaactccctcggcgtgccggggctgtaccgcttctgccaaaagcacggcatcctgttttacagccagctcggtgcgctgaaaagcacctccaaccacgccgccgtgcgcagggtcatggatctgctgctgcgccgcaatctggcggtatatcgcaaaacgcccacctacgccaaaacccccgccgtcgccgccgagctggaaagcctcggcgtgccctgcgcggggctgatgcccgtcgggctggacaccgccatcatcccgtccatccccaacaaccgcaccgagatccgccgtgcgctcaaaatcgacgagcacgcgcgggtgttcatctttgtgggccgccttgacccctacaagcagccgctcgaccttgtgccgcttttgcaggccgcgccggactggtacgccatcatcattggccggggctcactgggcgatgagctgacccgcagcctgaccgacgcgggcttactggaccgctgccgcctgatcccgcagctgcccaacgagcaggtgcacgtttattatcatgcctgcgacgcttttgtgaacctgaacccgaatgagattttcggcatgagcctgctggaggccatgtacgcgggctgcccgccggtggtgcgccacgcccccggccccgaccttatcatcgagaacggcatcagcggcctgctgtgcggcaccgtgcccgagctggccgcagcgctggacaaaaccaccgccgccatgggccacgccgcccagagccgcgtgaacgaaaactttctgtggcagaacagtgccgagctggccctgaccctgctgcccaaaaagggaaaagccaatggataacgacaatcctcttttgcagaaggctgccgacctctaccgcggtctgcgctttacaatgaaataccgcggcgtggacatcctgcccgccgctgccggcaacgacctggcgcgcgacctgctcgagagcggtcagccgttcctgtttggccgctgcggtgccaccgagatgcgcaccgtggccgactggctgcaaaacggcgggcacaatttcacggaccgcacgcgggcggacattcggaatctgtcgggcgtctttcccaccgacgatgccacgctggacaaattctgccgcctctacgtcaagactgcgcagagcgccgagctgctcgccctctggaacgtcggggccgagcgggaggtcatccgcggctgtgacgcgacccgctttaccgagctgcgcgccttggagccctactaccacgcccgcccgtggagcgccgccctcgcgggcaaacgggtgctcgtcgtgcacccgttccgccgcacgattttagcccagtatgaaaagcgcacccagctgtttcccggcaaagacgtgctgccggagcttgcctgcctgacggtcattcaggccgtgcagggtctgggcgggcaggataccggctacgccgactggtttgacgccctgaccgagatggagcgccggatggacgccgccgactacgacgtcgccatcgtcggcgcaggggcctacagcctgccgctggccgcccacgcccgcgacaccggccacgccgccatacaaatgagcggtgccacgcagcttttgtttggcatcaagggcaagcgctgggacgaccaccccgtcatttccaagctctacaaccccgcctgggtccgtcccgacgagaccgagggcatcagcaataaagaaaaggtcgagggcgggagctactggtaatttttcagataatagataagagataatagataataaaaaatgtgcgccgtcagacggcgcgtcttaaaaagcctgcccgtaggggccggacatatccggccctcaacctaccctgcctatcgctttatccttatattatattcccctgtggttaaaattgcggcgcacggcgccgctccacttctattatcttttctctcttatcttttattttttccggagaccaccatgaaaatcttaatgatcagcaaccacctcggcgtgcagagcggcgtacagcggtatgtccagaacctgctgctgcacctcgataccgccaaataccgcgtcacccttttcgtcggtcagtgcccgccggaccaggccagcacggccccggcgctcgaggcgcacggcgtcgagatcctcgccgtgccggataacaaaaaggaccgcatccgcgccctggccgcccacctgcgcacccataaggattacgacatcatccactaccacacggccagcaagatcggtgccccggtctgcggcatgatgcgcgtgctctgcccccgggctaaaatcgtggtgcacagccacatcgtctacccgcccatgacgctgacctggcgcgccgcccatctggtgtaccagctgttcgcggactacttcctcggctgcggcgtcgcggcggggcggttcgtgttcggtgaccatatcgacgctaagccgaacttttccgtggcctgcaacgccgtggatgccgggcgctttcacccggatgccgccgcccgcgccgcgacccgcgccgcctggggcattaccgatacggaccggctggccgggttcgtcgggcggctgaaccaccagaaaaatccgcttttcctgatggaggtctttgccgcgatggccgcgcaggacccgcattggaagctgctgctcgtcggcaccggcgagatggagcctgaaatgcgcgccgccgcggcccgccgcggcctgacagaccgcgtcatctttgcgggcgtgcagagcgatgtgcccgccttcatgaacgcctttgacctgtttctgctgcccagcaactttgagggcagccccgtcaccctggtggaggcgcagggctgcggcgtgccgtgcctggcgtccaccaacgtgcccgacgacggctcggtgaccgaccttgtgcattttctgccgctggccgcgccgctgaccgactgggccgccaaggccgaggccatcgccgcccacggcgaccacgacgaccactgggccgcgctcaccgccgccgggtacgagctgaaaaccgctgcccgccgcatggagcagctgtacgacaaactgggaggacacgcatgatctacgccgaactggccgggggcctcggcaaccagatgttcatctacgccttcgcgcgggcgctgggtctgcgctgcggcgagcccgtcaccctgctggaccgacaggactggcgcgacggtgccccggcgcacacggtctgcgcgctggacgcactgaacatctcgccggacgtcaaaatcattgccgacgcgggctttgccaaggcacacctgccgcgccggaacgccgccaaggcgctgatgatcaagtacgagcagcgccgcggcctgatggcccgcgactggcacagctttgaggctgccgctgccccgctgctgaacgccgtcggcctgcactttgccaccgacggctacacccccgcccgccgcggccacgcccgcgatttcctcgcgtgggggtacttccagagtgagcgctactttgcggattttgcccctattataaaggaagagctgcgtgcaaaagccgcccccgccgggccctatgcggcgcagatcaccgccgccgcgtaccccgtctgcgtccatctgcgccgcggcgactaccagaagcccgagaacgcgatcttacaggtctgcacaccggactactacgcccgcgctgtcgcagcggtcagggacgaacaccccgacgctgcgctgtttgtcttttccgacgacatcgactgggcgcgggagcatctggacaccgcgggtctgcccgccgtgttcctgccccgcggcgaggccgtcgccgacctggccttcatgcagctctgccgcggctttgtcctgagcaactccacctacagctggtgggcgcagtaccttgcccccgcccccgataaacaaacctgggcgccggataagtggtatgcgcacacgaagaaaacggccttgtatcaggacggatggcagcttataaaggctttcccctcggggcaagctgtcaccgcaggcgactgatgagggcaaacctcgccatcatcacccgctaacagcttgcagcgcacactctcccctcatccggcccttcgggccaccttccctcctcgggggaaggctttatagcaaggagacacttatgcctctcttttccatcatcatccccgtctacaacgtgcaaaactacctgtccgcctgcgtcaaaagcgtggtcgagcagcccggcccgcgcgactgggagtgcatccttgtggacgacggctccaccgaccaaagcggcgcgatgtgcgacgccctcgccgccgagctgcccggcctaatggtcattcaccgggaaaacggcggccttgccgcggcgcgcaacaccggcctcaaggccgccacaggcgattggctgctgtttctcgacagtgacgacgccatggcccccggcctgctggagcagctgcgcggtgcgctggccgcccacccggactgcgactggttcatcggcaagcatctcgaatggcaccccgacggcacgctgaccccgcacgacggtctgcatctggtgcccggcccgtttgccagcagcgactacgccgcgcggctgaaggccctgtacactgccgggcactggtcggtctggaaatactgcatccggcggtcctttttggagcaggcccgcgtccgcttcctgccggactgcgtctgggccgaggactggccctttgaccttgagctgctgctgcactgcgacaggctctactttctggacacggttttcatccactaccgcgtcggacggcagggcagtcttttgacagatgccaaaaatctgcctaaacgctttcggggccttgccgccgcacagcgccgcctggccaggctctccgccaacggcacggcgtccgccgcggcctacgccgccatgcaggatgccgcggcggacgttttctggccgcaggcccgcacggcggcggtcagggacgccgccatccgcaaagcctgcctgccctatatcgagcaactgcgcccgctctacccccacggcaccgaggtccgcacccgccgcgactggcggctgttccgttggatgatgcagaccttcgggccgaaatttaccctgtgggcggcgagccgccgctaaaggcttcccccaaggggctgcgcccgcaggcgcgtgtcgaagcgtaaccgccgtaggcggctcttgacgcggagactgaaactgtcgccgtaggcgactgatgagggctaacctcgccatcaccgcccatgaacggcttacaactcatactctcccctcctccggccctccgggccgccttcccccgcgggggaaggcttttgtgaaaggaactgccttgcgtaccaaacgtaccttactgaatatggcctacgccctcgggtccagtctgctgcttctgctgctgggcctcgtcacgcggcgtctgctcgtcgataacttcggcccgcagatcaccacggcatcgcaggtcgtcagccagcttttcaactttttctccatcgccgagttcggcgttggcagcgtcataagttatcgtctctacgagcaaatcgccgccaaaaatgaagaaaagatcagcaagtatatgtcgatgtacaagtgggcctaccgcgtcgtcggcctggtcattgcggggctggcgctcatcggcgcggcggccctgcggtggatcatgcccgacgtgcccgccgccacggcatacacggtctacggcctgaacgtcgtttcaacgctgtgcagttattttctgataacccgccgcctgatgtacacctgcacccagcagggctaccgctgcacccagatcgacttctgctgcaacgtgctgacgagccttgccaaaattgccgtgtcactgtggttccccaactacgtgctctatttcagcgtgacgatcttcttcaacgtcacggccaacctgctgattgcccgccgcttccggaaggattttccctacgtacacgacgttaaggtcacggtcaacgactttaaagacctcggcattttccacgatctgcggtactttctggtgcaccgcctgtccaacaccatctacggctcgtccgacaccatcgtgacctcccgcctgggcggctcgacccagacgacgtttttaggcaactacaacacgatttccacctccgccacagacttcggcaacaaggtcatggacagcttcgccgcggccatcggcagcatcgtctacgacaagtccgccgccgccaacgaccacgacaagcaggtgttctggggcatggacctgttcagctacctgtttgccagcttcgtagctacggcgtatttctgcctgttccagccgttcatggcgtcctggatgggcgaaaaatggctgctgccgctgggcttcgtgctcgtgttctgcttaaatgagtacgtcggctggaaccaccggatgctcggcagttaccgcgccgtcctcggccattttgaggacgaccagtggttcatggtcgcgtcggccacggtcaatctggcgctcagctttatcctgttcccgctgttcgacatcaccggcgcactgatcgccaccgtcgtcgcccactgcatcatgtgggccgggcgtatccgggtcgtgttccgccagtatatgcgcggcgggctcgggcattatctcggcgtgcaggcgctgcatctggtcacgctggccgtctgcatgggcggcagctacgcgctctgcgcccggatgcccggcggctggctcggccttgtgccgcggattctcgtcgtcctcgtcgtgcccaacgccctgaacctcgccgtctacggctggggcaaagatgccgcctacctgcgccagtacgcgggcaaggtggccaaaaagctgctgaaaaagtgactccccttcttggccccctctgggagggggctccgcccgcaggcggtgggggagccttccgcttgccgccctccctccggccctccgggccacctccctcgcacgcgagggaggcaaataacgtggtgatcttatgaaaactctcgccatcctgtatatctgcaccggcccctacgcggtgttctggcatgatttttaccccaacttcaaggcaaattttctgcctgactgtgaccgcaccttctacgtttttaccgatgcagcgcatattgactatgaggacgctcccgacgtgcgccgcatttatcagaaggccctgccctggccgcagagcacgatgctgcgctttgacgccttcctcggccaggccgacgcgctgcaaggctatgactacctgttctttgccaacgccaacctgcactgcacccgcgtcatccacgccgacgagctgctgcccgaccccgccgccgggcagagcctgaccgcggtctgccacctgccctactatggcaaaaatccgattttccacccctatgaccgcagcggcaaaagccgggcgtccatcccgtacagctgcgggcagtattacgtggcgggcgggctgaacggcggcacggcggcggcctatctggccctgtgccgggagctgaaaaaacgcacggacgaggatctgcaaaacaacgtcattgcgcgctttcacgatgaaagccagctcaaccgcctggtcgccgagacgcccggaaaattccgcatcctgccgcccgactactgcacgccggaggaaacgcccaccgggcatgaggccattcttgtgctgcaaaaaagccgctgcatcaacgtggaaagcgtcaagggcgctgccaagccgcaaaattttgtccagcgcaagtgggaggcgttccgcctgaactggctaccctatctctggctggcgcgcgacacgctgctgcgccgccgcattgattttaaaaacgatctatgagccataccaaaaaaccgacaattgaaaaaatcatccttgccctgctgggcctgctggcgctggccgcgctcgtccgcacaatgttcctggggctggagatcgacgaggagtacgccctgtccctcggcttccgccttgtgcgcggtgaccggctcttttactcgatgtgggagccgcaccagctggccgccctgccgcccgctttgctcatcggcctgtttaccgccgtcgcgggcacgaccaccggcgtgctgctgtttgtgcgcggcgctgtgctgactgtcaagctcgcgctggccgtctggttttaccgcagcctgcgcggggccctcggggggcactgcgcctatctgctggcgctggccgtgctggccttcacgcccaagtggtttttggggccggactacgtcagccagcagttccactttacgctggctgcgttcctgtttttgtacggctactacgcgcccggcccgcggcagtaccgcggtctgtggcgggtcgcggcgggcggcgtctgcgcctgtctgagcttcctcgcctacccgcagaccctcgctgccgcgccggtgctgatgctggcgctgctcctgctgggccgcggcagtgccgacaaatgccgcggtctctgggtatttgtgctgacctgtgccgtctgcggcggtgcgtttgtcgtgtatgttttgcagggcatgggctttgatttcgccgccctgctcgcacgcgccgacctgattttacacgacccacagtatgattttaccacagtggaccgtcttgccatgctccgctcccagctttccgccgtcatcggcaactgctggctgtcggccctggccggtgtggcgctggccgccgccgggatgctctttggcgagcgccgcggctttgcccgcagccttgaaaaggcgctttggtacacagcgttcttcctctctctctggtgcacggcctactgcctgcgcgcgcaggagctggatttccgctacatgtgcccggcgttcgcgctggccggcggctggacgttctggtgtgaccggcgcgaggccgaccaccgccccctgcgccgcctgctgttctggctgggctggctgcccggcatagcggcgtacctgtttatcctgcgctccacgctgatcgcgctgccaacgacctttatgtacctgttctggcccgcggtctgcggaactgcagcgctgctgctcaagccccgcccgacccggcggcaccgcgccgcggcggcattgctggcagccgggctcctgctggcctgtgccgtgccgaagctctgccttgtgctggagaccggctggcactgtgagccgatcacggccatccagcccgaaaggatcacccgcggccccgccgccgggacctgggccgacaccaaggccgccgacatgcaggaatgcctgtatgaagccctcgccccctatgcgggccagagcgtgctccaggccatcggtgagcagcacggcctcggctttctgatggcagacggcacgctgaccgtcgcccaggcgtccgtcatctcgggcaccgacagcgacccgcgttttgaacagtactatgcgcttttgccggagaagcagcccgacgtcatcctctacgatgatgccgaggtccgcgacatggccgaattccacgcctggatcgagcagcactttaccattacagaccgctacaccgtgcagcacggcacggccagtctgcaggtgctcgtcgtcgggtaattttgcggaattttacaaccgggaacggttgtcatcctgctttcggatgtggtatactgttatcaaatcgtcatactttcaaggaggcgcccccatgggcctgattaccgccatccagaacaaaaccgaacaagcccgcgcaaaggaacgcatccgcccactgctggagagccgcatgatgcgcgacatcctgctggagatcggccagcgcggcaccgaaaagctcgacccccagagcgtgccgctggatcagcgcccacttgcatcgaagcgcgccgccgagtgcggcaccgcgggattgcagcagagcgtcatccgggagatcgtcctggacgaggccgccatcacgctgtttgccggcagcgacgaggtgccgttcctctacggcgactacaattacgagaccatcgacgacaccgattgtctgcccgccgtagcacaatatctggtgcagcacctgctggggtactacaacatcacccggacattctactctgtccccaagcacaacggacgcagcgtgaccgaaaagacccgccaggtctttatcaagcgccaccacgaggacacccccttcgacccccagcccaccaaaaagcaaaagctgttttaaacccaaaacacgctccgcagttcattttgaaccgcggggcgtgtttttgctaaaggcttcccccgaggggctgcgcccgcaggcgcgtgtcggagcgcaaccgccgtaggcggctcttagcgcggagactgaagctgtccgcgcagcggactgatgagggcagacctcgcggccattgcccatttactgccaatctcgcaaactctgccctcatccggccctccgggccaccttcccccgagggggaaggctttttacgctctccccatcgccagcaccgccaccgttatgtcatcctgcttggccccggcgcggcgggcggcggcgtcagccacggtctcggcggcctgcttcggcgtatggcccaatttggcgcagagctgcaattgctgcatcagccagtcgctcccgtcggtcagcgcaccgtcgctgaccagcacgacccagtccccggcgtccagcgcaaacgtcgtgctccgtcccaccagactgtccagcacacccatgggcaggcttgcaccgtccagcatccgcggcacgccgccgcgcaccagaaagctcggtgcggcgcccgctttgaacagcccggcccgcccggtgtacaggtccaccgtcagcagatccagcgtcgccccggcctcctgctcggctcccttcaggccgagcgccacgttcaccagccgggcagcgctctccgctgcgaacccggcgcgcagcagctgtgccgtcagcttggccgccatctgaccgtccacggcggcggcgcggcccgtgcccatgccgtcgcacaaaagcatctgcgcccgcccgctcgtgtcgcagaactggtccagcgcgtcgccgctgacgctctgcccgccggctgcgtgcgccgctgcgccaaattcaacggtaaacagcggtttttcaccaaagcacagcatcgtgaccgtgcggcagtgggtgatttcgggcgtatccatgtcgcggcggcagatgcgggtcatctcgtcggtcagtcccgcgacctcgtcgggggtgaaccgcgtgcggcagatcgtcacattcgcggtcagccgcccggccaaatcagcggtcacactgcattccagcgcgtccagccccagctcggcaaacagctgcgccacgcgggcctcgcgccgcgggtcgggcagaccggcctggcccagcttgcccgccagctgggccagcgccccggccagtgcgctgtactgctcggtcagggcggcgcgcagcgtcacagcccgggcacgggtctggcggcggctgcgccacagccggtagccgtggttggctgctgtacagaggtctgccgggtggatgcaccccgccagctgccccggcaggtcctcgacctccacgcggcctttgctctcgagcgtcggcttcaaatggtacagcccgtccatggccgtggcgtagccgcgcacccagcaccggctgcggcgggtgcagctctggcaggtcgtgcgggcgacctgctccaccacaaagtcaaaggtctcgcccttgggcggcagctgccgctggcagaccgcgttgaccgtgtcggcaatgtcactcagcgtgtccgccacggcggagagcttgcgcgccgccccgcccaggccctgcgtctgcacgggcggcgcgggcggcgggaaaattttgtgcagcacgctccccggcacagccagcgcagccacaacgcccaccccggcactgaccgccagcggcagcacactgacagcgtcgggcgcggccagtgcccccgcggtgcagcccgccgcaaacaccccggcgcagcggccccgctcccccgggcagaggcaggacgccgccagactgcccagcgccacagccagcgcggcgtaggccagtgtcggccccgacgccgtgatggccgccgccagcgcaatgctcagcacggcggtttgctccagcgtgccgccgatggccgcgcacagcccggcccccgcggccagcgccaggcccggagccaagggcccgacggcacagcgctgcaggcatgccgtagccacagccagccacaggcagacgccgcgcggctcccgcaccggaaaatgcgcgaacgcccagccaaaaaccgcggccagcagcgccgtacaccccaccgtgacggtctgccccgggttgaaaagtccccccgccagcacgatttgcagcacctgcgccgccgtcagcgtcaggcagcccgccagcgccccggccccggggcggccatcgatgagccgccgcaccgccgcagccgccacggcagccacggccagtttaacgcccagcagcatcggctggaacgccagccccgccgccagcgtgcccagcgccgcggccaggcagtaggacggcgggcagccgatgaccagcgccagcccaaacggcgcagccccgccgtagacctgcccggcccccagcgccgcgccgcccagcactgccgcgccctgccacagcagcgccgcactgcgcgccccgggcagcagcctttccattgtgtcgtgcatacgttccccgttcagtacagccatcgtgcaagccctccgtaaatgtacagtatatgtctcggacgctttgcactataccacccccgcacgctgttttttgccgcagagcgtggaaaaccgaaaagagcgtataaacaaacaaaaaagagcaccgccacccataaaaaggggcgatgctcgcaaaaagcttcccccgagggggcaagcctcccttagtgtctccagctccaccacaaaaacttggtgttcgtcacgaaatagcgtttgaaaagccgcttcgggtcctgcatcaggcggtacaaccattccagattgcagcgctgcatccaggccggggcgcggcggatgttgccggcctcgtagtcaaaggccgcacccacgcccagcatcagcgcctgcacgcggttttcatgggcggccatccagcgttcctgcttcggcgcgcccaggcccacccagacaaaatccggctttgccgcgttgatcttctccacgatctccgcatcctcgtccgccgtcagcgagcggaacggcggagaatacatccccgcgatgaccgcgccggggtacttttccgtaattttttcgcgcaggatgtccagcgtctcctgcgtggaaccgtagaaatagtgccggtagtgctttgtcccgctctccttcaaaagctcgcgcatcaggtcggggcctgtcacgcgggcggcgtcggcaaagcccttcttgcggctgtatctggacagcggcccgccgtccggcagggccatgaccgcgccgttctgcacccgcagataggtcgggtcgtcgtgggccgtcacggtggtgtggacgttcgccacgcagatatatttcccgcgccatgcctcgcagttgtcctccaccaggcgcagcgttttgtccatgtcggtgacggcgatgttcacgcccataatattgcaggtctgcatgccgcttctcctcactttcctgtttggcttttattgtatcacactgccgggcggctttcaaccgggcggggagaaacgcacattttatgccgtttttccttattctatgtgcatcctattctaacattttcccgttaaatccccgtcttgtcaaatttcattcgtcctgtctttttcatttgtcggttatgacaatttttgtcattttatatctttctcgcagatattcactggaatttcagattacagtatgctataatttttttaccatagtaaaaggaagaagtctaacctttttcctgtatggtatatgggctttgcccgtatatttttcgaagaaaggaggatattaccaatgaacaacttcaagaagttcgtcgccgttctgctgggtgttgtgatggcttgcgtcttcgccacctccgctttcgctgctgatttcagcaatgctgataccgctgcaaaggctaaggccgagatcaaggctttcgctgccagctacggcatcaccacgattgacaacactgtcaacagcctgactgctgaccagctgcaggtcatctacaacaacatggacgctctgaaggctaccgccgcttccgccaatgccaccatcaagggcaccacggatgttgccgttgccaccaaggccgccaatgatgctgttgctacgatgaacagcctgctgcccgccggtgtttccatctctgcaccgaccatcgacaccagcgattcttccaagatcgttgtctccgccgatgtcaccgctaacggcgcaaaggataccggttctgtcgttgctaaggaggttcctaccaccaccaccgacaacaacaccaacaccagcgctgctgtcagcaatgccgccaagaacagtgctgccgcttccagcgtcaagaccgtttcttccgctgcgaaccccatcaccgcttcttccagcgctgtcatcaaggccaccggcgataacaccgccgttgtctttgctgttgctgctctggctgttgccggcgtgctcggcatggccgtccgcaaggagcgtgcactgtaatccagctgcataagtccggtttttgaccggcagcgggcagaacctctggctctgcccgtttttcgttgtttatacgggattggtcaatttattcttgttttagaccttccttttatatagaaaatagtttataatataggatgcagtaattatcaaccatatcaggagggaaagcatatcaccatgcaggcaagcaagaagcactcttttctgcgccgcagtccactggcttatgtagtggtcccgctggcctttgttctggtcagcaccgcgctggtctttatcgtgggccacaccatgctggccccgtaccaggccctgctgggctggttcttcagcacaacggaggtcgcgcagcccagagatctgctggacaatgccgctaccgtcatcaacggcggtacggtggatgagccggacgcccagccggacaggctgccgctgagctccgtcacctacccgtccgagggggatcgctacgcgacgatcacgatctccggtaccaacgtcgatgccccggtctactacggcgacacgaacaaaattttgaacgctggcgtcggcacctacaaggacgactcccgcgtcggcattcccggcgagggcaagaccatcctgctggccgggcacaacaacaccttcttcaatgacctgcagcacgccgaggccggcgcgacggtcacgatcacgacccactacggcgtctacacctatgaggtcaccggcaccgagatcctcgactatcaggacgagaccgcctacgacttcacccgcaccgacgagaatctgatcctgtacacctgctatcccttcgatgcgctcggcttcacgccgaaccgtttcttcgtctatgccaaatacgtgtccggccccgtgctggacgccaacagctaagggggtgtatgtatggcgcaaaaacaagctccgcacccccgccgcaagggcagcgttgtgtgggccacggttttaagctggctgtccagtctgctgctggcactgctggcgctctgccttgtcctgatgacaacgatctgcagcgcctcctacatgaaggagcaggtcaaccgcagtgatttcagtgaggccgcctacagctatctgtatgacaacttcatcagctacggcgcatcgtccggcttctccgccgacgtgatgaccgccgccctctcccgcgaccagatcacggcggatatggcggattccatcacccgtctgtaccagggcgacaccgccattgacacccgcaacgcgattctgaatacgacgtacgacaacctgatcaacgatttgaacggccgcggcgtcgaggtcacatccgacgtggaatccgccgtcgtcgtcgtcgccgacgcctgccgtctggactacgccaactatgtcacggtgcccctggccagccagctgtacacttttattgaaaagtgcagccgcgtcgtgccggtggccgtcgccatcatggcggtgctctgcgcagtcagcctctttgtgatgctgcgcttagccggcagctcccgctacggcgtgcgctgcctgacgttcgctttcaccgcggctgcggcgctctgtgcgctggccgccaccattattttccctgcgatccacatggaggcgctgagcatcaatcccgcttcggtcaagcagctgatcgtcacctatgtgcagaatctctttggtcgcttcggcctgttcgccctcatctacggcgcagtcgccgtgatccttctggccctgaccatcaccgccagaagccgcatgaaacgccgtcagaacatttaacaggaggatccacacatggaaaacgaaggttacgaaacgattgacctcttggaggtcctgaacgccgtccggcagcacctgctggccgtcattctcaccaccgtaattctggccggtgtcggattcggcgtctccaagttccttatcaccccgcagtacgaggcttccgccctgatgatcgtcaacacccgtcaggatacgacctccaacgtcaccagcgaccagatcaactccgccaccaagctggtctccacctacagcatcatcatcaagagcgataccgtgctgcagcaggtcattgataacctgggtctgagcctgacgtatgaaaagctggctgaacgtgtcacggtcagcgccgtggatgacacccaggtcatgaaggtcacagtcaagagcgacaacccagagtgggcgcgccaggtctgtgagcagatcaccgtcgtctcccctgacgtcattctcgagtccgtcgaagccggttccgtcaaggtcatctccagcgccgccgtcaatccgacgcctgtctcccccaacgtgggccgcaataccatgctgggcggcgtgctgggcctggtcatcagcgtcggcatcatcctgctggccgtcctgctggacaacaagatccataccgaggacgacattgccaagtatcttgacctcgccgtcgtgggcgtcattccggaatatcagagaggtaaaaagaaatgagcaaggcaagcaaaaacaccagccgtcgcaagctgtttaccgtcggcagcgacgccccgttccagtttgtggaagcctacaaatctctgcgtaccaacctggaatttctttcctctgccggcaactgcaagaccatcctgatcacctcctccgttcccgaagaaggcaagaccaacgtggccgtcaacctggccatgacgattgcggcctccggcaagcgtgttgtccttgtggactgtgacctgcgcaaggcgacgatctcccgctacctgcgcattccgcgcaaccatgccggtctgacgaacgtcatcacctccaaggatgaaggcgcgctggccacagcgcttgtccgcgtcaaggattccggcatcacggtcctgaccgccggtacgatcccgccgaatcccaccgagctgctctccgcccccatgaccgagaagatctttgcctccctgcagaaggcattcgactatgttattgtggataccccgcccgtcagcctcgtcaccgacgctgcggtcctctgccgcatggcggacggcgtgctgctggtcgtgcgccccggcgtcaccaccatccagagcgcccagctcagcaaaaagaacctggaggccgtcaacgcccacatcctgggtgttgtcatgaacggctacaacggcaagcagagcggccgccgcgacggctactcctacgcttattcctacagctattacgacgaagataaaaagggaaatgatgcatgagtaatgcccttgtagagctgcactgtcacatcctgcccggcattgatgacggtgccaaagatctggatatgtcaatgtcgctcattcgcaaggaattacaggatggtgcggcgggcattgtgttcacgccgcacttccattatgagcgcatttccgtggagcagtttaccgcgcggcgcaaggcagcgttcctgcaggtgtccgcggcctgcaaggccgagggcctgcggctggccggtaagatgggcgccgaggtgttttactccaccgcgctgcccagccttgacctgcgccagctggcctttgcggggagcaactatattttgatcgagttccccaccacgatgcacccgccgggcatcgacgagacgctctacgccatccgtgcgcaggggtacacgccgattctggcccacgtggagcgctatccctttgtgaccgaggacccgacgctgctctacaactgggtctgcgacgggtgtctggcgcagatcaacgccaccggcctgatccgggacggacacaccgccaagtggctgcacaagctgatcgagtggaaccttgtgcacattctgtgcagcgactgccaccacccggtcaagcgcccgcccaacctggccgagggctttgcccatctgcctgacaaggtcgcccgccgcatgcagcgcaacgccatcgacatctatcttggcgacgacctgcgtccccccgagccgacgaagccggtctaccgcttcgggcattgggtgtaaaacagaatatacgtaggggagggttaaaaaccctcccctacgctatttttattgcccgttttccgccgtctgcccggcccctaccgcgtactattcgccgcgctcacgcctctgccaccgccaccagatacttgtagatctgcggcttgtactcctcatacaggcccagatgctcatacagctccttataatatgcaaacagagtcgcgcgggtcgccacgatgttcaccgggttcagcgccgtgtgcaccgcgctgccgggcgtgttgaaatagttgtagatcggcgtcgacagcgcgtagaacttctccgcatagcggatatagctcaaattgaaatacaggtcctccgaccagtccatgtcctcggcgcatataatgtcatcgtgcgcgcggacaatgtcggcgcggtagagcttattccacatcacaccgtagtaaaagctggccggttcctgcatcaggcccgcggcgaattcctccttcgtcatcgggccctccatcaggaagccgtaggtctgcaccttggtgggccgctcggggcgggggtcatcctcggcacgggggcggggcggcgtaatgcggttgtagtgcgcaatgaccaaatcggcgccgctctcctcggcccgctgcaccagcagctccgtggcgtagggctggatcgtgtcgtcggcatcgacgaactgcagatacttgcccctggcctcccgcaggcccatgttgcgggtcgcggccacgccgctgttggccttgtcgatgagcacgatgcgcggatcgacgttggcatacatcttgcagacctccaggctgacgtcctggctgccgtcgttcagcagcagaatttcaaggttccggtaggtctggcggcggatactctccacacagcgggcgatatgatcctgggcgttataaatcggcacgataatactgacaagcggctgctccgacatggcaggcgacctcctttttgtagtagtatatccacaataccacacttttgcccggttggcaatggaaaaagtgcgcgaggtgtggtatgatgcttataagggcttccccatcgggggaagctgtccgcaaagcggactgataagggccagccttccgccgcagcctgttcatgggctgcccccgcagacctgcccctcatccggccttcggccaccttcccccaagggggaaggcatcactatgaaacgaggtcaccaccatgaagccttccatcatccgcctgcgtgcgctggaaaagcagctgtacgcctacctgtatgccatgaccgtcatcgactttgacgccgagaccgtcgcgcccgagggcagcgccgatggccgcgccgaggccaccgaggttttgagccgcgccagctttgacctgctggtcaacgacggcaccgccgcccttttgaaggaggccgctgccgacgccgagaccgagcaggagcgcgccgaggtccgcaatttgcagcgccagtacgacgagatcgcccgaatccccgccgacgagtacgccgccttcaccaagctgtgcagccagagcgtgcccgcttggaccaaggccaagcgcacgaacgatttcagcctgttcgcgccgtatctggaaaagctcatcgccgcccgccgcgcccaggcccggtattttgcgccggaccgcgacccctatgaggtcctgctggaccgctacgagaagggcctgactattgcccagtgcgatgaatttttcgcgacgctgcgcgaaaccatcgtcccgctgctggcggacatccagacccgcggcaaggccgtgcgcaccgacttcctcgaccaggattggcccatcgacgcccagcgcctggtcagcaaaaagatcatggagctgtggggccttgacccggcccactgctatctggccgagagcgagcaccccttcaccaccgagttctggcgcggcgatgtgcgcatcacgacccactatatgccccgggacatcttctcgaacctctacagcgtcgcccacgagggcggccacgcgctgtatgagctgaacatcaaccccgactacgactacaccgtcgtcacccacggcgcgacgatgggcattcacgagagccagtcccgcctgtttgagaacctggtgggccgctcccgcgcctttgtccactacctgtacccgacgctgaaggagctgttccccgcgcagctggccgacgtctccgccgaggagatctggcgcgccgtcaaccgcgccgaaccgggcccgatccgcaccgaggccgacgagctgacctactccctgcacatcatggtgcgctatgagctggaaaaggccctgatgcagggcacactggccgtggccaacctgcccgccgcctggaacgccaagtataaagagtacctcggcgtcgatgtgcccgacgatgcccacggctgtttgcaggacatccactggtccatgggcgacatcggctatttcccgagctatgccctcggcagtgcctacggcgcacaggccctcgacgacctgcgcaaaacaaacgactttgacgcccagtgggccaacggcgacgtggagccgctgaaggccgccttaaaggagcgcgtctggcagtggggcagcatgaaggaacccgcctggctcgtcgagagcctctgcggcggcaagtttgacccgcaccacttcaccgattatttaaagaagaaatacaccgagctgtacgagctgtaaggcaggagccctgcggccccaccgtaggggcggattccatatccgcccgtagccgttcgcccctatatcgcacaaaaaatcccgtcggatgcccttttccggcgggattttttcagcataatacgctgtccgggaaattcaggcaggtgtacaggtaccgcagtgcctcgtccatcgtgtcaaactcgccgccgtctacctcgctggggctggcggcgatggtcgacttgtcaaacgggatgccgttctccctgcgccattcgtccacctgcagtgctatgtcattggcatagcccgggcggtcctgcctgctgccgtcggcgtcaatgtaaacgcaggcgccgtactttttccggtccggcaggcgcaccagctcggccagcgtgtagtagtcgcggtcaaagtaaaagagcatctgcccgcggtaggcggcgatctccgccacactttcctcgcggttcgtgatctggggcacggtgtccaccagccggtgcagctcgtccagcagtgcgtcgccatcctcagggtaggcatccgtgcccttggcagcagcgatttccccaaagcagtaggcctgccagtggggcgggcacttgcccagcttggcacgctcaatgtagtagagcaggtcagcgcggtaggaggcagcgagtgcgttcagactttgttttttcatagcttgtaggcctttcattttgtatcatttgtggtgtccgcttctcggaacaccctcatcttaccataaccgtttgtcgaatcctgccgcattataagaccgaacgccgttttattttagggacaactgttttccgctgtcgaaaaaacagcaggcacgcaaaaatcgcgtacctgctgtctttttgttattattttacgggctgcccctgtgcgcacagcactgcgtccagcgccgtcagcttatccggtacactgcccagctccataccggggaaatccgtctccacgcctgcggacgccagctcatcggcacaggccgcggggtcggcacaaatcgcctgtgcttcggccaggatgcccggccagttcagcgccagccgctcctgcgcgtcgccgctcagcccggcccgccaggtatccgctgtaccatcctcaaactccgacgcgctcaggtactccaccagcgccgccgcggcccgggccgttttcaggctgcagcctgccgtgtccgcgccgaaatccaccagcccatccagcacggcaagctgctcggtccggctgcctgcgtgcccggtgcccgcttcggacgataccgcctgcaccgcggacgccgcctccggcaccgccggggccgcgcacccggccagcagggcggcccccgctaagagaatcgctaacctacgcataccaaacgcccccaatcctaccttatattattcacagcaggtgtggcgtgtttcctgcttgcagcagtcgccgcagctctggcggcggatatagttttgaatgtcgtcaaaaatcggcatcagcgcctcgccgttttcggtcaggcggtactcgacccggggcgggacctcgttgtagtcgatgcgctgcaccagcccgtccgcggccagctccttcaactggttcgacagcatcttgtgggtcacgccgtccagcagcttgcgcagctcaccgtagcgcagcgtaccgtgcgcgcccaccatgaataaaatgcgcatcttccacttgccgctgatctggtccatgacctgctccatcctgtcacagcccacatccgcatagcggcagttacagtgttcgttcgggtgcattgctcacactctccttttgggtagcggtttctaaaaagtgcgtacttgtcaaaagtgcctatttgaatatactaagtatagggtattttccccgcgtttgcaacttgtttcttgggaatgtttgcggtaatatagttgtgtatgattataaggtagggcagcctgacttcaggccgccgcggcggggtggggtcaccccgccctacaatattcaccgccaaatgtgcggaaaatcacccaagaggagaaaaaactatgtacgatgatttagtagaatttctgcaggagtccgtcaccccgttccacgccgctgccatcgccgaaagctggctgcgcgcagccggcttcacccggctggaggaggccgactactggaaccttgagccgggcaagggctactacacgacccgcaacggctcgtccgttgtggcgtggcgcgtgccgcagcacgccatcggcggctggcgcatcgtggccagccacagcgactccccgtcgtggaaaatcaaggccgacaccgttgaaaacgacggctgccgccgcctgagcgtcgagggctacggcgggatgatcatgtccacctggctggaccgcccgctgaccgtcggcgggcgcgccctcgtcaagaccgaggacggcatcgagagccgccttgtgtaccttgaccgcgacctgctcgtcatcccgtcgctggccatccactttcagcgggacatcaacaagggccacaccttcaacccgcaggtcgatatgcagccgctgtggggccccgcgggcagccgcaccctgaccgacctcgtcgccgagtccctcggcgtggaggccgccgacattctggacagcgatctgcagctcgtcacccgccaggccccgacccagatcggccccgacggtgaatttttcatggccccgcgcattgacgatctggaatgtgccgccacgacgctgctgggctttctggatgcgtccggggagaccgacagcgcctgcgccccggtctgggcgatgttcgacaacgaggaggtcggttcctcgagccggatgggtgccgagagcagctacctgcgcgacgtgctggaccgcatccttgaagccgtgccccacagcgcacaggccagccaccgcgccatggccaacagctttatgctgagcgccgacaacgcccacgcgacccacccgaacttcccgcagaagtctgacccctgcgcgcccgtgcggctgggcggcggcgtggtgctcaagtacaacgccagccagaagtacacgacgaacgccgtcagcggcgcgatcttccgcgccatctgccggaaggccgacgtgccggtgcaggtgttcacgaaccgcgccgacgaggccggcggcagcacgctgggcaatttgcagagccacacgctgcccatcccgatggcagacatcggctgcgcccagttcgcgatgcacagtgccgtcgagacggccagcgtcgccgacgccgaggccatgacaaaggccgtggccgccttctaccgtgtccatctgcgtgcccttggcgacggcacctacacactggaatgagcacgggacgctacgcgcccagccccagcgggcggatgcacctgggcaacctgatgtgctgcctgctggcctggctgagcgccaaaagcaagggcggacaggtgctgctgcgcattgaggatctggacacccagcgctgcccccgcagctatgcggacgccattgtggacgatttggcgtggctcggccttgccgccgacggcccgacgccgccggtctaccagagtgaccgcagcgaaatttatcagcggtacttcgacgaattgtcccgccgtgggctggtctacccctgcttttgcagccgcagtcagctgcacgcggccagcgcgccccaccgcagcgacgggcaggtcatctacgccgggacctgccgcggcctgacgcccgccgaaattgccgagcgctccaagatccgcgcccccgcttggcgcgtgcaggtgcccgacgaggtcatcgcctttgaggacggccacatggggcactatgaagaaaacctcgcccgcgactgcggggattttttcctgcggcgggccgacggtgtgtttgcctaccagctggccgtcgttgtggacgacgcgctgatgggcgtcgatgaggtcgtgcgcggcagcgacctcttgtccagcacaccgcgccagctctggctttaccgggagctgggcctgatcccgccgaaattctaccatctgccgctgcttttggcctccgatggccgccgcctctcaaagcgcgacggcgaccagagtctcgagaacctgcgggagaaatacacccccgaggagatcatcggcaagctggcctttgcctgcggcctgcaagcctcccccgcccctacaacgccccaggccctggcccgcaccttcgattggtcccaggtcccgaaaagcgacatcgttctgccgaataatctgttttaataagataaaaggcttccccctcgggggaagctgccaccgaaggtgactgatgagggcagaccccgccaacgccacccgttcacgggcagtatccgtcagctctcccctcatccggcgctccgcgccaccttccccctcgggggaaggctttctctgcactaccaaaaaaggagtatccccatgcaacgctacgaaatcaccggcatgagctgcgcggcctgcgcaagccatgtggaaaaagccgttgcggcggtgccgggtgtggcatccgtcgccgtaagcctgctgaccaactcgatgcaggtagactacgcccccgacgccgaccccgatgccacggcacggcgcatcctccgcgccgtggacgccgccgggtacggcgcgtccctcgcctccgccgagagcgaaagcgccgagctcgaggacaccgagactcccaagctcaaaaagcgcctgattgccagcctctgcttccttgtgccgcttatgtacgtctcgatgggccacatgatcggcctgccgctgggcagtgtgttccacggcggcggctggcacgccatcctgtacgcgggcacccagctggtgctgaccctgcccgtctgctggatcaaccgcgcgtttttcatctcgggctggaagggcatcaagacccgcgcgcccggcatggataccctcgtcgccctcggcgccggcgcgtcgctggcctacggcgtgttcgccatcgtcatgatctgcatcggcctgtccaccggcaacgacgacctggtcatgcagtaccgccacgacctctattttgagtcggcggccatgattttaacgctcatcaccgtcggcaaaacgctggaagcctacagcaagggcaagaccaccgacgcactgaaaagcctgatgaagctggctccccagaccgcctgcgtcctgcgcggcggcgagcaggtcacagtcccggtcagtgaggtcaacgtcggcgatctctttttagtccgccccggtgagagcatccctgtggacggcaccgtcaccgagggcatctccaccgtgaacgaggccgccctgaccggcgagagcatgccggtggacaagttccccggctcccccgtcagcgccgcgaccatcaaccagaacggtgcgctgacctgccgtgccgagcgcgtcggccaggacacgacgctgtcccaggtcatccgcctggtgcgtgacgccgccgcgacgaaggctccgctggccaagaccgcggacagggtctccggcatcttcgtgcccaccgtcatctgcatcgccgcggccacgtttgtcatctggctgctgctgggccagacctttacatttgcgctggcccgcggcatcagcgtgctggtcatcagctgcccctgtgccctgggcctggcgacgcccgtcgccatcatggtcggcagcggcgtgggtgccaaaaacggcatcctgttcaagaccgccgccagcctcgaaaccaccggctacaccgacgccgtgctgctggataagaccggcaccgtcaccaccggtgagcccaacgttgtaaaaatcttcggcacccgcaacgtgcccgagaaattcctgctcagcatggccgccggtctggagctgcgcagtgagcacccgctggcccgcgccatcctgcagcgcgccgagaaggaccatctgtcctacgccactgtgaccgactttgaggccgtacccggcaagggtctgcgcggcaaggtcgcgggcaaggtcattgcgggcggcaatgccgatttcatccgcgagacctgcgccctgcccgacgacctgcagcaggcgggcgacgggatgagcgccgacggcatcacgccgctctacttctcgctggccggtaaggccgcaggcgtcatcggcgtgtccgacgtcgtgaaggagtcctccgccgccgccatcgcccagatgcaaacgctcggcctgcaggtcgtgatgctgaccggcgacaacgccgccacggcccgccacatcggcgcggcggtcggcctcgacgccgaccatgtcattgcgggcgtcctgcccgcgggcaaggaagccgaggtccgcgcgctgcaaaaacagggccgcgtcgccatggtcggtgacggcatcaacgacgcccccgccctgacccgcgccgagaccggcattgccatcggtgccggtgcggacgtcgcactggacgccgccgacgttgtgctggtgcgcagcgacctggccgatgtgcccgccgcggtgcgcctgtcccgcgcggtggtgcgcaacatccatcagaacctgttctgggcgttcttctacaacgccatctgcatcccgctggcggcgggcgtgttcacgggcttcggcatcacgctgaacccgatgatcgcctccgcggccatgagcctgtccagcgtctgcgtcgtcacgaacgccctgcggctgaacacctttgacccgcgcagcgccgcccacgatgccccgccgaagcgcaaagccccggtccgcgcgtctgcgcccgagatctcctgccccaccggcagctgccccgtgcagcctgccccggaaaataaaaccacccaaacggagggaactgccatgaaaaagacgattcacattgaaggcatgatgtgcggccactgcgaggccaccgtgaagaaggcattggaggccctggacggcgtgcagagcgccgaggtcagccacgagaagggcactgccgttgtgtccctgacccacgatgtggccgacgccgacctcaagaccgctgtcgaggccagggattataccgtcactggcatcgacgcatgagcgccatccgccgccgctggcgcttcaccggcacagtgcagggcgtaggcttccgctattatgcccgcgccgcggccctgcatctgggcctgaccggctgggtcgccaacaactgggacggcagcgtcacgctggaggcccagggcgagcgtgccgccctcgacgcccttgtccctctcatcgagcgcagcaaccgctgggcccgcatcgagaacgttgaagtcaccaccctgcccgtaaaggagcacgaatacgggtttggggagcggagcggagagtaattttcagagaggagataggtgttaggagagaggagagaaccctgctgtgggaaaatctcctatcttctcactcctatctcctctctttttggcttgcacttgtctgttattgcaggtataatactattatatcaacatcaaaaggggttttcacattgcccggtactttatatcttgtcgccacgcctatcggcaatctggatgacatgccgccgcgtgtggcggctaccttcggcctggcggacttcgtcgcggctgaggacacccgcgtcacgctgcggctgctcaaccatctgggtctcaaaaagccgatggtcagctactatgagcacgcgctccaccacggcgaggccatcctgaaccgcatcgaggccggggagaattgcgccctgtgcagcgatgccggtatgccctgcatcagcgaccccggcgagcagatcgtccgcgaggcccacgagcgcggcatcagggtcgtgcccatcccggcggcatcggcctgcgtcacggcgctggcggccagcggccagcccacggcccgctttgtgttcgagggctttctgcccgtccccaagcgggaccgccgcgaacggctggcctttttgcagaacgagacccgcacgatgatcttctacgaggccccgcacaagctgcgcggcacgctggacgacttggccgctgccttcggtgcggaccgctcggtctcgctctgccgtgagctgaccaagctgcacgaggagatcaaaaagacgactctcggcgaggccgtggccttttataaggacaacgacccccgcggcgagtatgtgctggttctggccggtaccgaccctgccgccgtcgagcaggccgccgcgccgaccctggaagacgccgtcgccgccgcccgcgccctgcaagcgggcggtctgccccccgccgccgccgccaaacaggccgccgccgggacaccgtttactaagggtgaaatctataaagagcttataaaataaaaagccttcccccttggggctgcgcccgcaggcgcgtgtcggagcgcaaccgccgtaggcggcccttagcgcggagactgaaggcggccgaggcctcgcccgaggccggatgaggggcagccctgcgtcatcgcccattcacggccatacctccgcaagctctcccctcatcagccgcctgcggcggcagcttctcccccaggggagaagcctttttcaacaggagtctatttctatgtgtaaaattctagtcatttccgacgtccatggccgcctgcgcgacctgcggtgggtgctgcaaaacgagaccgccgacgccatgttctacctcggtgacggtctgtacgacctgaacgccgcgctggagctgcgcagggagccggtgccctatcccatctaccgcgtggccggcaactgcgacgtcaactacagcgagccgtccgaggggctcgcccccttcggcggggtgcttttcttctacacccacgggcatcactacggcgtcaagatgggcagtgaacgcctggccgagtgtgccggtgagcgcggcgcagatgtggcgctgttcggccacacccaccggcgcgagctggtgcgcggcgtcggcacggctgccacggtgttcaaccccggcagtctgcgcgacggcggcagctacggcgtcattacgattgaaaacggcaaatgcagctttacctggaagagggtgcctgaattttgaacgagagcgttatttacctgcccgaggtagacagcaccaacctttgggccaagcataatctggacaagtttggtcccatcggcgcggtctacaccacccaccagaccgccgggcggggccgccttggccgcagctggcttgatgcgccccacaagggcctgtactacaccgccgtcatcaggaccgatctggtccagcccgccacactgccgctgtttgccagtctggccgtctgcgacgccctgcgcgagcgctaccgcatcgactgccagatcaagtggccgaacgaccttttgctgaacggcaaaaaaatcgtcggcatcctgtgcgaggtcggccccgatggccacagcatcgtggtgggcatcggcatcaatctggcccagccgcaggagtacttcgacgccgcgggtctgccccacggcaccagcctggctctgcagggcgtgcccgtagatatggacaccgacccggagtggctggctcaatacatgaccgacttcggctttgaccgcgcactctacacctacgaggccgagggcttcgccccctaccgcgagcgctacaaggcgctctgcgtcaatctgggccgccgcgtcacctacgacggcggcgccggaaccgccgttgacgtggacgacgagggtcgtctcatcgtccgcgacgagaccggcgacacccgcgtctttaccggcgaggtcagcgtaaaggggatttacggggcagtgtaatcattgccgccccgtaggggccgggcatgcccggcccgcagctttcccgccggcatccgcccactgtgcacctccgggccgcacatgtgcggcccctactgctctataaaaaacacagagcgtccctcccatcccgggaagaacgctctgtttttttaattcatcttcagatatttccgtaccggcagcgacacggcaccggcaacgacgcagcagatggcccactcaaaaatagcctgcacgccgaccagcagcacaatgaacataaacgcattctgtgcgcccagcgtgttggccaggttctgcacatagtcacagttatagaagatcagtaccagaaagcccatgaagaacacggtgttcagcaccggcgcggacaagccgcccaggaagcaggccagcttctcattcttgggcatagccttgcgcagcgcgttgaagatcagcgcggtgcacagtcccatcagcacacgggccacaaagcagaccacaaaggtgcccgcagggctgacctggaacagggctgcgcccatggcggacttgccctcaacagcctgaataaagctggttgcgccaaagacaccgcccagaatagcacctgccatagggttcatcgtcatagcgccgatagccacgggcacggtgagcagcgacgccgacagcgggccgatttgcagatagcccagcggcgtgtagttcaacacaagcagaatggccaccagcagcgcaagctgggtgagccaacggacgttggtacggtttttcatattcaattttcctcctgctgccgtctcctacaaatcgggagtacagcgcaaatgtacggtcctatcggaccgccgaaaccaagtatacagcaaacagcaggaaaacgcaagcaaaaaatcggctgccaaaaggcttcccccacgggggaaggcgtataaattacagctttccctcgatcagcaagtctctgacttccagcagatccttacattttctgtcatacagctgcgcgatctcctccgtcggctgcatcagatccggcaccatcacggtcacacagcccgcggcgcggcccgcgcgcacgccgttaaagctgtcctccagcaccaggcagtcatgcgggtcaaggtgcagctttttcgccgcgaccaaaaaggtgtcgggtgcgggcttgctgtgggcgacctccgtaccggagacaacatcgtggaaataccgcgccgtgccggtggtctgcaaattcatctcgatcatattccgcgggctcgagcttgccacaatgcgcggcaggcccatgtcctccaacgtggccagcagttctttcagaccctttttgcagggtacgccccgggcaaagcactcgtccgccagctgccagatcttgtccagcaccttctgcgggtcgccggggatgtattcggccacatggcggcgcaggttgtcccccgccaggccgcgtcccccggccctaaacttctccatatccgcgggcagcggcagacccagcgcggcgcacgcgggttcccacaaagtatcccacaggcgctcggtgtcaaacatcagcccgtccatatcaaaaataacgccttttaccatcggtgtcatcctttcgcgaaacataattttctctattgtaccgcagtttcggacatgatgcaagaaaaaaggctttccccgcggggctgcgcccgcaggcgcgtgtcggagcgcaaccgccgaaggcggctcttagcgcgtagactgaagctgtcgccgcaggcgactgatgagggcaaagtgtgccactacaacccattcaagggcaatttccgcaaacttgcccctcatccggccctacgggccaccttcccccgcaggggaaggcatttcacttttccaaatacgcacacaccttgtccagcgcctcgcggccctcgcggtggccgcggttgtacaggtccagcagcttgttctcgtcgccctcaaaccggcctatcgtgatcggctcctgcgggcgcacgcagcagatgcgcccgtccgcctccagctcatccagctgatccatcagggtgttgtagcgcagctcctgggtcagcatatcggccagaaacagcggcttatcgccgtaaaagtcgtcgtacaggtccaccatccgctggccgggcatctccttgcggaagcccttctgccgcgtcgtgatgacaacgatcttttcaaagccctcgttcagcgcccagttcagcgcgattgggcaggagcatccgccgtcgaggtacggctgaccatccagcacgacaggcacggatgccagcggcaggctggccgacgcgcgcacggcctcgtcgaacggaaaatccgtctttcccttctcaaagtaggcgggcttgccggtctcgacgttcgtcgccaccgcaatgacccgcataccgccgtgggcgaaggtctcctcgtcgaagggcacttcctttttgacgtcgttcagcataaatttcaggccgaacaggctgccgccgcgcagcgccgccttggggccgaaataccggctgtcgtggcggtagcgcaggttgatgctggcggaccgccccggctggtgggacgcatagttcactgcgttcagtgacccggcagagactccggccaccgccggaaaatagacgtcgttctccataaaggtatccagcacgcccgccgtgaacaacccgcgcagcgagccgccctccaacagcaggatcgaattgtccggtatcgtgattttgctcataaacagcaccccctatttggctattttaccgtataaaatccgcaggtgcaagcaaaaaagcaccgcagttttacacatcgggcaaattgtgctaaaatagagaaaacgctccgagaggatggttgctatggtatcccttcgcggtctcacactgaccgccgcccggccgcgcatcattgtgccgctgtttgcccgcgatccggcagcgctctgccctttggcgaaagccgccagcgccgaccccgccgccgagctggtcgagctgcgtctggacccgctgcccgcggatgaatttctgaacgcgctggcgcttgtgcgcggcatcgtggacaagccgctggtcgtcacgatccgcacccgggccgagggcggtgagcttgccctgacgcccgacgcctacgccgcgcactgccgtgccctgctggcacgcggcggcgtggacgtgctggacattgagtggcgggcctgcggcgcgttccgcgccgagctgcgcgacgccgcccacgccgccggggccgcagcgcttttcagcgagcatcactttgacgccacgcccgccacggatgccatggcggacaccctgaccggcatggccgacgccggagccgacattgccaagctggccgttatgccccgctgtgccgccgacgccgcccgcctgctggaggccacggcccgcgccgccgacgcccgcccgggcacgccgttcatcacaatgagcatgggcccgctgggtgccgtcacccgcttctgcggcggtgccttcggcagctgcgcgaccttcggtgtgacctccggcacctccgccagcgcccccggccagccgcccgcggatctgctgaaggcaaagctgataaccgcgccccccgtaacgcacctgtaatgcgcctctgtaggggccggacatgtccggcccgcggccttcccgcaagcgcccgtccgccgtacaccgccgggccgggcatgcccggcccctacggcactgctacaataaaaaacgcctgtttgccctttgcatcgtagggtggggtcttgaccccaccgcgccgcctcccggaaatacgatttcccgggatggcccccggagcggtcaagaccgctccctacaaagcaatggcaaacaggcgttttcctgttcgcaaaacaaaaaaaaagcgcggccccctttgcctgggggccgcgcgggatgtgctaatgtagcttactcagcctggatagcaccggtggggcaaacgccctcgcaagcgccgcaatcaacgcaggtagctgcatcgacaacagccttgtcctccatggtgattgcgccaacggggcaggtgtcaacacatgcaccgcaagcaacgcactcgctggaaacggtatgagccatcgtgaactccttatctccgtgctgaatctatagtttgtaccctcccggccctgcacggctgctccccgggatggcacacagtcggtttgctctgcctactgcgttgtatttagtgtatcacattacgactgatttggcaagtgccatatcttgaattttttcaacggtaagtcgcaactaactactgctgtagtccgttatttgtcctctttatcagcggggagcggtgtgcgcttgccgccgcggacatagacgcattcgtcgcgcttatagatgcgcggcgccagaatttccacgttggagcgcaccttcagtgtgcccgccaccacgttcacttcaatgaccgtgccctcgccgtccggcgtgcggacaatgctgcccacctgcggcgtgatcgagttcaggtattcatagctcttttgttcataagccaaacagcacatcaggcgtccgcacgacccactgatcttggcggggttcagactcagcccctgctccttcgccatcttgatggacacgggctggaagtttttcaaaaaccggctgcagcagaacggctgaccgcaaagccccaggccgcccagcatcttgctctcatcgcgcacgccgatctggcgcagctcgatgcgggtgtggaactgggacgccaggtccttgaccaactcgcggaagtccacgcggttgtcggccgtgaagtagaacaccagcttgctgcggtccagcgtgtactcggcatcgaccagcttcattttcaggttgtgggcggcaatgcgctgctcacagatatggtacgcctgctgcacatcggcgcggttctggcgcatacggcgcacgtccacggcatccgccacgcggatgaccggcttgacctcgcgggagaagcccggcacctcatgcgcggcgcggacgacctcgccgcattcggtgccgcgggccgtcgtgacgacgacaaagtcgccctccttgatcttgaactcgcccgggtcaaaataatacgcccggccattctctttaaatttaacggatactactttcattggttcggtccttttatatggtcattgtcattttagcattgttgtagggcagaattcctcccctgcgcatgtagggcggcttccccctcgggggaagctgtcagcggccctgaccgctgactgatgagggcggagtttccgcagtcgcccgtcaatgggttgctgccggtaggtttccccctcatccggccctgcgggccgccttcagtctccgcgctaagagccgcctacggcggttgcgctccgacacgcgcctgcgggcgcagcccctcgggggaaggctttttcacgcaatctcccccgccagcacggccacgtttaaccgcagatttccgtttccggtcaggcttttccttgcccgggcgtcggcgttcaaaattttcgccgcgcccgccggggtcagcccgccgcactgctcctgcccgtaggcgtggcggcgcagcacggcgctgcacagctggtccagcgtccacagcagggccgcaaagccgtccttgtcgcgctcgtacttcgtcagcagcgccagcgcgcggtaggtgtcgccctgcgccgcgtagccgcacagcgttttggccatgcccagcgcggctttggccgtcgggtcgttccagcttttcagcgcggtgccgatgtgcccctcatacaaaaacgccagctcctccgccgccttggcgggcagacgctcggcctttaagcgggcggcacagtctgccgcgggcaccggcgcaatcgtgtaggccgcgcaccggctgcggatcgtcggcagcacggtggccgcgctcgtcgccgtcagcaggaacagcaccccctcgggcggctcctcgatgatcttcagcatcgcgttggcggacgacccgttcagattctgcgcgccgtagatgaacagcacgcggcccgccgcgtcggtggacagcgccgagcgctggattgcctcccgcgcctcgcgcacctttttaacggggatctgcccgcttgcaccctcgccctgcagaaccaggcattcggtgtcctcttttttcagcacggcctcggcgtgggggccgccggcagggtacaggtaatcggcagcaagacagcgcgcagcaaagcccgcgccgcagcccggctcccccaccagcaaaaccgcatggggcagccgcccgccgcgcagggccgtgccaagctcggctttcagcgcgtcattgcccgccaggcgctccagcatcacagcttctcgaagcgctcgacgttcgtgaccatgacggtagcgccgccgaccgtgacctccatcggcatcgtgctctcaatgcccaggcccagcgtggccgtgccgggcacgatctcggtgcgctgcttgcagcacttggagatgatgccgatgcagtcatcgacgcgctcgtcatcggtgcagatcagcagcgtcatgttgcccgccatcaggaagccgccggtggtggccagacgggtgacgtagaacttgcttttcagcagctcgttgcagacattcttggaatcctctttattgacgattgcagtgataagcttcatggttatccagcctttctattgatacatcgaatttttcagcggttgcggttttcccagtcgcggcggcgcttccactccttcacggcgttaacgcaccagtcaaagacctcgcggccataaaacgccagaaaacccgccagccccagcacgaggctgaccttgatggcgaagctgcccgtcaaaaagctgaaggcccaaaacgccagctcgatccagcccaggtatttcatcttgaacggaatgacgccaaacagcagcaccatctgatccggccacagccaggtgtaggcgaacagcatgctctggaagatggcgctcggcccggcgtagcctgtcagaaagcagctgacccacgcacccagcatgcccagcgccagaaacagcgtcgtgcggaaatcgccccagacgcgggccagcgcgttgcccagccagtagtagaacagcaggttcagcacgccaaagacgccgcccagccagatgggctggaacaaaaacgtgataaggcgccaaatctgtccgtgcagcacataggtgcggctcagcatcagcagactgccgaaatcgcggttgaagaacagcatgatgatgcctgccgccagctgtccgatcagcagcccgttgatgaggttcgggatgccgaggctgccgtagcggcgttcgagtttatcgatccagttcatgggagaagccctccgttgcatacaaatttacagaatatattatagcaattccgcgcgcaaagtgcaacaattccctgtcgaatcccttgcggcaaaccggaaaatgtgctacgattttatctataacaaggaaacgaggccgaacatgggacgtacatccaccaaagaaaacaaaaacagctaccagcttgcccgcgaggagctgggcctgacccgcgaaaaagccagtgagctgctggaaacgatagcccccgagcgcattgaaaaaattgagaacgaacgcaccgtgccccgccccgacgaggtgctgacgatggccgaaaagtacaagcgcccgtcgctgtgcaactgctactgctcgcagcagtgccctatcggccagcggtacgtaccgtttgtcacgcggcgcgagctgccggccatcatccttgagatgctggcctcgctgaacgcaatgaacagcaagaaggagcgcctgatcgagatcgccgcggacggcaaaatttccaacgacgaaatcgacgatttcatccatatccgtcaggagcttgagcgcatctccctcaccgtggagaccctccagctctggaccgagcgcatgctggccaacggccagatcgacgcggagacgtataaaaggaagctggaggaataaggcatttttaccgcatgatccgtgtctagcgcttccatgcggctgttctcctatcgtcactctgtagaggcggcgtcccccgacgcactgcggcagcttttgtatccacgcttttttgcctctcggtagggtccgggcacgcccggcctgccttctatctctcccccaccagcaaaaatttccctctatttttctctttttctcctgtttctgcaacaattcccgtgctaaaatcgtattacaggttgagggaacacgccctcgcctgaccgcgtacctgcacaaaggagttatagaggatgtttacgctgtttgttctttttgtttttgcctggctgttcgtcaagtctgtcggtttggccttccatgtgacctggggcctggcaaaatttgtcgccacactgctgttcgtgatcgccctgccgctgctggtggttttcgccgtcatcggcgtgctgctgcctctgctgctgcccctggccctcgtggctgccgccttctgcattctgaaaaaggcataaagtacccaaccgccgtgcggcccggagctgcacggcggtttcttgtcattgaggtatcggcgtggtatacttgtggtcagggcgttttgcgcctgctatcatccaacaaagaggtttttcccatgaagctcgtcgtctgttttcccgggatcggctaccactgtgataagccgctgctctactacagccgtaagctggcggcctgcgccgggtacgaccacacccttttgctgcaatacacctaccacaaggacggcctgcgcggcagccccgccgccctgcgcgaggcatttgacaccctgtacgcccaggccgaggcccagctgtccgccgtagattggccgcaatacgacgatgtactgtttctttccaagagcatcggcaccgctgtctccgccgccttcgcccagcgccacggcatcccctgccgccagattctctacacgccgctctccctgacatttgcgcttgccccgcagaatgcccttgcctttttaggcaccgccgacccctggagcgatgcctcctccgtcgttgccgcagcccgcgccaacggcacgccgctctgtctttatgagaacgccaatcattccctggaaaccggcgacgttttgcacgacctggcgaccctgcaggacgtcatgcagaaaacgcagacgttcatcgcagatacaccccactgacattttccctcacgacattttcccacccgcaaagaattgacatttgccccgcaagctgttataataagctgtacaaaatttatgctgtggagcattacccaagaggtcgtaagcgggagcactcgaaagtttgcatccggcaggtcaccttgtccgcaggaaatcccataacggcgggctttatcgggtgtcgcgtacccaacctttcatcgttatcttgcatcgaaatctcgcatttttccaaacgctgtgcgaggcggtgcgataaaaactaaataggcagacgtatcgaagcggtcgtaacgagattgactcgaaatcaatttgacagcaatgtcacgtgggttcgaatcccaccgtctgcgccaaaagcagcaccttgcggggtgctgccttttatttttgcggcaaactatgcaagggctgcaaggtgggattcgaacaacccgtgcccggtgctttgcgtcccgccgggctgcaacagtcctgcggactgttgcaagggcgcgggagaatcccaccgtctgcgccaagtatcaccactcaattctacattgggtagtgattttttgctgccgctttgtaaaattcccgtacttttcttataaacatctccccctttattttcaagtagtgattttcgggttcggtacaaatcataccagcaatcgcggcaaatagctattcacagaactacacaagattcttcccgcagcttgggtacaaattgacagcaaaaaggcggcacctgatttctcagatgccaccgctgttcaaattaccacttctttatgggctgcgcttcgggcagtgtcagcgtgtttgccatcgtccgggcgctcaggttcttggactgcgaatccagatgcgcgtaaatgttggctgtggtggaaatatcgctgtgacccagccactcttgaatctgcttcatcggtacgccctctttcagcaataggctggcacaggagtggcgcaaatcatggaagcgaatcctgcgtaaaccgttttcttttagcaactgcggaaagcctgtcgtcacggaatccggctggatcaggtttcccatcgcatccacaaatacatagccaaggtattcttggttatagcagttgccgcaaattttctggttgtattcctgctgctctttgacggcttttaagcgttcggcaatcgggtcgaccagcggcaaggttcgcagactggattttgttttggctcggtcagcttctaccaaaatcttcttgccatcaatgcgggtgctggtcacgatgtggcggatggtcagcgtcttggcctcaaagtcgatggcctcccaccgcagccccatcacctcggcgcggcgcaagccgtaaaaggctgcaagctggataatcagctccagcttatgcccttgggcgacttcaaagagtttttccatttcctcggcgctgtaatagcttgccatgaacgcctgcggctttgggcggtccacctcgtccaccgggttgctggctatcaggtcgatgcgcacggcgtatttcagcgccttgtgaaggttggcgtggaatcgcaggatagaggtatttttcagcgtttccgcttcgtgcagataaaagctctgaatctggcgcggctgcagtcctgccagcgtaacgcccagcggttcaaagtagggaatgatgtgcttttccacattgaagcaataggatgagtaggtagtctctgttacagcggtccgcatcattttcagccaatagcgcatataatcgctgaatgccatatcggggctgagttcggacacctgacccttgggaatcgtgaagtcctttcgcgtatccgccagcattttttcggcgcgcttcttgttgcccttgacgggcagccccgtgccaatccacggctggcggcgtttccccgccgagtccgtgtaactcagcacgatgtaataaaatccgtttttctcctgtaagcgtcctgctaccataggcatctctccttttttcaagttgctgcatttggggttcggtacaacgataccagcaatcccgccggaaagctattcacagaattgcacaagaaccgtcctgcacattgggtgcaaactgacatcattcgcgctcctgttcgcgtctacggcggcgtggtctgggatgttgcggcattctgttttcccggtccatacggttggattcgcgcgttctttggatgcgcttaattgccccctctgcaattttatcctctttgcggagtttggcaatcttacaggtcagcattacacggcggtctgccagttctggcgatgcatcctttcggcgcatctgcttgacgatttccgcccgctgtgcggcaagggcatctatctgccgggataagcccttgcggtagtccacgatggcctgcaaagacgggaacttgtggtcgtgaacaaaagcgtgttccgcaaggattttctcggtgtctttccagatgcgctccaattccgggcggttgatgtgcggctgctgtttcttgggcaggatacccagctgataacagtaatggagatacaagcgatgtatctgggattctccgaagaatacctcgaagaaaatctggagaacaccttttcccgcatagctatccttggggcgataccgtttcggcgtatattgccggggcggatgtttcaactcatacagccttgacccatacagcagatagtttccccgcagtctgtcatctatggccgcaagagcatattcttctcccagccgataaagccgcacggctcgaccgtcatcccgtgcccgaatcgttgcatgctttcgattggggtcactgccgaaaatatacccttgccgatacagcgctctgtgaaaattctcggcggtgctggcatcctcacaggcttggtcgatggcctcccgcatccgggcgtaccgcgctggttccttggctttgggctgctccaccaccgacaagccgtactcccggcacagcttatcggatgatgcccggaactcggcatactggctgcggcgctgttcgtatttcttcccgtccacataggacacggaatttatcacaaaatgattatgtaagttatccgtattcatatgggtagcgaccagcacttggaaacgcttgccccagaccttgcgggccagtgccacgccaatttcgtggcactgctctggggtgacctcaccttcgcggaagctttggtaggcgtggagcgccaccacgccgtctgttttaccaaagcgctcctgcacagcccgcatatcttcccacgcatggtctgccctgcaatggatgccagtgacgagctgggcgctctcgttcagcttggtcttggcatcattttctgcatagtgcagcgtttgggcaagagcatcgtactcggtcttgtccgggttagccgcataatcaaggacacgctgcagactgtccttgattgcccaaatcttagttaccgccaatgagcaggtcccttatttcatctgcacaggctactattttagtacctgcattcggttgacagctttctgcaatttcatccagtttgtccagcacatcaaatacctccgtgggcggatgcccgcccggctcatatcccagcgcccgctggcgtaagtattccgagagagacagcccgcaacgtttagccatcagcgtcatttttcgtttctctgtgacgctgacgcggacattgatcccaacgctgcgctttctcatgcgctcgcagcctcacaggggttcggggctgtccccgtaggcttttcggcgggttgcccggtggcaacacttcgcccatgcttgctctccttacgcgacctttgtgacgctaatgacgctgatgacgctgtttgtgagatatcccatttgaaaagatgggttatgtcaatgtcagcgtcattagcgtcatctgcgtcatttccgtcatgggagaacttcatctgccgcgcctgcgaggtgcggtgggtttcatagcggatgcctcttggcgtgaacaccgtatcgaagtgttccacgattttccgggtcagctggtggggcaaaacgccctcaatatcggctgcagaaagcagttcggtagccgtaccttgccatgttccgacactatcgatgtagtcagccactttccaaaggtaactcggcacagccttggcgacaatctgttcggtgctttcttcctcgtccagcatccaaacgcagttttcttcgtgcagacgcagtgttttgttgtccatgtcgcgcccggtcaccaaaatgctagcggtctggctcatgcgtttgcgctgcatgacccagctggtatcggacgcccccatcagaccattggaacctgcaatctgctggaacggatcgtctgcggtttgtttgcgcagatggtggatcagcaaaatgcagacattatacttgtccgccaatgctttcaacgcgctgatttccttgtaatcgctggcatacatactgttattctggtcgctggaacgcaccttttgcaaggtgtcgatgacaatcagcccggtgtccgggtgctgatagaggaagctggtgagctgttcctccagcccctgcccgatgctgctgcattccgtctgcatgaccagccgttcgggggcttcttcgctgcccacaagctggagaaggcgcttctgcaggcggttaaaggtatcctccagcgatagataaagcacggtgtgcggctctatttcgcgccccccacatgggcttgccctgcgcgacccgcaagcaccgccacaaagtcagccagcttttgtccgctttgctggggccggcaaacagcgccagccctgccggaagtaaatcaggaatgatccacttgaccggcggcagtggcgtggagaggagttcttcggcagagatcgttttgggaagcttttcataattcattcgcatcgtcctttctgttttggcatatatctattatctcatactatcgtctttttgtgtgtagtaagttttattctccagtgttaagttgtacggctcacgccgccccatagccccacaagcgcgccaaacggcgggcgcttcggctgtttcgtatccgtgtgctgcgtgtgacatctgccccacacagggcagatttgggcggttactgcgagtgaatcagaactgattcacttttatgccttacgctctggaaagtgaatcaaatctgattcactcccaataaattccccgaaagtatacggttctgattccctacttttattagactggaaaacgtgaatcggtttcgcatactttcgggataacttttcgatttacagctgcatttgtccactttgccccagctgcggggacgacttgcaaggctgccgttcggctgcaacggcatcatgggtatttttaccccagccaggttctctgcctgccgccctcattgtgtgaactgtgactggacggaagtatctttacgaccacatctgtcattgcgctccactccgccacggggtgtttatcagagattgaatcgctcgtgcccggtggcagtcatggcgcgtactctgtctgcgctgccgtactcgtaagttgacggcaatgcggtgaatgtaccttgcttgtcggatatgcagttttcaaggtgccgaatctatttgagacggggaggtgctcttaccagaatcaaggcagctcctacgcgctcacgcgggtctgaccgcacggacgcttcagaacatagtcaatgacattgattttggggattttgtaggcgtttgccagccggatgcagctgatctcgccctctcccagcaggtcataggccgcgtggcggctgatgcccagcatggcttgcagatccttgaccgttacaatgtcggggtactccgcaaacatgagcttgtacatttctctgatttctttacaatccattcgatcaccatccttgaattttgactttcgcatatttgcgatgtaaatataggatactgcgcttttatgcgaatgtcaatagttttcgcaaaattgttgcttttttcttgcgcttttatgttatggtgtggtacaataaggaaaatcctgcaaagagagtgaacgaaatgaacatcggagagaaaatcaagcgcatccgccagcaccgccgcatgacccagaaagagttgggcgagttggttgacctcagcgcaaaccgcattgcgcaatacgaaatgggttaccgtgtaccaaaaaagcccctgctaaatcagatagcagaggctttgcgtgtttccccgttggcactttccgatggtggaaacggcccggcgaatgatattctggagcagcttttctggctggacgaggagcagcccggcgttatcaagctggtgcccaccgagcgcggcacagcgcggtataacgctaacccaaaccttgcgctgcactatgatgacaacgacaactggccgccgcgctccccggtagccatgtggttcgatgatacgattttggatgatttcctaaaggattgggctgcgattcagaaaaagttgtatgcgggggagattacacaagcagagtattttgagtggaagattatgtggccagaaacataagctgtggtctagaaacagagcgaatatcaatttcagcttgtcgaaaaaggtcactgttctgtcaagtgtttttgacaacttttttgattgaaatttagaactcaccttcaagagtaaagccttgtgttgtagtacccggttttgatgccatcacgtccttaataattagcgcttttacaagttgtttgatatgagggactttaccttggtatgcaacaaagttcattatctacggagaaagctcctgtgcacgttgccttatgagataaggcagcactgcggcgacctgccgccaatagggcatttaatcatctacccattccatatcttgttcagcattccaaaaagactttccattccagattttagcttctaagaatgcttcaaccggatactgtgttgcattccctttccaaacatacttttccccattatcggtcatttcgtataagcagagatcaagactgccgctattagtccagccctctaaaaagtatttttttcctccatagagaaaccaaagttcatctccataatgaatgtgatcgacaaactcacgcacatcaccatttttcaattttaggcacccccttaaaaaactttttgtatttctcgtattcctgctttgtaatccggcgggcaggacgtatccgaaaattatcctgttgcggatactcatgaacatgaaggatattttcggttcgatttccgttgttcaaattcggctcagggtgatatgcaatttccataatcaaatagtgatgttcgtcatagaatcgcatttcatggaatgtaccatccggcttgagcttgatataggcaacgctcgaatgagattcttcaggtaatccatgtttccctgatgttccttgcaatacttttacgccatcaatcgttccaacggtttcataactataaggaacagtatttccgatggcaaaagttccacgtccacccatattagcgcaccacctttcgagaagaacggtagtccacggtgacaacatttccttgcatttctggaaacggcgttccaaaacaaataaccatttcggggtggattttttcctgcatagcataatatccacgcatgaagttaagccgattctgcttacagccaatcattccaacggcaacgatggagttttcctctacgccatcgaagcagaagtcgtaactactcggcgtactccagcttattgtgggaatgacggttaatcctttgctttgccaataagcaccgcaccatctgttttttgcaacgctttccatctgacgccacaagctcatatctgcgtaagtagaaaaatccggcgtcagaagaaaagcatattgggcgtattttgccaaagacttttcggggttattataaataccattaaatctgtaatcatcaacgaaaaaatgaacgccattttgtgtgttcgcggaaaaatcatttgctttcgtgtcagaacaggctatcagtgacaggttgtcaacgttaagctcctgcttccttactaatggaatattccatttcccacgaccagcgtactcgttgcgcataaacagttggtcgctgcgcatacatttgcttgtgttagtaatcataacaagcatcccttcccctccatttggaggaatattgtgttaaacaattcacttttgtacaatttgcgaattgcgccaacggaaaggatatgctatactcatcttggtttaggaatgcgaatagcatatccgttcatgaaacgtattagattgctgctgcaacagctttttaatacgtttcattttttcacactcaatggaaccacctccctaacttgccaaatcaaagagacgaagaagctgacattcatacgctgtataatccctaccgccaaatctcagccacttttggtaatagctgtaagcataacaggccgcttcatagcttatttcaaacgtctgcgcgatgctttcgggattatccagcttcagcttatggattagaactggcggagcaagtgcatacttggcaaaaaatccgacttctttttccgccagttcactatcctccgaatgatccagtacgatatgcccaatctcgtgcatcatcgtatggtttacacgtccatagtctttctcatcgttgtagtatatgtaccattgcccatagtctttttctagagaaaacccatcttcgcttttcttgatgagaagccagcgcttacttgctgcaatggcagagtagggaacgactttgacacccattttatgtgcaatttcaaagccattaatgggaacgcaggataccccatactctacaaacattctgacaacgatacgcttgatttcttcgtatctttgatttgatagtttaattgccaagacttaatcctccccgaacagtgcgtcaatcagcgctttcttttcctgctccgtcatagaagaagcatttcttgcaattacacggcgaacttggtgatagttgaacacatcattctcaattcccaaaagataatcggacgttgtgtgtaatgcagttgccatattagcaattacgtcaggctttggttctcttgttccggcaatataccgtgacatagcggcttctgtgataccgattctctcagccagttccttctgctgaattccccgtttctgaagcatctcggatattctctctcctagtgccttgcccatagtatttcctcctatcgtcaggcttcactttatcagcctgattatattatatgcacgacttgccaaattgtcaagtcgtgttaccgatttgaaatgattttaagagctagtaatatgtctgctggaaactatcaaataccttttttgctcatagcaggagatagagaaaagaaaaacgcccaatatctcccgaatctgttcgctttcggggcgattttggacgtttttatttgatatgaggggctttatagcagtagggaatataacttgttgtgtgccagcaaaaacgcttgtgtgccttttatttcttcgaattcactttcagctcggctgacaggataaaatcagccatcgtcatcgcggaatttacaaaaagacgtgcatggtgttcttcaatagatattcggtttgcgcctacaccgtgagcatcactatccttgtttcgcatttcggcaatggcggacacaatattattcaatccagaaagcaatgtgttaatccgcctatctgtattgggatctgtatgcatattgtagagcgtcttgacttgcttgaacaattttcccatatctccgctatcagaaggtgtttcgcctttcttttcgatgacataacaaaagacttcttctaaaagcgttcttgattttgtaattgcgctgtcaaagtttccttgctccacatcttccatcgctctggcggaaatgctttttatgtactctctgtctattgctttgatttttggggtttcgacttcgaccttgcttccaatcgggcgcaccacatactgtttacccacaacagcaagttcatttccaccaaaatatagtatgccgtttattttattgataactgtgcttacaatatggtcatataccgcattgatttcgtttacgctatacccttcgagtatctttgcaaattgcccttttccgaataaatacgccagaagatcggaaaagtttccattgtctatgcaatgctccatcaagttgtcgagatactgccatcgactcaaagcacctcctccccacgaatatgtaacgggcaacccgaaagtcgtagatatgccgcaaagatccggaccactaaggcgtggcattgccactcttatctccgtgccatcttcgaatttatatgtaccatactcggtatcgccatctaaaatagcaatgatttctttcgtccttagtaatccataaagattgctatcttccaacgatagtcacctctgatctgcttacttcttcaactgcgcttgcagttcttggaagctctccaaggcgctttgcaggttttcgatgatgtctgcggccagctcgtccggctccggcaggttatccagatcggcaagggatttatccttaatccagaacaggtcaaggctggtcttgtcgcgctccaagatgtccttcacgtcaaacttgcggaagcgtccgtctgggttggtttccgaccatgtttctgtgcgctcgtgacggttcagcggattatagcactttacaaaatccgcaaggtcagcatcggtcatggggtgttgcttcagtgtgaagtggatattggtgcggaaatcatatacccaaatttccttggtctgcgtttccggactggcagggcgcttatcaaagaaaatgacgtttgctttgacacccggcctgtaaaaaataccagtcggcaggcggagaatggtgtgcaaatcggtcgtttccagcagctttcggcgcacaatctcgcccgcaccgccctcaaacagcacattgtccggtacaactaccgccgctttgccggtagctttcagaatcgtgttgatgtgctgcacgaagttcaactgtttgttggaactggttgtccagaaatcttggcggttataaacgaggtcttcttcctcctgctcgccctcctcgttggtaaaggtgagggtggactttttaccaaagggcggattggtcagaacataatccacacggtagccggggtcggtcaaaagggcatcgccaagcgtgacgggcacagtgccgtaaatatcaccgatattgtgcagatacaggttcattaaggccgtcttataggtggcaggaacaatctcattcccgaagaaggtttcgcttttcaaaaactctttctgttcgcggtcaagcgtatagttttcgctgtcggcaataaactcctgtgcagcgaggaagaagccgccagaaccacagcaggggtctgcaatagttttcatgggttcggggcgcagacatttcaccattgcgcggatcagcgggcgcggggtgaaatactgtcctgcaccgcttttgatgtcctcggcgttcttttgcagcaaaccctcatagatttcgcccttgacgtcagaggacattgccacccatgtttctttgccaatcatctgcaccacacggtacaaaatggcggcattgttgattttgttggtagcacctttgaaaattttgccaagaataccgccttgctcgcccagcttttccaaagtggctttgtactgctcttccagctccgcacctttaaggtcgctcatatttgcccatgtgaaacctttggggataccgctatctcttttgtaaggcggtttggaatactcgtccgccatttttagaaaaatcagataggtaatctgttccaaatagtcaccgtaggaaacaccatcatcgcgcagcgggccgcacattccccaaacctttgaaacgatattcgatgtttgttcactcatttacataattctccttcaaaggcttttttcaaaatgctctggcgcatagcttctgcctgtgcaagcgcagtgtttacggttcgctcaatgctgtcacaaacggaaaggcgtgaagctatcttcttaacaatttcctcttgtttatcaagagatggaacaggaattagcatcttactatatccactcacattgaagtgtttctgcccaactccacgttttttttcgtttacaaatttctttccaagtggcgaattagtatatgcgcacaaaaattctggtaaaaccaaatcccggttagggacagcaattaaaatatcaattgcattacatccgttaaattgttctggaacaacacaagctgttcccggataacccgatcggacaattaaaatatcccccgtatgcacaatagatcgcgcatttgcttgatgtccagctattgataaatacgcccagtttttgtcttccacatggaactctctgacatttgccgaacggaaagccttaattcctacttgttcatctgtataatattgagatggctttatgacaatacccaccttgatttctttgcaaacatctttcactgtatatggttgacctttgatgccattgagagcttctttcaacactgcctgtcggtacactgccagttgctctttaatggtttgcagcgtttccacacccttgtccagttcggagaatagttcttcgatgcaggaaacaatgcgttgttgttcatctttagagatgtctggaatttcaattctttttagttgggcttgagtcaattttagacgtgttgttccagatacatagctgttatagtcaaaatagttcaagtaataacataaaaacttattgtttgactttgattggagtatatgggcgtgattgtttacccatgcttttcctgaaataatatacgctttagatgcaaacggatttagaaaaggcgcgccgtcttcaccaagaagtacatattcgccatctgttaaatagtcatctatataccctacttgacccgttgcaccatagtaaggaaaaagggactcgtttaactttccctcaatcctttttgcacgttccttgctatttacaggctttctcaattcatcacatatattggctaccttttcaagtggaacgtaactccacattttttcctccttatgccaccaacgcgacattcatttcctgcaatatctgctcatagttatcgccaaacgcatcgtagaagcccagcaaaccacccttgcggtcaaacggcgtcaagtccaaatcctccggcaagatgctaagagaagcggcaatatggtctttaatcagacgcagccattccatctgttcctcggtaaactggatatgtccggcgttcttcttgaatgtccactgcatgaagttatagttcaccttgtccgcaaacggggtgagggtatcggtgtagcccatctcaaagcggatgatcgaaatcagatcggtaagctgtgccattgtgccgcgcttgaccttactcggctgcttgatggcatagcaatcccacaggcgctccaccgtaatgccgtgcgtctttagcttttcgtatagctcttttaatttttctaccaccatcgggcggtctttgtaggccgcgtcataaataatgcgcagcgcaacaatctcgtttttattttcctcaataaatgtgcggaagctggaaagcaccttgtttacgttttcttcctgctgcgcatcaaatccggcgaaaatgaccgaatccagattaacattatcaataatttgctcgtggctgcggcgcacattctcgatgtaatcccgaatgtccgggtcgtggaacggcgcaacggcggcttgtaccagttctttctgcgcggattttatctgttcctcggttggggtcggcacacccgtgtttttctgcgcctgtgcaagaatcacatcttcgtcaaaagcgttcagcagcttttccgccacgctgcccgccgatgcacctacttttgtttcaaactgctttctttccgcagtagacatctgactattcaagcgaataacacggtttgcaagggaagtcagcgtgttttcgtcctttgcccccaacgctacgttcagcatcagttctttcatgctgacagtcggtttgcgttccaagggtcttgtgtcggacttcttggattttgtcacgcccacagcatctacaataacaaaatggtctttattctcggttgcggacggtgtgactttctgaagatcctctttgctgaggacgcgcgtgccgcggcctttcatctgctcaaagtagttcttgctccgcacatcgcgcataaaaatcagacattcgatgggcttcacatcagttcccgttgcaatcatatccacggtgacggcaatgcggggattgtagtcattgcggaacgagctgaggacagactccgggttatccgcagagtaggtgattttacgacagaagtcgttgccctcgccaaattcctcgcgcacaatctgtacaatatcgtctgcatggctgtcggtcttggcaaaaatcagcgtcttgggaacttcttttctgcgcgggaacagcgtggtaaataggttctccttgaatgtgcggataactgttcgaatctggctgggattgacaatatcccggtcaagctgcgagggtgcatagtttacatcttcgtccatctgccgccagcgcttggctctagataggcggtcacggtattcgatcaactgcttcatcaagaagccgccattcttgccgacctgcgtttcgatcaagaaaatatcctcacccacattgacgccgtccacgattgcctgctcacgaggatattcgctgacgatattttcattgaaaaatgcaaaggtacggttgtccggcgttgctgtcagaccaacaataaaggcatcaaaataggtcagcacttggctccagacattgtaaatggagcgatggcactcgtcaacaataatgcaatcgaagaactccggcggatatttcgcgttataaacgacttctttgggcgctttgctctctgcggtcacatactcggcaaagggtgtttcctcggctttttcatccaaggtttcaccctttaggatagagtacattcgctgaatggtgcaaatacaaatttgaacgtcgttcggaatatacgaggatttcagcctgcgcacaccgtaaatctgcgaaaacgagcgcggatcgtcattgggcatataggcaaggaattcacgctcggcctgttcgcccaagcctttggtatcgacaagaaagaggatccgcttcatcttgccatacttcagcagacggtaagcagccgttatcgcggtaaaggtcttgcccgcacctgttgccatctgtaccagcgccttggggcggttatccgcaaaggactgatccaagttgttgatggcgttaatctggcacttgcggaagccactggtgtccagcggtgggaagtgcttcatattgttccgaatggtatcgggctgccttagcaaatcccgcagcgtttccgggcgatggaacgagaacacggttctggaacggtacttgatgtccttataatcggtaaaacgaatgattttgtccgttgcttcataggcaaaccgaatggcatactcgttctttatccatttgaaggtgctgttggcatagcgacccgactgcacttccacgtccgtgatatgctctccggcttcttcgcgtttggcttcgactacgcccacgggcttaccatcaacaaaaagggcataatcgacctcacccgtactggtggggaactcacgaacagccacaccaagagaagcggagagatttagccgtttcatgtcttgaatcacccagccggattgattcagcttttcatcaatcgcaagacgcgccttttcttccggggtcatgttcttcgtcatccctttcgtctatatactccataatgtcaccgtaatcgacattaagtgtgctgcatattttcccaaggactgtaagcgtgacttcttcatctctgcggagtttggtcattgtgtttggtgcaacgccggaggctttccgcaaatcggctttgctcatttttctatcgactaatagtttccataaacggttatacgaaacagccataacaccctcctgcgtatactttattatgattataccattccttgccgcacctcgcaagagtgtgcgaaagtttagcaaagcaagccgaggacaagactgttcagcttatgtagagcttagttaaaatcgaccttgaaaatagtacaagaatgaattaaaattaacaataaaataagtagataggacgtgctcaaatgggtctattcgagattctaaagggtgaacagcccggtttaataaaatctcttttgcactatgagaacgtagggcagtatggtgagtatcttacagagtatgccctgcttagccgcagcatggaaggatattacgttgtattgaaaaacttgtatctgccaatgaagggcaaaaccactgaaatcgatttgctgatgattcacgaaaaaggcattttcgtttttgagagcaaaaactacagcggtttgatttttggcagcgaagatcagctaaagtggacacaatgtttcaaaagcggtcagcgcgaacatttttacaatcctataaagcaaaatcgtacacatattagggctttggcgattttcctcaatatgccagaagatgccttttcttcctatattgtgttttcggaacgatgcgaactgaaaaagattccgctattcgttgatggagatgtaaccattctccaaagacagaatatgctatactttttgaagcggcgcttgaaggacgcgccgattatttattctcacgaggatattgaacaagtggttgggctactggagccgttcacagaggtttctcaagaagaaaaacaacagcatattgaggatttacagaccaagtgtccatactgtggtaagccattggttctgcgcaatggaaaatacggtcagttttggggatgcagtgcctatccaaaatgccgttttacacgcaaggctgaatagcctatctatctgttgcacaagaggattcagcttttataatctgcacccattggtggtccccagccatacgcccattggtcttttcaataattagcagtgggtcaaaaaaggaacatccatctcccggaggatacctttcagaccggctcggctggcgggcaggcatctttctttcaaaaattcttcaaaatctgcccagaacggattttctacaacgccaaacgcccgcaaagggattcggtcggtgtagttcttcatgcggacaacttcgtgcttgaaatcaatgtcgatgactgtacatagctgctgaccattcataaagttcatccgcatggtgaaatccgggtccgtgctgaaatgctcggcgttatagatatacttatatatggtctggcgcgacacaccgaactgttttgcaatctcagtgttgccgatgccttttctatgcagttccaaaacctctacgatctggtcgggggtaagctgcgccttgcgacccgcattgcgcggatttggatgattgattttcagcatctttgcaagttctcgcaattcatccaaatcagatgtgccaaaaatttcttttatttgctgttggtaatcaatcggcatacagtctggatataaaatcaggcctgtggactttgctatattttcaaattgatgcagttcaaatcttggagttcaaatactttacaagttcccaaaccgttgtcagcgggttgctctgccgtgaaatcggctcaatgccttggctccgaacctgttcggtacgagctttcgctctctgaattgcaacggcctgcaaaggcttcaaaacgtcaaagtaatccttgttcttctcatagtcggggattctgttcggctgtttcagcatgcgaatcagtgcctgacaatcttcgacctctacttgctgatttataaagtgcagcaggaaccacaactcgaaggatggattggagtaggccagatgatagccctccttttgggcggattgcttggcacgcagaagtacctcattggaattatcgtcacggtcaaagacacaccagatagaatcgccttcatcgggatagtaaggattattgcccatggtagctttggctttctgcacaagcctgtcagcagacttatactgggaagaaatcggaatgatgtcgatgttgcagccccgactacggaaacgcttgaaataccggatctcggtttcactgccctcgcagatgagatacaccaccggattgcgctttctggtgtgggcagacttgcggctgatctcttttattctgcccatgctgcattccctccaatgaacggaatcgcgccgtagcggccttgcagataccctttggagatgttctcacccttccggggagagaactcggtcagagcgtaaatatcggtctgcatggtattttcatctttctctgcaaaccagatttgatcacgccgaagcaaagttaggtcgagaagcccggtgtcgtgtgtcgtgaagatgagttgtgtatggttcgtattgatggcggcatcctgcatcatttcgatcaagtgccgggtcaggagtgggtgcatactggattcaatctcgtctaccaccagaacagacccggattccagagcagcgagccacataccgatgcgagaaaagaatcgctgtgttccaacggattcctgccccaacggaagccagaagcccttggatgtgccatcttcagtgtcgagagtgtgtagtgcagaaatgataggttcttccttggaaccagtgatgcggatgtctttgatgcctagatcggcatacagcatttcatgcaggatacggctcttttcggagccgcccagccggatggcagacagagcggcatccagccgcatttctgttcccatgaaacctgtcagcttttcaaagaaccacagatacgctttttcggtttgcagacagttccactcgttcgagctggacagatacagacgattttcggcagttcgtccagcaagcgtgaactgctcttgaatgttctcgcggaactgatagtcattgttttctctggaaaaaatcagtgcttcccggccattaggccagtgatagagatattcggttaagattctggacttgtcaaacgagaacccataggcatacttgatgccgccatagaaatagatagcttcaaagctggtcggctgtgtaggttggtctgtgaaagcaaacggttcctgcggaagcggttcgcccttcagcaacttggcatatcggccacagaccatttcccgcatgagcaggagtgcatggaggacattgctctttcccgctgcatttgcgccgtacagtgccagcactggaacaagctgtttcttctcgtccggtgaaatcaggcagtcgaccagacttttatctgtggatgcttttaagctgatgatggctgtatccttgatggaacggtggttggtgactgaaaattgtagcagcatcgcaattcctcccagatggttttctgaatccagtgtactctattctaggcggaaagtcaaatcttaatttcaatatttgtagatatttttcaaaaatcgagaataaaattaaaatatcagctttttatacggttctagtactattagagtttattctgcatatacaatctccctcaccaccacttcctccgcccattccagtttaagaacattcttgaattccgtccgacaaaaacgtattttctagttcgaaagacagttatttactattttgacgttcgatagctacattatatccaccgcattttcattttaactgctttcccttgggtgtatggttcagcgtttcttgtggctcaaatttgcttaaatcaattgtttctatagtttcctccctacacagcggtattatggatcacctgcacccattggtgatccccagccatgcgcccattggtcttttcgataatcagtaacgggtcaaaaaaaggaacccccatctcccagagagtgtccttcagaccggctcggctggcgggtaggcatctttctttcaagaattcctcgaaatctgcccaagacggattttctacaacgccaaacgcccgcaaagggattcggtcggtgtagttcttca

SEQ ID NO: 29 - DNA, 298382 bp, Gemmiger formicilis
  source 1..298382: mol_type = genomic DNA
ggtgtctggatgcgggcatctctccgcagcagttctatgatgctgacgaaaaataccgcaaagcctacaaggccagagccgcgccggtccctaagaaacacgctcccgaacgctaaccaagcccgctgcaccgcgcagcgggctttttcttttgcaacaaaaggagaaattcttatgaagaacaaacacagaataaagcagggcttgtcgctgctgctggcgggtggaattgcgctcacaaatctgggcgcagcgctgcccgcctttgcagaggatgcccctgccacgccggagacagccgaagcggtcacccccgaaactgccgaagcagacaccgtggcaccaaaccttgtgcagattaccgagaatctttacaacgatctgccggacgcgcctantctgggcgcagcgctgcccgcctttgcagaggatgcccctgccacgccggagacagccgaagcggtcacccccgaaactgccgaagcagacaccgtggcaccaaaccttgtgcagattaccgagaatctttacaacgatctgccggacgcgcctaccggcagttaccttggcagcatgggtctgcccgtggcaaccggcgaaacaaaaatcagtatctccgcgtgggtttctgacctgtatgacggcgtagatgcccatatggatgccgatgcgctgaacgcagatgagaacacggtcacaatcncggcagttaccttggcagcatgggtctgcccgtggcaaccggcgaaacaaaaatcagtatctccgcgtgggtttctgacctgtatgacggcgtagatgcccatatggatgccgatgcgctgaacgcagatgagaacacggtcacaatcggcaaaacccccggcacagactatgccattgttccgctgttggcgcaggtcgaatacccggcagacggtgcggtatccgaaatcatactgccggatggtgtagagcttttaagctatctctccaccgattatgagcctatcccggcagacgagcaggagcagactgaaatcctgcaccagacatactcggagcagtcagcggcagccaccggcctgtatgtaaaagcctctgccgattttacggcgcagctggtctatacggattcggacggcagttcgcagtcaaaatctatccatgtacagatcagcgaggatgccgcacccacacagatgtatgccgacaccggcgatgacggcattgccgcctatgctgcagggccgactccgccgtatgccaccggaaaaatcacaagcatcgccaaagagggcggcacatggctgatttggttcaacggtcaggaagcctactgctgcagccacggcctgaacggccagcccaagggctgccccacctacagtttctctcatgtgtcccgccttgaacccggccagtatacccccggcaaccactatgcaaatcaggtcaacatctggggcggtcttggtcagctgagtctggatatgctggatgatcgtcctgttgtggcaagccttgaagatgatcctgaaggctgtgaagaacagccggacacccttggcagtctttacgatgaaacccagcagtggatcatggaaaactatcccgacagctacgcggcgcagacctatattgctgctgcagaagaactcctaaacggtacagatgcacagtccggggaaaacggctactacacctacatctataacccgcccgcagggtatgcgtggcaggttgtggcgctggtcggtgaagaaattgcgggcggcactgagatcccggatgtgccgagtgttccggaaccgaagtattattccgctgcgtggacagctcccgcccagactgccggcggcagctttgatctgacattcactgtcaacaccgacaaggttcagctgaacacgctggaaaaggtggacggggcggtcattaccgtcacgcccagccggaccggcggcagcgtggacggcggcagctggcagatgagtcctaccgcagcgcagaccattaccacaagcggtcacacgcaggatgacagttttcacctcaacggcggcgatggttctgccacatggacggttcactacgaggtgtccaagaccagcaccagtacgctttccgggcaggaaggaccgttcaccagccaagccgaaacagacgctgctgccgaagctgccaagaacgcggccattgggcagctgcagaacgaagcgcagggcatggtagatgccgctatcgcctcggcgcgggcgcagcttgccaatattacattcagctatgacgaggtcaccatcccgcacggctttgattccacgcccggtgcgctgggcagccaccagaccattacggttcctgccaacagctcgaacgattacccgatgaaaaacgatgagtggtcggtaaaagtcagcattgacaaaatcgacagtgaaaccaagcagcgcatcaagggcaatgccgagtttaagatttttgagtgggacaccgttcggcagtgctatatccccaatggtgggtataaccaatacaaggttgaacgccagagtggcggcacttataaggtcatcaaccacagtgactatacgggcggttcggatgatttgttctacacccaacgcaacgagggcaagtttgtcatcgtggagagccgcgcgcccagcgggtattacggcgattggacggatgtaaacgctccccgcacggcaggctctgtgctgggcaagcgggcgtatgcctttgaaattaccaaatcactggacgcccagacgatttggctgggcaacgccgattataacgctgacatcagcacgaccaacagcggcggcacccttatcgacaccggcgagggcatcgtcactatcacctttggcagccgcaaggcagataagacctacgnnnnnnnnnnnnnnnnnnnnnnnnnnnnnnnnnnnnnnnnnnnnnnnnnnnnnnnnnnnngatgcagaacgaccgtgtcctcggcaatattctgctgacgaaagtggatctggacgccgcgcggtatctggctgcgagcagaaacggagatactacgctggaaggtgctgtgtacgatctgtacgccgccgagaatatcacgcacccggacggcgtgaccggcattgtggactacagcaaaatcacggatgtcaacggtcangaaacggagatactacgctggaaggtgctgtgtacgatctgtacgccgccgagaatatcacgcacccggacggcgtgaccggcattgtggactacagcaaaatcacggatgtcaacggtcagcccatctggcataccactgtcctcaccaacggcagctgggataccgattacctgcccattttgcagaaagaccggctggtagcctctgccaaaatcacagacggaaagctagcttttgccaacctgtacatgggccgctactatctggtcgagcgtgccaccgggctggtactgcccattgacggaaacggcaagctgtatgttaccgggaagtatccgcttttgaacaaaaagctcgaacgcacaggcaagtatagcaatttagctcggaagaataatgaatataccgattacatctacaaaaatcagtattctgctgtgtccgagagccgcaagctgaacggcagcaaggcgtgggatggctattatctttcctacgcgaaaggttacctctgcgatgaggtcaaccactacaaaacgctgacctatacagatgaatcgacctaccacatccacgccgaacaggaaagccaagacgaagtgctgaaatccggctttagtttgcagaagttggtttcgaccaccggtcagccaagcccggcactgaagctggagggggcgggctttaccgtttaccgcatttccaaactgagcaaggccgcgcagttcaaacagaacccggatggcagctacgatgccgccagcatcctgtccgcctaccgcaaagacaattacgataacgccacactaatgccgctagaataaggaaccttgagggaaacacattacgaactaccgttcgcggaaaattaagaatctggagtgaaacaaacttgataaaaagaacgctttatggtaagatagagacaaagaacaagaagtaaaaaggggaggtgtacatcaatgggattagctgatacggtcacaaaagcctacatgaaagaaaataccgtgtttgcggatgcattcaactatctgatttatggcggtaaggcagttgttgatcctgcgcagttgcaagaattggacacaacagaaatagcattgccgtttggtgcgcaggacgagaacggaaaccagacagctgatgcggtacaaaaataccgcgatgtgctgaaatcggcagtaattaagcaggatgacgaagcggcttatatccttttgggtatcgaaaaccaaacggatatccactatgcaatgccggtacgcaacattgtttatgatgcgctccagtatggtaagcaggttgcggatatagcagcaaagcatcgcaccgatggttcgaaaggacacagccggggagagtacctgtctgggttctataaggatgataaaatcacaccggtcattacattggtactgcacttcggcgcaaacgaatgggatggcccgctgtcgctccacgagatgatggcggtcaagaatgagaatctgctgaactttgtgcaggattatcagattcacttgattgatccggcaaaactgagcaaagaggacttggaaaaattctcgacaagtctccgagaggtaatcgggtacatcaagtattccaaagataaaaaacgattaactgaatttttgaccgataatccacgtatgcttatggaagcgaacgcggcgcgagtaatcaaagcggtaacgaacacacctctggacattccagaggacgcggaggtgattgatgtgtgcaaagcagttgaggatatgatgaacgaaagtaaaaccgaaggtgcggttactgttcttgcggggcttgtcaaggatggtctactgagcatcaaagaggctgcacaccgtgccaatatgacagaaagtgcatttgaagcagaagtgaagaagttgacttgataaaacagaagcaagtaagggcatttttacaagattgttttgaattctaaaattggaggtgaatccagtggatttgaatattaagatccaaaacattaagtgcataaaaaatcttgagatttcatttccgcttgaaagtggcatatatgcaattaccggtgagaacggatcaggaaagagcactttgattgcatgtgcatccaccattttctaccagatgaaaatgtatgactattttggaagacctaaaaatgggttgatccagtttacaatcggcgatgcaacaagagggtgggaatataaagggcggtcatggagacaattgcctacttcgcataaaatggtcttaaatggtttctatgaaggtagtatcatttttggcaatcgatttaaagatacaaatttttcggtgattcgtatattggatagattgtctgagtcggatattattccggcagatgacttcgttaagtcgaatctgggaatgattctgcacaatgacaatgcttattttaaaagcctatttatacttaaaaaagatgttgcacaaaaaagcggtttgacaagcgatccgtacttttttaaaacggatgaaggggtgctagttagtcaggctagaatgtcgacgggagaaaatttgctgattagcattctgcactcgttgaaaattttatatgataaaagagcgcttcatcacgacgcgcgtccgtacattgtttttcttgatgaaattgaacttgcattgcattcttcggcgctaaggcgcttggtgcttttccttaaagatatatcagaatcccttgggttaaccattttcttttctacgcattcaatcgaattactccgcgaaatacgtccgcaaaatatttattatttgcagcataatgttgacgactcgatttctattacaaatccgtgctaccctgcatatgcaacaagaaatctgtatagtgatgatgggtacggaaatgatttagtcattttggttgaagatgatttggctaaaatgattgtggaaaagattatgctggaaaagcatttgctgaaaaacattcgcattaaggtactaccaactggcggttggacaaatactttgacgatggcatatgatatattgtcatcaaatttacttttgaaaggtacgcgattggcaattgtactggatagagacgtaaaggatgctgttcctaattttatgtccacgcacaaagaatgtaaaggattgaagatagactatttgccgattagcagtctggaaaagtatcttcgcgcaaatctatatacgaccgtagatagcgattttctgtctttactcgatacgtatttgtttcagaaaagaccattggcagagatacttcgactgtataaaaaagaaaataaaaaggaagataatgatggcaaaatactttatggatatttgttaaatgagttgagaggaatgcgaagagatcgggatgacctcgtcgatattgttgtaaaatatatattggaacatgaagcgggcaacatcgaagcgcttagtacatatttaaaaggtaaaatagactcgtaaaagtatagaaattcaagtaaaaaagagtattgtaatagggtatctcttttgtcacactcacacataagactgtgataaaaaagatgccacagccttttttctttgctgtatcgtcgaaaatcggcaatttcgccaaccaatttttggacacggttttacagtgttgtccagccatttttgggcggtttgcccaccttgatgcccactttttctgccgctttctggaatttggcaggggagtgggcaatctttttgagaaaaaacagaataaatcctgctattttcagaatgttttcaatttcctcgcagctgatttctcgttggctgcggggattttttattttttccgacagttttcagtttgttttcaggttttccattttatacctattataacaaggaggatttccactatgagcatcattatcggcatcgaccacggttactacgccatcaagacggcgcactgctcattcccggcaaggcttacaagctacggtgaacatgaaccctgcggttgcttatctttcactatctttctgtgtcttatagcagatttaagcgacaaataagcgacaagccacaagttacagtgctatgaaagtgcataaaactacaatatatagcgcaaaatggcaagaaaacgccctgtatttggtattgaaatcaaatacggggctgttgcgatatactccttttcatactgcctgccgcggtgagtcgtttgcacagaaacgggagttccgctttgattccaccggcgggccgaatcttgtcacgccccagtccacaatcgacacatggatggacgaggtacgcgcactgctgtaaaatctatcttgtacaaatgaaaagcaacattcaatgtgatttagaatgtgactttttgttgtatttgagaaccctgccttttaacttaaccgtgtagaaatagatgaagttagaatcggaatatccattgctttgacctgggtaagcagagattcccaatcggaagaacgaaaaggcgcggcggagatgcagatgctatccttcaaggaaatgcgtgctttgtataggctctccggcgcggacaaatctgtgcggggagcggcggaacggcttactaaaatcatgaggaaatgtcccgacaggacggcgcagaggatgcgctttttgggcagaacggcaagcgggccgtcagcggcaggttgatgtagagatgtgcagcgaatggagctgtcgctgcaaaacgtgacggtttgcttgcacagagtatccgcgccgaagcagcggaggagtctccaccttatggcatgacgatgaaaaaggcagtagcaaaatacaaaataagcccgcagatcatacaacaaaaacacatgcagaagcagcaggcagacgacaccaaaaacaaccgcatactgtgggccgtacccgggcgaggtacacagcgccgaaatttctgtgacataggagaccagcaggaaaaaggcaacggcggacaccgcaaaagacacgccccgcgggaaggtagcccacttggacagtgcggccatgcgcagcatcggctcggtggatacaaggtattcgtcagcggtcatttcgatggtgcaggttacgccgttggcgctgtgggtaattgtggactcggacataaaaatcaactcctgatagaaaattgggtagagacgatagggggggaaacatggttcgcccgtggctgtgttcaacagccgcaaagtgtccgggcggatatggaatccgcccctacggcggtaaagcaactgctgctcgtcggtcagaaactctggcgcaggaacgttcaaatcctgctcactccgcctgctccacaaacgatttcagcagcatggcccgggcgcggtggatgcgggtcttgacgttggactcgctcgaatcggtgattttggcaatctcgcggatggaataccccttcacgcgcaaaaccagtgtctggcggtaaatcagcggcatttcgtccagcagggcaatagccttgtccagctgcaaatttgtcagggccacttcctccggttccacgtagttgtccagcgcggcggccaggctttcgtaatcgggctgggcaccgcggcggcgctcccacttgcgcaggaaatcaatgctccgctcccgggtcaccatataaaggtaggatttcagagcccgctcgttatcaatgcgcagcgtgtcgattccacgcagcagctgcacaaacgtctcatgcaccgcatcctcggccaaggtgggatttttaataatgcccgcagccgtgtgcagcataaagcggtaatatttgcggtatatgtattcaaatttgtttttgtcgtcgtcgctgtccagcgcggcaagatagaaaaccagcacgtaggctcctcctgaatataaacttccgtgttataaggtatccgtcacaaggcggcgcttggttacacaatttgtcaaatttattccagcacaatgccctgggcaattttgataagctcatgcaggctgatgttgccctctacggagcaggcgagtttgttatgctcccacagcaaatcattcatttggccttcaaacatatcgccccaaatcgcgtcgtggccgtcaaaggtaatcgagtaatattgggagtgttcatcgtccaggaagacatcctgcctaccctgaatgggtacaatcattacggtaaagaacgctccggtctccgtattatcatacgaggcatagtagtgcccgacatccttcggctcactgacctcggtcagggtaaagccgtccggtagataggacagcgtcactgactccggcataacgccccactcctcgctgacatagctgaccgccacaaattggtcatgccacgtcatcagtgtttggacaaccgcgtcccgcacggccttgacgggcagcattgtgcaggagaaaatcgccattgccacggccaacgcaattaaaagccgcttggccgcccgcaaatgccgctttcggtcagccttgcgccgggtattgcggaccagcgcgtccattttgcgtagaaacgcatccgacggctgcacgtccccggcggcctccggccccgacatctgcgccagcgcgcggtcctgcgcctcggtcacgatcatagcaatcagggcatccggggaaatgcaaagcttgtcatcgttcatggtcttctcctcctgttcagcggtgtttctatctataatccgtagtataccgcaaaaaagtttcactgacaatataaactgtgccgccagcactcagcccgggggattgcaaagcacctggtatcgtgctatactacaatagcagtgatataagtcatacttgtcatgaacggacaaaaggcttgtaaaaccggcaggaaggccgggattgcaggccttttgttttttgcggcaaaatcaaaaggcaaaaggtatgggattttatggttcttgaagcaatagcaaccatcaatcaggcggtcaacaactttgtgtggggcatcccggcgatggtgtgcatcatcggcgtggggctgctgctcagtgtgcggacgggctttttgcagatccgcaaattcccgtatgcgatcaaaaccaccatcgggcgtatgttccgcaaaaaggatgcctctgatggtgcgatgacgccgttccaggccgtctgcacggcgctggcaggcacggtgggcacgggcaacattgcgggcgttgcgggcgctatcgccatcggcgggccgggcgcagtgttctggatgtggtgctccgcgctgctgggtatgtgcaccaaatttgcggaggtcacgctcgctgtacattttcgggagcgcagcgccaccggcgagtgggtcggcggcccgatgtactacatcaaaaacggtctgggcaagcactggcagttcctggccgtgctctactcgctgttcggcgtgctgacggtttttggcaccggcaacgcgacccaggtcaacaccatcgtcgccgccatcgacacggccctgacggagttcaatgtggtcggtcagaacgcgctttccactctgaacctcgttgtcggcatcgttgtggcgatgcttgtcgccatggtgctgctgggcggcatcaagcgcatcggcagcgtcagtgaacggctggtgcccttcatggcactgttctacatcgtgctggctgtgggcgtcgttattctgaacattcagcgctttccggcggtgatcgaggccatctttgcaggtgcgttcaacccggcggccttcacgggcggcaccatcggcagcctgttcatcagtatgcagaagggcgtctcccgcggcatcttctccaacgaggcaggccttggcacgggttccatcgcccacgcctgtgccgacacgaaaaagccggtcaagcagggcatgttcggcatctttgaggtctttgcggacaccatcgtcatctgcacgctgacggctatggtcattctgtgcagcggcacgacggtcaactacggcatcgccgcgggcgcggagctgacgatctccggctttaccacgacctacggcggctgggcatccatcttcacggcggtggcactgtgctgctttgccttctccaccatcatcggctgggggctgtacggctcacgctttatcgcattcctctgccgcagcgacaaggtcgtgcgtcccttcttcgtggtgtactccttcgtttccatcctgggtgctacgatggacctgggcctgatgtggagcattgccgataccttcaacggtctgatgagcatcccgaacctgattgcgctgctgctgctttccggcacagtggcgcagctgacaaaggaatattttgaaaaggaaaaggtgtaagaaatgtttgtaggaacttggtggtccctgatgccgccgatcatcgccattctgctggcgctgttcacaaaggaagtctatctctcgctgttcgctggctgtgcgctgggtgcgctgctggtggcagagtttcacccctgggtcgcgtttgacacactgttcaacacgatgatcgacagcgtcgacttctcgattctgatgttcatgatcctgctgggcatggtcgttatgctcatgcaggagtccggcggcacccgcgcttatggtgagtgggcggcgaaaaagctcaagagcaagcgcgccacgctcgtggcgacctcgctgctgggtgcgctgatttttgtggacgactacttcaactgcctgaccgtcggctccgtcatgcgcccggttaccgacaagtacaaggtttcccgcgccaagctggcttacctcatcgacgccacggcggccccggtctgcatcattgcgccgatctcgtcctgggcggcggcggtcaactcctacgtcccggcgggcagctcgatgtctggctttgagatgttcgtccgcacgatcccgttcaacctgtacgcgatgctgacgctctacatggtgttctttacctcgctgctgggcttcgactttggcctgatgaaaaagcacgagcgcaacgccgcccacggtgacctgttcacctcgggcggggaggcattccaaaaccaggaaatcaaggaccccaccgagggcggtaaattcgccaagggcaaggtcattgacctgattgcaccgatgatcgtcatgatctttacggccatcgccacgatgatctggaccggctacctgaacggcggcacgaaccttgtcgaggactttgccaactgctcctcgtcggagtcgcttgtctttgcgggccttgtcacggtgggcttcctgctgctgttctacctgccgcgccgcgttattggctttaaggacttcatgaactccgtgcccgagggcggcaagctgatgatgccgcccatcctgattctggtgctggcctggacgctgaagggcatgaccgacgcgctgggcatcggcgactttgtgcgccaggccgtcagcctgaatgagggtctcatgcgctttgtgccgctgctgatcttctgcattgcgatttttattgcgttctcctccggcaccagctggggcacgtttgcgattttggtccccatcgtcgtcaatatgttctccgagacggaccccaccatgatgatcgtggcggtatccgcggtgctggcgggtgctgtctgcggcgaccatatttcgccgatctcggatacgaccatcatgtccagctccggtgcacagtcgaaccacatcaaccacgtgcagacccagatgcagtacgccatggtcgtcgtggcggcctgtgtgcccggctacctgatcgcgggctttaccgaaaactggctcatcacgctggtgtcgtcgcttgccattctgaccgcagccctgctgtatctgcgcaggcgcagtctggctgaggacgccagagcataaagaaaaagcagtgctttccaagcggaaggcactgctttttttgtaggggcgaccattggtcgccgcagccgtttgcggtggcgaaaagccccgcgggtcgtcgaggacgccgacccctacaccgtagggacaaattccgtatcaggtcggcccaaagcctttacttcagcgtaccgtccagaatctgctggtaataccacggcttctcggcgtggaatacccgcccggcgagatgcgcaaaccgggggtcgctgatttgcgcaggaaagcgcagctcccacgcgcagagcgcctgatacttgaaccgcagctcgcggttggcggcgttgttgccgtacttggaatcacccagaatcgggcagccgatgtgtgctaaatgcgcgcggatctgatgggtgcgcccggtcacaagctcgacctccaacagggccagccgtccgctgacggccagcgtttcatacccggtgatgacctccttcgcgccgcccgccgtcgtgtcggtgatgcgcacaatgccgcgctcggcgtccttcaaaaggtagtcgcgcagcagggcggcgggcgggttcgggcggccaaacgtcacgcagaggtagcgcttttcaatatcgcgcgccttaatggcggcggtcagaaacgcctccgccgcactgttcttcgccagcagcaccagcccgcttgtaccggtgtccagccggtggcagagcacggcgtgggcagccttgccctcggcggccagcttcgtttgcacgcggcggagcagtgtgtcactgtccgggccgtccacagcgatgcctgcgggcttgctggcaatgatgatgtcgtcgtcctcatacacaaacacggcggcgggggtggggcggttctccagctggtcgtcgttcaggaacagcttgataatatcgccgttctgcacgcgggtggagagcggctgcttctttccgttcagcttgatcttgttttcgcgcagggccttgttcagccgccccatgcccagagcggggaactggtccatcaggtacttgtccagccgcacgggcagcaggctttttacatgcagttctttcattttgtcgtcaactcctgatcccacaaaaccgtggcatcctcaatatccaaggtgaccatcagccaaccggcgtcgtggtcatcgaccttcaaaatcgggtattcctgcccgcccgcgcaaagcagcgccgcaccgtccagcttagtgcgcgcaaacggagaatccttaaagcagaccgtctgctttgtttcatccagcacgccgcggttccacagcgcgtcggtgtagtctgccaggcgcaggggatagtcctcgtcgtagggcgtgcacagagcgtcaaacgtctgtccctgcagccccggcgcaatgacataccagctggcgctgccgtcggcgctcgtcacgcgcccgcaccaggccagcgccttgaccggttccacggcctgcaaaaaggcaccctcgtcctcgaacaggtagagcgtgtcactctgcggcgtgcccgcgtccagagcgtccagcgaggtctggcgctcggcggcaagagcagtctcgtcgtagcgggcggcgaacggatcgttcgtcgtcatgccgttgtcggcagcccacagcgctaagtgtaagctgtcggcctgcatgccctgcacggattcgatgtggcggtactgtgccgcgctctgccagaaatcgctgtccagctcggacgggaacgcgtccttgacctgtgcggcctgcatggcgtcgtgccgctggcaaagcgccgggcttacatcccacagctgcacggcggcaaacagtgtgacccagacagccccgcggggcagacgcgccagccctgcgaacgctgccagcgtcagcaggtagtagacaggccagaacagccgcccgccggagcgaaagaccgagaacagcttaataaaggaagcgggcagcggcagcgtggccagcgtcacgccgttggcggtgatgacgttgctgacggcaaacgcggtcagcacagcgcagaccgcgcacagcgcccagtgacggcgcacagcgcccaggatatgccgccgcgctgacacgaccacgacaggcagtgcagccagcacgcccagccccagataggcaaaggcgtcatagttgccgccgacctgattctgtgctggcagcaggcggctgtacaaaacgccgttcacacccgccgggttccacagcgcgttcaggttcatggcaaaatagccgtacagcgcctgcccgccgctggtggctgtgccgtaaagcagccccagcgcccagcccagcgccgcggtgcagagcatgttgccgcccaaaaacagcgcgggccgcagccattgccgctgccttacggtgtactcaagcaaaagcgccagtgtgacagcgtaggtcatgggcagaaaatacgggtggataccgacggctagaatgttgatgacaaacaatccgcgcgacgcaaaccggctctgtcggcggcagacaaaataacagtacagcgccgccagcacaagccactgtgcgccgagtgaggtgtgccggaacgcgcgctccagcaaaatcgggctggccgcaaacacaagcgagcccgccaaaggggcggcaagcccctcagcgaacagcccacacagcagcgccgcaaagccgccctgcaaagcaaagcagacaagggtaaaccagccgaaatactggaacgtcccgcccagcgctgccgccagcggacggcacagcacagccagcagcgggatagaatcggtgtacgcaacgctgacgccctgcggcgcgttgacggcctgcgttacgccgagcggccagcccagcgcactgcttcggtagaacagccagcccgcgtagtgctgctggatgtccttttcaatgtagccgccgcggcagaaggcgtcgttggcgacattcaaggggggaaggccgtacaccagcaaaaatacggcagcgccgagcagcgcccccagccagaacagccgggcgctgcgggtagatttatggttcagcataccatgcctcacagggtccaatagaaaaagccgaaacaaccggtaaagctgtttcggctcgggtaaatgccgctgaccgggatcgaaccggtacggtatcgctaccgagggattttaagtcccttgcgtctgccagttccgccacagcggcataatatatgtattgtagcgcaagaaggcggaaatgtcaatcttcccgccgcgtctttttgccgtctttttgcggaacgggtgcaaaaagaggattccccgcccgacggcacaaaaaattcaccttctgccgcttgtgcttttgcttcggatttgttatactaatatggtatgtttggataggtgcgcccatttgggcgtttatataaggagaaattcacttggaaaaactgacctacacccacaacgatgccgccgccaaggcgctggcggcgttctatgagacaccgccgctggcgtatgtacgcagctacggctgtccgtgtagtcgagtatagatgatttgaataaacccacgacgcgcaaggttttatgccttgcgcgtcttttcttttgtctcggacacaaaacggaaaaataggtaaaaaaattgacaggtggaaacatttactcttgactttccagctgtcaaaagttataataataatataaaatattaacagttggaaacttcaactgacggacaggagatagagaaaatggatgcggtactggaactgaaacattacagcacggagcggctgttggacctgtgggagatgacgactacgaacagcgaccacaacatcccggcggtacgcggctggctcatggatgaaatcgaaagacgctttccagaagcattcgagaagtggctggatggcgatgcagaggacggcgctcttagaaaattcattaaaaacgaggaggcttgaaccatgacatacgaagaattcacagcgcttgcaaagcgcgagatcagcacgacagagtatcacgaggtcgtggagcccgtttatacctaccacccggcgattccgaacaaagagacagccgccaaattgtacgacttgtgcgggttgcaggtgttccgtgatatgaagcctacggcgaagcgcatggagcagcttgaagatgaagaacgcaaaatcaactgcgcaatcaacgaaatgcgcagtcggcttgatgaaatcggagatgaagtacggaagatgacgacggcgacaccaatcgccaccgagagcaaaaaggtctgaacaaagcggcagaaaggagctttgaaatgagaaagtacattggcatcccatttgtagcctaacgggataggagcgccattccaaaggcccttgttggcgcgagagtacatgatggacgtgacgcgctcggcggtcagcttgcgctcgagttcggcgaatacgaggatgatgcgcaacatggcttcgccgatggcgctggacgtgtcgaattgctcgttcttggagacgaacgtgcagttgaatttcttcaactcctcatacatggcagcaaagtcaagaagattgcggctgatgcggtcaattttccaaacgcagaggtgagaaaattccttggcgcggatccggcgcatcatgtcttggtacgccgggcggtccgtatttttgccggagtagccagcgtcctcgaaaatggcgtagtcatcaatgccgagagcgtatttcgcgtagtttatcagttcgttgcgctggaatggtagagaatccttgtcgatttggtagtgggtagaaactcggatatagagagcggcttttttcgtctggttcttttgcatgatgaagccctccccttagtccgaatacggcaggtaaattatacggcgccggattcgttgtcttggttaagggcttccagcagggcgcggtcgtgcggagtcatatatttccgcagcagcgcccacaggacggcacggtcatcgtcgctcaccttggagaatgcgttcagcagaatgatttcctcggggtcgccggatttcttcggcggggccagcacggggtcgatgcctacgaggtagtcggcagaaactccgagagccttggcaatctgctgaatgctgtacacggtgggctgcctgtcgccagcaaggtagcgggaaatcgcaccggaggacaggcccgttagagaagccagctgtacggcgttcattccgcgctcatccatagcgtgcgccagaatttggtcgaagtgaaaattttcttcaatgttgtttatcatggacaaagcctcctttatatgtaatagaatacctaaaattttgcgatatgtaaataaatattgccaaacgtcaatatttccattgacatttgacagctggcaagttataataaacttaacctaaaaaacaaggtggtgagacgatgaacgagacgctattccgtatccatttggttgcaaaggggctgaaaatcagcgacattgagcgtgatttagatataccgcgggcatctatcaacaagtggctgaaaaacgagacaggaatccagttgaacaaggcagtccagattgcaaactacacgggtatggacatggcacagttcaacgctattttttgcgaccaaaagttgacagatggaaactttgctggcgattctttccactacgaacttattttaccgagaaatgggggtgaattaaatgggagcagctgcaactaaagcggtaggtaatgtgtactacgaggcgaggaaaaaggccgcaatgtacaacgacaggctatccagcagagagggggcagcggaagcccttggaatttcgccctcgaccctcgcggattatgaactgggactgacaaaatttgtgccggttgagaacgtcatccgcatggctgatgtctacaatgcccctcagctgaaaccgcattactgcaagaatgtctgccctataggctgcgagatgcccgtcgccacagaggaaacaagcattgagcttgcaaccctgcggatgctgaaagcgttcgacgagggcaaaatcgacgaggtaaaagaccgcttggtcgagatcgcatctgatggagtgattgaagacgacgagaaagccgatttcaagaaaattatgggctttctcgataagctgtcacattccatctcggagatccgcatcatcgcggagaaatgcgagcggtgagagcaatgacccgagaagaaaaagttatgaagctgttgcaagaggagttcggcatccacaatgagcatgaacttgaccttgcgattgcaaatatggaaaaagtcaacataagtgtgtttgtaaaggaggtttcccatgcaggctaaaaagaagcgccgcaacagcggcgcacggacagttctttatacgctggctattggaatttggtattaccgctggtacatcctcgcggtcttgttgggcgcgttcttcacgcctatggccgtcaaggccgcctacgcggcccgggggtacagggcaatcggcggcgaggttctgttgattccgctgttcgtcctgctggtgaagctggtgtcgctggtaaagcagctttttgagatgctggccgagtgcgtggacgaggaaagcgaggagcaggatgtgtgagtatgacctgctgcacaagccgattgtccgcgaagaagccaagaaaccgtcgtaaggcgtggccgagtccatgccgctgaaaagggggatggactcattgagagaagtatcggaaatcgaagcacgcttgaaacgtcaccgcgacgacaacaggtacatcgacaatcagatagagcggctggaaacccttattctccgcatgaaaggcgtatccagcccgagcctgtccgggatgccgcataacccgtcatccgatgtggacaaaatcggccaaatgctggaacgtaaggaaaagctagaagccgacatccgggaactgatcgcagaccgcgacagagagcgcgacgagctgcggagcatcatcgggtgcatccacaagcccgaccagcgttccgtccttgaaatgcgctacctcgacggcgcagagtggcgggagattgcggaaatgctgttctcattcaagccggactttgacgattccgacgagaagtatctgcgccgcacgttcaagctacaccgcgaagccatcgacactttgaacgcgcggctctctcaacaaaggccaaatccggcgacggagatgcaggaaatcctgctgccgaagtggggaaaggtcccggctgtcaatggtatggaagtaaaagaaacaaaaaggaacgaaatgcaagtaaatgtcattgaaagtgaatccgtaaaggtgtaaagtggtagcatcgcaaaattgaaaaagaaaagagcagccgacccggttgggtagactgctctttcgctttagaggtgtaaagcgggggggggggggggtataagagatttagaatgttctcggtagatgttgagaatgcggtcacactgggagaggaaaacggataagttgtcgccggtggccaaatcgctgacacgcagcttgatatacagcatcgagtaggaaagcggatgcccgtcacgcccaagcggtgagaacatttccaatatctgctcgggagacagcgccccgccgagtttgctggacaggtttgcataggagacgaaaacgccaatgtcgtggtcgaggctttgaatctgataaagccaagccccattgatggacacgtccatagaagcgtaaatcatgccacggccgtagtggacaggcagcccacagccaagcgcgtagtttaccagcttctccgtgcaggcggcaaaatccggccgaacctcattgcattttgcgagaagcgacgttgcatcccattccttgtaggagcgcgccgccttagttgcctgcgaagcccggttcccgatgaagcgggtggtgcaaaggccctcgtaagcgttgacctctacgccgcatacggtaatgtcgggaatcttcctatcgaggaaagccagcatctcggccagttcgccgttgattttgtcggcggccacgaccatcgtgtaggtttcctcgcgtagatgggtgagaacggtgtcccaaaaggaatcagtgtcgtactcggccaaaacatcggcgcggttgttctgccggaatccgttctgcaacaggctcttgttccacaggcgggcaaaggtggcgtagttgataagctgcgcgaccacaaggcggtgaatctctgggttcacagagcgcttgacctcgacgagaacaggcagcccgctgtcatcgacgaacagcacgtcgagccacattgaagtgctgtcgtcggcagatttgcgcaagcctatttcgcggccgataaggaaaagccgccgcccggcagaaatatcctcggcgctgtaaagttcgtggagaagcaagtcgggattttcggcaatgagcgcttgcaatttgtcctcggtatcgaagaagctgtaagacacaggagagacgctattgccatccatgcggtagagtttttcgtccatgatgaaatctcctatcgaaagtgtttcacggtaattctatcgtagggaatttgtgtcagtatgtcaaggagtgaggaagcaatatgtcacagagaatgcacgaacgcccacccaccgaaggtggggagagggcggagaaagccgcccgcagggcgtaaagacgcgcgaaagcagcgcaaagtgacatatcgcaagaccccggtacgccgcaggaaagccccggcggcagcctgagagcctgttttgcaaaagcgcgataaaacgttgaacaggagcagggcagggctgaatgagcgagaaatgagcgcgccgcgattctctcgcatttgtcacaccaaaaaacgcgcgaccctggctgagattttcagagcggtaaaactggcgaaaaaacagcgtagagaagtcaaaaatcattgacttagagtgcgtaaaaagttataatgataatacagaaacttgacagttggaaagttttctgctaaaattgccagaaagagagcgatggaaatgaagaagtccgatatggttcgccagtacgtcgcgcaagcacagtacaaagaagcgttgcgaatcgcaaaggattttcggttgggaatcacgaagcggcaggccgacaccatgaagcgcggttatgagtgcatggtacacggccggttctatgaatccctcggctacaatctgaacgacgagatccgcaagggtgtcgatacggtcaagaaactgtacggggaggtgaagaacgatgccgcctaagattttcaccagccgctactcaaacccggagcttgccggtgacaagtacacggtagtcggggtaacgcgcactcctcctaaattcccgttgaggtatcagctgcaaggcaatattgcggagattgcgcccccgggctggctgttcagcgagacgaacgtggaacggttcagaacgccgtacttccgttacctcgacaagacgggcccgttcaaaatcaagcggattttggagaactacctgtcctacggcaaagacattgttctgtgctgctacgaggacgttcgcgttcccggtgaatggtgtcacagaacagtgttcgccgaatggtggaagttgcaaaccgggcaagagatttgcgagttatttaacccgcaagaacccaagctgcccgccgctgtgcagaaacgcatcaaggccgagcaggaagccgcagagagggccaaacaacccgagcaattatcattcttctaaggttccccggtgggctgtatgaagcgcttagaccgattacagcccgctttatatccgaacatggtgtacagtagcacgctgcgtatccaatgcagaggccgcgcccaagccgcgtgttcggtccatagagagagtcacacgattgtgtggctcttttttgttgccaattttttgaggaaagaggttcgatgcaatggcgttctttagagaccccggcgagatgttcctcggctgtctcggcacagcggagcagcgttttctcgtcactctgattcagacggcagccaagtcgggctacacgaggttcgttgagccgtgcgccggtacattcgcaatggcaaaccttgcagtgcggaacggctttaagcccgagcaaatcgagacgagcgacgtgtccatgatgacatcggtgctggggtatgcgattaccgaccagtcgcttgcgccgctggaaatccacgcgcagggattcagcgacgaggaactgctcgacccggccacggcgctgtatgcgcagatgtatctccgcacgtcgaagagcgcgggtgctgagtatttccacaatatgcttgtggatttgaagtaccgcagggcggagcatatcgccagcatacagaagcagatcgacgcgacaagggagcttctgcacggcatgagttaccgcccgctggatgacctcgaagttgcttttgtggcggcgcactcggcagatgccgatggcagaatcccttatcaagacggggtggggtgagtcgctgctgcgggtgcttgaaacccggcgcggcgacatccagcagcaaatcaacttccgcagcaagacgtactacggcgttttcggtctgaaccgagcagaactgaacgctgtcggcgaaaaggactttaacaaggtctgcaatgcgaaaaagtggaaagggcagggcgtagcaatcacgccggaaaacatgaagcaactggccgaggtgctctcggactatacgctcattaacctgtgcgagaaatacggtgcgcggccgacgcttaaatatcttcggcaggtgagccgccgcgccggggcagccaacggggaaatcaaacggcaaatcgcgtatgattgggaagactacatccgcatggcgaaaaaagtcggcgttgacctcaaagtggagtcgaacaggtatccgctccagctggcccgccgccacaatgagatgatggcggtcatccgggaaaaagatgccgcagcgagcgcggaacgtcgccgtgaaatggctgttagcttggacaagaagtttggcgtggcaaaggtgatgaagcgcatccgcaagctgtatgagtacaagggcgagcggtacagcatcatcgttcccgctgacgtgttcgacatcgtgaaagacagcacattcctcgggcattgcgtggcgaacacgaaccgctactatgagcgtatctcgtccgaggagagttacatcgtgttcctgcggcagacggacaagccgaaccgcccgtggtacacgctggaaatcgaacccggcggcacgattcggcagaagcgctcgtactccaacgagcagtattccgatctgcaagaagccgtgccgttcttgaaagagtggcagcaggtggtgcagaagcgcatggacgagaaagagcgcaagctggccgtggagtcgaaagaaaagcgcaacaaggaatttgaggaactgacggtgaacggcaacatcatccacactgggcggtacgccggaaagctgttggttgatgaactgatgaaagaccttatggaagcggcagccaccgcgtaaaggaaaggagtaagctatgatttttgagaaagcagagattgcgcagaagttaaaggctctgaaagcggctgttccgcagtcgcggagcgccggtgcagagtcgattacgcagggcgtgttgtttgaggggaacacgatggccgcgtcgaacggtgtcatctacgcgcaggcgaagattccgtacaacatcgcagagccgttcatcctaccgccgaacggcgttgacctcatttgcgggctggatgacccgcaggtgtctatcgagaaagacggcgacaacgtgaaagtggccggggcggggaagaagcgcgcaaaggccacgttgctgacgggaactatcgacaacttcatgcgcattgcaccgccgcagcaggggatgcgaaacgtgtccgtggatgccgaggaacttatcgccgccataaagcgcgtgggctacgcggtgtccttgaatccgaaccgcccagccatgacggggatttacttcaaggccgagaacggaaagctgaacctcgttgggtgcgacggctcccagctggcaaaggtcgagtttccgtatgaagaagatttccacttcatcctgcccaacgagacggcgaagagcctggccgctctcgacctgcacggccagtgtcagattaccggcgaccacaagaaagcggtcttcagcaccgaggactacacgctgacgaccagccttatttgcggcgagtacatgaactatgagagcgtcatcccgaaagcgggcaagtacgatgtcgtgtttgaccgcgacagtctgctgggggccgccacgcgcgtcaagaacttgatggacttgaagcaccgcgagccggtggtgctgcacatcgacggcgaaagctgctacatcacatcccggctgacgggcgttgaattccacgaggacgtgctgtgccaaggcaccatcccggagccgatgaacattgcgttcgacgacattctcctgctgaatgggattagcgccaccaaaggtgagggcatccgggcactactgaatagctcactctcacctatgaagattgagaacgagggttttacggcccttgtactcccggtacgcatgaaaaatagagcatgaaatgaggtgtttttgtgtccgctaaaattgacaaggaaacgaatatcggatataataaaatgaattgtgccgacttggttcgcgcaaggatgaaagacacgggaacggcacttcacgaactggccgaaaagatgggttacagccgccagcgtctcggtaacagattgctgagaaatagccttacagcggaagaattttgcgaatcaatggctatcatgggggcgaccgtcaagatcgagaaaaacgacgggcaacagaacttgctctgggagagaacccccagcgtgggcccgccgatttgcaagatgtgcaacggctatgtttgcgatacagaaaaagctgactcgctggcagcgagttttacctgccggaagtacccagagggcatccagaaccatttcgcatgggagttgtatcaagaccgttcgggcttctatttcgtggtagtttacagcgatattccgtcctgcccgacgaatgtttatacagtgacccccgaggaagccgagtggtacctcgaacacaatatactttgaaattctgaacgatgaaacgtgaaaaggtggtaaaatggccgtaaaggtagaacgaattgattatagccagatggaaaatcgggagaagtaccaagacatcattatgcagtattacgaccatccgcccctcgtatatactcggagttacggctgccagcagaacgtcaacgacggtgagaagatcaagggcgttttgcaggatgtcggctacggcctgtgcgacaatgtcgaacacgccgacctcatcctgttcaacacctgcgccgtgcgtgagcacgccgagcagcgcgttttcggcaatgtcggcgcgctgaaaaagctcaaggagcagaacccgcgtctgatgatcggtgtctgcggctgcatggcccagcaggagcacatcgtcgaaaagctgcgccagagctatccctatgtggaccttgtctttggcgtggacggcattgaccggctgcccgccatgctggccgagcgcatccgcaagggcaagcgctatctggaaaagcccgccgagcgcaacgccgtggtcgaggagctgcccatccgccgcgattccggcttccgcgcgtggctgcccatcatgtacgggtgcgacaacttctgcacctactgcatcgtgccctacgtccgcgggcgggagcgcagccgcgagcccgccgcaattctggcggagttcaggcagcttgtcgagcagggctataaggagatcaccctcctgggccagaacgtcaacagctacggcaaggggctggaacatcccatcgactttgccgaccttttgaacctgctgtgcgaagtccccggcgactaccagatccgcttcatgacgagccacccgaaggacgccagccgcaagctcatcgacacgattgccgcgcaggagcatctgtgcaagcatatccacctgcccgtgcagtccggctcggaccggctgctcaaggagatgaaccgccactacaacgtcgcgcagtacatggatctgatccgctacgccaaggaaaaaattcccggtgtgaccttctccagcgacatcatcgtcggcttccccggcgagacggaagaggactttgccgcaacgctcgacctcatccgtgaggtgggctatatgcagctgtttaccttcatctattccaagcgcgccggcaccccggcggccaagctgcccgacccaacgacccacgctgagaaggccgcccgcatggaccgcctgctgaaaacgcaggaggagttcgcctttgccgccaccgccgccatggcaggccggaccgtccgcgtgctggtcgaggctgcgggccgcaatgagggcaccgtcaacggacgcctcgacaacaatctggtcgtggagttcaaggctcctgaaagtcttatcggccagtgggccgatgtccacatcaccggctcgcgcgccgcactgctggtgggcgagcttgctgaataaacccatacattatatttataatttataaggagaattttacaatggattgcattgatcttttcaagaaagccgccgctgccctgcagactgacccccgctacctggagctggacgctgcccgccgtgagaacgatatggacgaggagctgcagaacatgatcggtgagttcaacctcgcccgcctcgacctgaacaatgagagtgccaaggccgagaccgatgccgcccgcgtggccgagctgaaccagcgcgtcaacgacctgtacagccagatcatggccagcgagggcatggtccgctacaacgccgccaaggccgagtgcgaggcaatggtcagccacattgacgccatcatcaacaccgctatgaacggcggcgaccccatgaccgtgcaggcccccaccggcggctgcaccggcagctgctccacctgcggcggctgccactaaagcttgaggtgcggggcagagaggccgtaggggcgcattctatatgcgcccgcagcactgtacacagccgcataccttccgggcggatatggaatccacccctacaagaacaacataccaacaagaatcaacaggagtgtgaaacatggccgagcaagcagtatcgcccatgatgcagcagtattttgaaattaaaaaacagcatcccaacgagattctgttctaccgcgtcggtgacttctatgaaatgttctacgacgacgcgctgacggcttcgcgggagctggagctgacgctgaccggcaaaaactgcggcaaggaagaacgcgcccctatgtgcggcgtgccgttccactcctacgagacttacatggcgcgcctggtcgccaagggctacaaggtcgctatctgtgaacagatggaggaccctgccctcgccaaaggtcttgtcaagcgcgacatcatccgcgttgtcacgcccggcacggtcattgaaagcagcatgctgtccgaggataaaaacaactatctggcgagcatttactgcaagcgcacccgcggccgctggcgtgcgggcgtctgctttgcggacgtttccaccggcgaggcctacgccaccgagctgaacgctgaaaaaatcggcggagccatcatcaccgagctgtgccgctatatgcccagcgagattttgatctgcccgccgatgcttgactttaaagatgtcacgacctacatcaagcagcacacgaacgccctggtcgagctgcgcgaggatgcctgctttaaggacgccgtcatggagcagaccatggccgaccagttcggcgccgactggcgcacgaccctcggctatgagaaggacgcgcttgtcccgtatgctgtggcggcgcttctcaactacctgcacgagacccaaaagcacggcgttgagcgcatcaagaccgtgcagaactacgccgacgcacagtatatgcgcctgtcgcctgtgacccgcgcaaatctggaactgaccgagacgatgcgcgggcgcgagaagcgcggcacgctgctctgggtgctcgacaagaccgaaacctcgatgggcaagcgcctgctgcgctcctggatcgagcagccccttgtggacgccgacgccatcaacgcgcggctctgtgcggtgcaggcgctctattctgccagcatcgcccgcgccgatttgaaagaagccctcggccatgtctttgacattgagcggctgacgacccgcattctctacggctccgccaccccgcgcgaggtcaaggcactgggggatacctgcgccatgctgccccaggtcaaggcccaggctgcggcctgcggtgcgccgctgctgacgcagctggctgaccagatcgacctgctcgaggatgtcttgcagaacatccagaccgcccttgtggatgacccgcccgccaacatgaaggacggcggcgccatccgcgcgggcttcaacagcgaggtcgatgagctgcgcgacatcatgcacggcggcaaggggtatctgtcaaaccttgaggcccgctaccgcgaggaaaccggcatccccaagctgaagatcggcttcaacaaggtgttcggctactatatcgaggtcagccgctcctacaccgactcggtgcccgataccttcacccgcaagcagacactgacgacgggtgagcgctacatcacgcccgagctgaaggagctggaaaataagatcctcggcgcaaacgagcgtctgctggttctggaacaccagctgtttgccgacctgctttcgtcgatctccgccgaggtcgtccgcatccagcgcacggcatcggctgtggcccagctcgatgtcctggcaggctttgccgaggcggcgctgcaaaacaactacgtcatgccaaacgtggatgagagcggtgttatggagatcaaggagggccgccacccggtcattgaacagatgctcaagggcagtctgtttgtgcccaacgatacgatgctcgacgaggacgagaaccggatgctgctcatcaccggcccgaacatggccggtaaatctacgtacatgcgccagaatgcgctgattgccctgatggcgcagatcggcagctttgtacctgccgccgcggcgtatatcggcgtggtggatgccatcttcacccgcgtcggcgcgtcggatgacctcgccgccgggcagtcgaccttcatggtcgagatgaccgaggttgcggagatcctgaaaaacgcgacgaaggacagcttagtgattctggatgaaattggccgcggcacttcgacgtttgacggcatgagcattgcgcgcagtgtggtagaatttatctgtgagaacatcggctgcaagacgctgttcgccacgcactaccacgagctgacgagcatggagcaggatattcacggcgtcaaaaactataatatcgccgtcaaaaagcgcggcgaggacatcacgtttttgcgccgcattgtggcaggccccgccgacgacagctacggcatcgaggtcgcgaagctcgcgggtttgcccggcagcgtgacaaagcgcgcccacgccgtgctgcgccagctggaggccagcgcaccgggacgcaataacacgatgcagctcgattttgacaccgtcgaggcttacaacaaccccagcgtacccagcgaggtcgtcgaaaagctccacaatgtagacattgagacactgaccccgctggaggcgctgaacttcctgtacgaactgaaaaatacactggacaaagactaaaggcaggtgaaaaccatggcggaaattcgtgtactggacaagcataccgcagagctgatcgcggcgggcgaggtcgtcgaacggcccgcctccgtggcgaaggagctgctggaaaatgccattgacgcaggcgcgacgcagatcacgctgtcggcggtgcgcggcggcatccagcagctgcaaatcgtagataacggttcaggcatagaagcggaatatatcgataaagcgtttatccgccatgccaccagcaagatcgcgacggcggaggacctcgggcacatccataccttgggcttccgcggcgaggcacttgcctccattgccagcgttgcccgcgtcgaggtgctgacccgcacagaggccgacgagtacgcctgctgctaccgcatcgaaggcggcgaggagcgtgggatggagcccggcgcgcgccccgtcggcacgaccatcacggtcagtgacctgttttacaacacgcccgcccgcatgaagtttttgaaaaaggacgccagcgagagcacgtttgtggctgagactgtcctgcacgcggcgctgtcccacccggagatcagcttccgctatctgcgcgacggcaagcagcagtatgtgacccccggcgacggcgacctgcgcagtgcggtctacgcggtcctgggccgtgaatttgcccgcgacctgctgcccgtggacggcggcagcgagctgtaccatgtgaccggcctggtcacgccgccgcgtgcctgccgcgccagccgcggtgcgcagcatttctttgttaatggccgctacgtcaaaaaccgcacaatgatggcggcacttgaaaacgcctacaagggcacgatgatgcagggcaagttcccgggcgcggtgctcatgctggagctgccgcccgacatggtcgatgtcaacgtccacccggcgaaaaccgaaattcgctttgcgaaagagagtgacgtctttgacgctgtctaccgcgctgttcgcgccgcgctggcaacgcccggcagcggcgagtgccgctttgagatgggccacaccgcgcccgaagaaaagcccgggcagaccgtgctgcagcccgccgccctggcacctgccgcgcggcccgctgcgacccagccgaaaaagggcggcttcacgacgctgtccgcggcagaataccgcgctttgaacggtctgaccgcgcccgtgcctgcgcgcccgctgccgacggcgcagggcgttcagaatgcacagggcacacagcctgtcccgggcgtgctggaggcacagtccccgaagcccgcctacacggcgggacccgcaccgagaccgctgaccccggtcacgccggtgacggcggttgaaacgcccgcgtcggagcccgtaacgattcccgccccgcagccgatgccccacgccgtcagcgatgacacggtgctggacatcctgccggagctgcccgacgaggcccccgcgacagaccccgagacggattacgttcggaatgacccgcatgctttaagcgccctgcccgacatggtcagcacacgtcccgagcagacgacgctgactccgccgcctgcaagtgagccgctgcgccttgtcggcgaggtgttcaagacctatatcatcaccgagcgcggcagtgagatttgccttatcgacaagcacgctgcgcatgagcgcattctgtttgagcagctggccagggactacggcagcgtgccgtcccagatgctgctcgtccccgtgcaggtcaatctgaccgccgcggaaaaacaggccgttttgcagaaccttgaccttctgaccgatgccggcatcgaggccgaggacttcggcggctcgacggttgtcgtacgcgccgtgcccgcggacgtgccggtggacgatgtagaggatatgatcgtggagctggcggcaaagctcgccgacggcggacgcgatgccctgcgtgaaaagaccgagtgggtgctgcattccatcgcctgccgcgcggccatcaaagcaggggaccgcacgaacgccgccgagatgctcgcgctggcccagcgcatcatggacggcacaatcccgccgttctgcccgcacgggcggccctgcgtattgaaaatcacccggaaggagctggaaaagcagtttggccgacttgtctaaaccccgcgtcgtcgccgtcggcgggccgacggccagcggcaagaccgcactttccgtcgcgttggccagagcctttgacggcgagatcatcaacgcagactcgatgcagatttacaagaatctcgacgtaggcacggcgaagccgagtgcggaggagcggcaggggataccgcattatcttttggactttctgtcgccggagaccccttacagcgtggcggacttcaccgccgccgctgacccgctgatacgggacatcacggcccgcggcagactgcccctcgtcgtgggcggcacggggctgtatatcaccagtcttttgagcggtatggcgtttgccccggaaaagaccgaccccgccatccgcgcccgattacaggcgcgggcggacaccgagggcagcgcggcactttacgccgagctgcaaaggatcgaccccgactacgccgctcaggtccaccccaacaacctgccgcgcgtcatccgcgcactggagctgtttgaagccacaggccgccgcatgagcgaccagcgccgcgaggccaggcccgccgaggcaccctaccatgcgctctgtctctgcctgacctgccgggaccgcgcagtgctgtacagccgcattgaccgccgcgtggacgaaatggtcgaaaacggtgtgctggacgaagcaaggcaggtctacgatcaccgcgatgcctaccgcacggcggcgcaggccatcggctacaaggaattcttcccgtactttgagggcacggccaatctgaccgaatgcaccgagcgtctcaagcaggcaacgcgcaactacgccaagcgccagctgacctggttccgccgccagaacgacgcggtgtggctctatctggatgaggaggatgtcactgagcgcgcctgcacgctggtgcgggcctttttgcacaacgaggaataacggaaaggagggtgcaccgtgagcaaccggcaggaccgtccgctggcaaaaaaacttttacacgcgctgggtctgctggcactggcactcttcctgctgtatgttgccgtccagttcgtgctgatcttccatcggtcctacaagaccgagaccgccatccgctacacgctggccgaaagcctgaacctgaccggcgttgtggcgtttgacgctgtggatgtgccgggcagcggcaatctcggctatcttgtgcaggatggcgagcgcgtgacgaacggcacggtggtagccgaatgctacaccgatgacacccagggcctgcagcgtgagcgtctggaccggctcgagcgctccatcacgctgcttacgaagtcgcagaattctgccggcagtgagctttcggtgctgacaaaccagacgaaacaggcgttgtacaacctgctggataagctggacactgcccagtataccggcatctccgacgcgcaggacagctttctgctggcccagaaccgtctgcagatcagcaccgggcagacggcggatttctcccagtccatcgcagcgctgcagaccgagtacgacggcatcaaggcacagctcgacacgctgcagaccgttaccgccacaacgaacggctatttcagccgcacggaggcctcgcccgccatccggacggactgccgggcgctggccgacgccgacccggcaacgctgcaaaaaatgctggcagacggcttcccggcagcggatacaaaccgcgccggacagatcgcgacgggcttcagctggaaattctacgcggtctgcgatttggataccgccgcacggttcgacggtctgtccacggtgaaaatcagcgtacccggcaagcagaacaccccgctttccgccacggtggaggaagtcaccgaggacaaggacaacggcattgccaagatcgtgctgcaatgccagaccatcagcgccgaggtcctgggcctgggctgcgagaccgtgcaggtcgatttaaaaacctacgagggcatccgcatcgacaaggcggcgctgcatatcgtgaacggccagcgcggtgtctatgtcaagtacggcaacctgcagcgctttttgaagatcacaacgctgtatgagaatgacagctacattcttgtcccggaggacggcaagctcggcagtgcaaatgaggtgcgcctctatgatgagattatcgtgcagggcacaaatttggaggatggcaaactattgtaacgaaaatacgccgtttgtattgacaagactgccaaaaaagaagataatatttaatgtatatcgctgtaataacgcgctgacgtaaacggcgctttctgatcaaaggagttttacgaccatgtccatgcttgacagtttgagaagcaagctcggtatcgatcccgacgcagattcctatgtagatgacactgaagagaatgttttccccggcgggcagggggctgcagctgcgcaggagtatacccagcagcaggagatcaaacagcacagcaataaggtcgtgaatatcaacgcgacgacccagctgcaggtcgttctggtcaaaccggagcgctttgacgatgcgtccagcattgcggaccagctcaacgccaagcatactgtggtgctgaatctggagtctgccagcaaagaggtctcccgccgtctgatcgacttcctgtccggtgtagcgtatgccaacaacggccagatcaagcgcgtggcgaccagcaccttcattattacgccgtacaacgttgatattatgggtgacctgctcgacgagctggaaaacaatggcgtcttcttctgataccgccaatgcggtgcgcggctttgtgccgccgcagaatgacgacgagcgccgcctgatgcgccgtgtcgaggagctgtgccgcgttgcggtaagccgcggcatcccgcgttatacgggttttctctcggaccgggagcagagtctggcgcaggccgcctgcaacaaggccgggtgcaactgcatccgcttttggggcggctttgacgcggcagaacgccgggtgctctgtattgagccgcccgatgcctggcaggaagaaccgctggcctacctgcaatgcaccgcttacggggataagctgccgacccaccgggattatctcggtgcgattctgggccttggccttgagcgcagctgcgtgggggacctgctggcagaccccgagcgtgaggacacattttacgcggtgatcctcgccgacaagcaggaatttataaacgcggagctgaccggcgcagggcgctgcaccgtgcatactgcgtgcatcgacgcactgcccgcccgtctggccgaaagccgcgagcgcaccctgcaggaggctaccgtgccgtccctgcgtgcggacgcggtgctggcaaccatgctgcacacctcccgcacccgcgcggcagaatatatcgccgcgggccgtgtggagatcaaccacctgccgttgaaggccgcccacgagaccgcctacgccgcggatatttttacagtgcgcggcgtggggcgcttcaagctggcggccatcggcggcaagagccgcaaggatcgtctgttcatatccttttaccaatattgagcgcaggatcgcccgcagcgctgcgggcagggaataacggggccgtgtgccccgcatacaggaggaaagccgtcatgatctcttccgaggatgtccgccacgtcacatttgacaaagcgttccagggctatcgccgtgaggatgtggatgattatctcaagcaggtcgcccaggcaatggacgacctggctgcccagaatgatgatttgcagaaaaagctcgtcatgctggcccagcgcattgaaaaataccgaacgatggaaaactccctgagtacgtcgatgatcaacgcccagcgcatgggggacagtattatccgcgagtccaagcagaaagcggcggagatcatccgctcggccaacatcaaggcggaggaccgcgagcagcgcgcccgcgatgacgtcgagctggccaagcaggagatcgtcacgctcaagggtgaggcagacagcttcaagcgttcgctgatcgagatgtaccgcaaacatatcaaccttatcaataaactgcccgattacaccagacggcccgaggatgaacccgttccgccgccgtccccggccccggagcaggccgctgcccctgcggcagagccgcagcccgctgtgcaggccccggtctacacggcccccgcagcccagcctgtgccggagccggccccggtacagcaggcagcccagatgcccgccatgcaggagacggcctactatgagccgcccacagccaagcccgtgccggagccgacggaaagtgcccgggctcagagcgaaaaggtagacacggtggaatttgccatcgcgccgcacccggaggagccggaggaagccgagcccgccccgatccccgtggaggagcctgccatcgacgagacgcggttccaggatgtctccggcctgtatgacgagccggaggccaagcctgcccgccgccgcaaggccggtacgaccaggcgcacgacccgcaaaaaggcaagtgacgaaccgcaggaggagctgaattccccggcgttcgataactttgaaggcgttgactttgacagctgacgcccgatgtgatataactaaagaatccaataaatagaggagagtaggaaactttggcgcagaactacaacgacaccatccataagatgcagaccccgtttgaaatgcgggccggtctgccgaagaaggaacccaaaatgctcgaggactgggagcagaaccatgtctatgagcagatgattaagaacaacgagggcaagccgcagtacatcctgcacgacggccctccgtatgccaacggcaatatccacatgggtacggctctgaacaagatcatcaaggacatcatcatccgctataagaacatgtccggcttccaggcaccctacgtgcccggctatgacacccacggcctgcccatcgagctgaaggcgctgagctccctcggcgacaagaaggccggtgtctccaagctggagctgcgccagatctgcaaggagtttgccaccgagcacatcggcgtcatgaacgagcagttcaagcgtctgggcgtgcagggcgactttgagaacccttacctgaccctgcgccccgagtttgaggcccgccaggtcgagatcttcggggagatggccaagaagggctacatctacaagggcatgaaggccgtgtactggtgccccgaggaccgcaccgccctggccgaggctgagattgagtacgccgaggacgagtgcgattccatctatgtccgtttcaagctgaccgacgaccccaacggcgtgctggccaagcataacatcccgctggacaaggcatggatcgtcatctggacgaccaccacctggacactgcccgccaacgtcgcgacctgcctgaaccccaatctggaatatgccttcgtcaagatcggtgacgcctaccacatcatggcccgcgagcttgttgagtccacgatgaagggctgccatatcgacgagtacgaggtcctgccagagactgttctcggcagtgagctcgagctcatgcagtatcagcatccgttccttgaccgcaagggtctggtcattctgggcgaccacgtcacgctggaaggcggcacgggctgcgtccacaccgctcccggccatggtgttgaggactttgaggtctgcgtcaatcactatccgcaggttcccgttgttgttcccgtggacgacgcgggccgcctgaccgccgaggcgggcgagaagtttgccggtctcaaggtctgggacgccaacaaggtcattctggagcacatcaaggagagcggccatctgatgggtgtgcagcacatcacccaccagtacccgcattgctggcgctgccatcatcccatcatcttccgtgctaccgagcagtggttctgctccatcgacgccttcaaggaggacgtctacaaggccattgacagcgtgcactggcagccggcgtggggccatgaccgcatggccggtatggtccgtgaccgcagtgactggtgcatcagccgccagcgcgtctggggcgtgcccatcccggtattctactgcaagaagtgcggcaagtaccatatcaccgatgcctccatcaaggctgtgtccgacctgttccgcaaggagggcagcgacgcctggtacaagtacgatgccaacgacatcctgcccaagaccgaggtctgcgagtgcggtgcctccgactgggagaaggaccccgacatcatggacgtttggttcgactccggctccacctggagcgctgtctgccgtgagcgccccgagctgcgctggcccgttgacatgtatatggagggtgccgaccagttccgcggctggttccagtccagtctgctgaccagcgtcgccacccagggtgtggccccgtaccgcgaggtcctgtgccacggctgggtcgtcgatgcccagggcaagcagatgcacaagtccgccggcaacggcatggagcccagtgagatcatccgcgactacggtgctgacatcatccgtctgtgggtcgcttccagcgattacaccgtcgacgtccgcgccggtaaggaaattttccgccagctgtctgaggcgtaccgcaagatgcgcaacacggcccgcttcatgctgggcaatatcagcgactttgatcccgcgaaggatatggtcgatgatgaccagctgttcgagatcgaccgctgggcgctcgaggcctgcaacaagctgaccgccaccatgcgcgatgcctacgaacactacgacttcagccgtgcctaccacgcactgtacaacttctgcgtcattgatatgtccaacttctacatggacgtcatcaaggatcgtctgtactgcgcagatgaccacgcacgccgctgtgcccagaccgcgctgtaccgcatcctggtcgacttcaccaagctgctggcacccatcctgtgcttcaccagccaggagatctggagctacatcccgaagctggacggcatgaaggactatgttgtctttgagcagatgcccgaggccaaggctgccgccgatgaggcgtttgaggccaagtgggaccgcatcatggccatccgcgacgatgtcaagaaggtgctggagcaggcccgtgccgataaggtcatcggctctgcgctggaggccggtctgacgctgtactgcagcaaggaggtctacgacttcctgaacgccatcccgatggatgagctggctgacctgttcatcgtctcccacgttgaccttgtcgagggtgagggcggcgtcaagggcctggtcgagggtctcggcgtcagcgctgcccatgcggctggcaacaagtgcctgcgctgctggaagtacgagaccaccgtcggtgaggacggcctctgcccgcgctgcgctaaggtcttgaagcagtaaatttactctaccgtcagcggtgcttatacgtttaagcaccgctgattttttcggataaggtgttgtatgatttctggtttgttatcgctggcaggagcggccattctggtcgtcattgaccagctcatcaagcactgggccacggcggcgctgctgccggtgggcagcatggacgtgctgcccggcgttgtggagctgcgctactgcctgaatgacggcatggcgttttcgatgctggccggtaagcagggactgctcatcggcatgacgtcggtcatgctgctggctgtccttatcatgctgttcgtgcgcaaaatgccgctgacagagcgcgcggcctggacgctggtactgggcggcggcgtgggcaacctcattgaccgcgtgctcaacggtgtggtcgtggactacatcaatgtgctgttcatgcggtttgccatcttcaattttgcggacatctgcgtctgtgtcggcgtcggcctgctgatgctcgccgtaatgctggactctttcaaaaaggataagactgcagagccaaaggcggacgaagatggagcggcttgagcttaccgcagcccccggcgacagcggacgcctggacgcctggctggccggacagtgcccgacgctgtcccgcagtgcgctgcaaaatctgatcgagcaggggcttgtgacctgcggcggcgcgcccgtcaacaaaaaggataaggtggcgcccggcaaaatctacgccatcgacctgcctgacccgcagcccatcgaggcccggccccagaacatcccgctggacattgtgtacgaggacgacgacctgctcgttgtcaacaagcctaagggcatggtcgtgcacccggcccccggcaacccggacggcacgctcgtcaacgcgctgctttaccactgcgcggggcagctgtcgggcatcggcggggccatccgcccgggcatcgtccaccgcattgacaaggacacgagcggccttctcgtcgttgccaaaaacgatgccgcccatcaggcgctcagcgcccagatgagcgtacacagcatccaccgcgtctaccatgccgtggtgtacggtaacctcaaggaggacgagggctttgtggaaaagtggctcggacgcgacccgcgggaccgcaagaaaatggccgtcctggccgagaacgcggcgggagccaagtatgcctacacgggctggcaggtgctggaacactgcggtaatttcacttacattgcgtgcaaattaaagaccgggcgcacccatcagattcgtgtacacatggcctcgacggggcatccgttggcaggggatgctgtgtatggccccaaaaactgcatcaaatcgctgaatggccagtgcctgcacgccaaggagctgggcttcgtccacccgcggacaggggagtggatgcagtttgattcgcccctgccgccctattttacagagtttctgacacggttaagaaaggaacatcgcgcatgaaaccacccctaagcgatacccttgtgatctgtgatatggataatacgctgctgacggccaaggagggcatccccgcctgcaaccgcgcagtcatccagctgtacaccggcatgggggggcttttcacggtggcaacgggccgcccgccggagtccatccgcgcggcgctggggaacatccgcctgtcgctgccggccatctcctgcaacggggcgctgctgtatgatttctccgccgaatcggtgctgcaccgctcgacgctgaaccgcgagcaggcgacgacggccatccttgacatcctgaacaagttcccgcatataggcgtggaggtcatggccggaaacggcgagatgttcgtcatccatgccaatgaggtgacccacgcccatcaggtggacgagcacctcggcagcattgcctgcccggtggagagcgtgcctgacggctgggtcaaggtcgtctttgcctccgacccggagagcatccgcaagctgggccagtacgccaagacgcggtactacgggcgggaaaactacttcctggctacgaacagcatctacttagagatcatgcccagcggcgtcagcaaggccagcggtctgcatgacctgtgcgccctcatgagcaaatccatgaagaacaccgtcgttatcggtgattactacaatgacctggagatcatgcgggaggccggctacgccgtggctgtcgccaacgcaccggcagaggtcaaggctgccgccgaccatgtgacgacctgcacctgcgccgagggcgcagtgggggagtatctgtacagcctgatcagcagggccgaaggacgtgaggtttgacgatgaaggtcagcgaactgatgaaccccaagggcgtactgctctatgcaaagatcgataactctgccgacgcgctcggcattctggtcgagctgcaggagggcatcggcgttatcaccaacggcaatgcctactacaatgcggtcagctaccgggaaacgttcggcggcacaacggccatcgggggcggtattgcgctgccccacgcctgcaacgcgggcgtgtccgcaccgggcatctcggcgctgctgctgcgccgcggtgtcgactggggcgcaccggacggggaacccgtggatcttgtgttcatgatcgctgttccgccgggcagtgagagcctgcatctgcagatcctggcgcggctcgtaaaccttctgagccgcagcgaccttgtggaaagcctgcgcacagccagcaacccccaccgctttgtggagctgatcgccaaggcggaaaacgcctgctttgcggaataaaaccgaaagttgtcccagcttatttgcaagctggggctttttgtttgcctccgcaggggcgcattctatatgcgctcgcgcaacctgcggtaactaccgcgggcggatatgggacccgcccctacgaggcatcaatttgggcattcgtcaatataaccaaaaaacgccgtaaatcgcataacgcattatacgtatttgcgcttgctttaaaccggtgaagtgtgctatactttaaagcactaaaccggctgcgcaggagggacccgcgtgaggagacgcgggtgtacacctgaaacaaaaaggttgcgcagcaggtactatggaggaatagacatgaaaaaagcagtttcccttatgatggcagccgccatgaccatgggtctggccgcctgcggctccaccgcatccaccgacaccgccgcttctgctgcggacaccgcctccagcaccgaggctgctgcaagcactgctgacagcaccgccgctgcggatggcaaggtctataacatcggtatctgccagcttgtccagcatgaagcgctggatgccgctactcagggcttcaaggatgctctggtcgagaagctgggcgagggcagcgtcaaatttgacgagcagaacgcctccggcgattccgccaactgcgccaccattgtgaatggctttgtctccaacggcgttgacctgatccttgccaacgccaccgcaccgctgcaggccgccgcacaggcgactgccgacatcccggtgctgggaacctccatcactgactacgccaccgcgctggacatcagcgactggactggcactgtcggcaacaatatttccggcacctctgacctggctccgctggaccagcaggcagccatgatccaggagctcttcccggatgccaagagtgtcggtctgctctactgcagtgcagagccgaactccgtctaccagtgcgacgtcattgaaggctacctgaccgaggagggctacaccgttgcccgctatgccttcaccgatacgaacgacgtcacctctgtggcccagactgctgccgataactccgacgtcatctacatccccactgacaacaccgcagcctccaacaccgaggccatcgcaaacgttgtcatccccgccaaggtccccgttgtggccggtgaggaaggcatctgctccggctgcggcgttgcaacgctctccatcagctattacgacctcggctacgccaccggtgagatggctgccaagatcctcgcggacggcgcggacgtctctgcgatgcccgttgagttcgctccgaacgtgaccaagaagtacaacgccgccaactgcgaggcgctgggcatcacccagccgtccgactacgtggctatcggctgattgatctgaactgcgactgaaaatcatcataacagcgaggaaggggagattgctctctttccccgctgttttggtgctttacgaaatgaggatgtttttatggatttcctgacctctttggtaaactccatgcccggcgctgtggcacagggcctcatctggggcatcatggccatcggcgtgtacattacctaccgcattctggatgtggccgatctgaccgttgacggctccctcggcacgggcggcgcggtctgcgtggtgctggtgctcaacggtgtgcctgtgggcgtcgcccttgtggcagccacgctggtcggtatgctggcgggccttgtcacgggtctgttccacacggcctgcggcatcccggcaattctggccggtattttgacccagctggcgctgtattctgtcaacctgcgcatcatgggcaccggcacgggcggcggcaaggcaaacctgcccatcagtgtggacaagtacagcctgctggtctcggcccgctatgtccgcgcgctggcgctcaacaacccgatctttgtgctgctcatcttctgcgcggtcctgatcggcgtgctgtactggttcttcggcacggagcttggctgttcgctgcgcgctaccggcgcaaaccagcacatggcccgcgcccagggcatcaacacgaacgtcaccatcgtgctcggccttatggtttccaacggccttgtggcgctggcgggcggtctgctgtcccagtaccagggcttctcggacatcaacatgggacgcggcgccatcgtcatcggtctggccgccgtcatcatcggtgaggtcatcttcggcaagatcttccgcaactttgcgctcaagctgaccgccgctgtcatcggcgcgatcatctactacatcgttatgaacttcgtgctgcgcatgggtctgtccaccgatgacctcaagctgctgaccgcgctggtcgtggcggtgttcctgaccatcccgtactggaagggcaaatatttcaccaaagtacccgtgaaaaagggaggcaaggacaatgcttgagatcaagaatgtatacaagaccttcaatgcaggaaccgtcaatgagaaggtcgccttgaagggactggatctgacgctggaggacggcgactttgtcacggtcatcggcggcaacggcgcgggcaaatccacgatgctgaacgccgtcgcgggcgtctggccggtggatatgggcaaaatcattattgacgggaaggatgtgacccgcctgtccgagcaccagcgtgccaagtacataggccgcgtattccaggatccgatgatgggcaccgccgcgacgatgcagatcgacgagaacctggccctggcggcccgccggggtcttgcccgcacgctcaggatcggcatcacgaagaaggagcacgacgaatactacgaactgctcaaaacgctggatctggggctggaaaaccgtatgaccagcaaggttggtctgctctccggcggtcagcgccaggctgtcacgctgctgatggcaaccctcaaaaagcccaagctcctgctgctggacgagcacaccgccgcccttgaccccaagaccgcggccaaggtgctgacgttgtccgagaagatcgtcgaggagaaccacctgaccaccctgatgatcacccacaacatgaaggatgccatcaagtacggcaaccgcctgatcatgatgtacgagggtcacgtcatctacgatgtgcgcggcgaggaaaagaagaacctgcaggtcagcgacctgctgcagcgctttgagcaggtcagcgacggcgagtttgccaacgacagaatgctgctttcctgaaatcgaacccaattttgcccgggatgtcaaatcccgggctttttgcttgtaataaaattgtaatacgtgacaattttttgaaaaccatgttcaaagcccggcaaatatgatataattcatactatgtatactaggtgggttgtggccatgggtacgcccgctttcgataattaaggaggttgccgttcccgatgagcagagaacgtaatgaggagaaaaaaggcctgagcccgacacagcgcaaagcgtgtgtggtgctggcgctgtgcgcgctggccgttgtgatgagcattctggcggcgtgggtgctgccgacgaagctgggcctgtttgcaggcgggaaggattcctacgacccggacgcctacccgctggatacgacgctggattccatcctgccgcagagcgcggcggatgacgcctacattacggccagtgtttttgcgggtgaccagtacgccgtgacgctgcagaaggacacccgcatcacgctgaatcagtttgtcgggcaggagggactgcagatttccaaggcgttgtccacctcctgcgtaaactttgcatcggacgccagcagctacacgatcccgcaggccatccccaagatgaaggcccgccgcgtctttgtaatgctgggcgcgaacgatgtggacggctcggtcagtgtggactccttcattgccgactacaagcagttcctgcagagcatccgctcggcctacgcctactgcgacatcatcgcggtgggcatcccgcccgttaccgaggacagcacgaacgctgccgagacccagacccgcattgaccagttcaaccaggccattgcggcggccagcagcgatctgggcttcaagtacctgaacaccgccgaggcccttaaaaacacccgcggctacggcgagggcacctactttgaatccaacggtttcagcacctccggcgcacgcgccctgctggagtacgccaagagccacgcctgcaatacgatggacagccgccccgacacgtcggacatcccgcagcgtgcgtcggcctctgcaggcagcaacacgccggtgccgacctcgacgccgacgaagttcacggccagctatgaggtcgaggacagcgccaagggcacgctgaccggcaacggccagaccggcgtgtccagcgtcgaaattcaggccgactccggcacaagcgtcaacgtcacggcagtggcggcggagggctttgtgttctacaagtggagcgacggcgtcaccaccgcgacccgctatgacaatattaccaaggacatctccgtcaaggccatgttcaacgacgcccgcgttgagctaacgctggacaagggcgatacgacgatcaagcagggcgagagcttgactgtcaatgccgcggtcaagctgggcaacaaggcctacgacgccgcgaacgtccagtggtccatcaacgatgagatggagaagaacggcagcagcctgaccttcaagcccgatgccgccgggacctacacgatcaaggcaggcattgagatcaacggcaccttctcgacggcacagctgatcgtcaccgtcgaggccgaggccaccacgatcaacatcagcggcacaggcacgctgaccgcaggccagagtacgacgctgacggctaccgtggaaaacggcagcggcgacacgctctggggctgcgaggaaacctcctggcgcacaacgggcacgcaggtgaccttcacggccaacgagccaggcacctaccacatccacgcggccaacaacggtgcggacagcgtctttgtgctgactgtcagcgccgcggctacgccggaacccaccgctgtgcccacgccgatgccggagccgacccccgccgattccacaccgcaataagcatacgaggttacgaagatggcaatttatacctgcgtcctgctggacgttgacaacacgcttttggactttgacgccgcagagcgtcaggccctgaccgatatgctcgccgagtacgagctgccccacgacgaggccgcttatgatacctaccacaaggtcaaccgcgagctgtgggactcgctggccaaaggccagctgaacaagcagaagctgttccaaatccgcttctcccgcttcatgcagaccatgcagctgcccgacaacggcaagggcaaggccatgaatgaccgctatgaggagctgctggcgacccatgccgacctgctgcccggcgcactgaccgcgctggaggagctgagcgaggtcgccacgctggccctcgtctcgaacggtgccattgccgtgcaagagtcccgcattgcggcctccggcatcgacaggtacatggacggcatttatatttccgagaaggtcggcgcggccaagcccagcgccaagctgtttgagcatgccttccgtgacctcggcatcacgaacaagagccgtgtgctgatggtcggcgacgatctgctggccgacatcaagggcggcctgaacgccggtgtggatacctgctggttcaacctcggcaatcttgaaaacaagtccggcatcacgcccaaatatacggtgagctcctatgaggagctctaccgcatcgtgatggagccggaggaactggaaaatatcggcgtgcgcaaccgccgccacagcaacgaagccctgctgtaaggcaagggcgcactgccgctgcccgtttgtcaggcggcggcatcattttggaattgaggatgtaccgctatgttgttggaacttcaaaacttaggcaagagcttcggcgaacacgaggtactgcgtgatgtaaatgcaggtgtcgagcgcggggaccgtatcggcatcatcggtgccaacggcaccggcaagacgacgcttttgcggatcctctgcggcgagagcctgcctgacgccggagatgccgcgttcggcaccggcgtgactaccggctaccttgagcagaacgcccggctggacccgtcactggacatctatgccacaatgcggctggtctttaccccggcgcttgacgccatgcaggagatggacgcgctgcaaaagcagctggccgcagacccgcacaatgcggaactgaccgaaaagatcgcccactgcaccgctgtcatcgacgcgatggacgcttataacatggacacccagatcaaaaaggtgctcaacggcatgggctttcccgccgacacctggacaaagctggcgggtgtgctttcgggcggtgagcagacccggctgcgtctggcacggctgctgctggagcgccccgacctgctgattctggacgagccgacgaaccatctggacctggaaacgatggagtggctcgaaaattatctgaaagcctaccgcggtgcggtgctcgttgtcagccatgaccgctacttcctcgacgccgtctgcacccgcatttgggagctgcgcggcaagagcatcaagacctaccgcggcaactactcggcctatctgccccagcgtgaggccgctgacgagcgccagcagaagctgcatgacgccgctgtagaaaaagctgccaaattgcaggactacgtggaccgcaatcttgtgcgcgcctccacgacgaagatggcccagagccgccgcaagcagctggaaaagctcgagatcgtcgaggccccgaccaccgaggcgtgggagctgaactttcgctttgagtacgacattgagccctatgacgagctggtcatcatgaagaatctgagcgtccatatcggtgaacgcaccctcatcgacgccctggactacgtcgttcaccgcggggacaagctcgtcattgcaggtcccaacggcgcaggcaagtccacgcttttgcaggtgctggacggcaagcgccgcccgtcaggcggtatggtccgcctgggcagcggcaccaagccgggcgtattcacccagcagcaggcccgccgcgcaggccgcgtcattgatgccatctggaaccagtacccgcgctttaccgagctcgaggtccgcagtcatctggcacgcttcggctaccgcggcgaggaggtctttaaggactgtgcgtcgctgtccggcggtgagctggcccgcctgcgctttgctgagctggcgctcgagcgcccgaacctgatgttcctggacgagccgacgaaccacctggacatctatatgcgcgagagcctgacccaggcgctggcagcctacaccggcacactgctgcttgtcacccatgaccgctacctgatgcagacgctgggctgcccgatcatgtacctggaggacggcaaagcgatgttttacccgagctttgccgccctgcaaaaccgtgacgcgggcaagacccaggagcagcaaaagaccgaggatactgccaaaaagcaggcatacggcaaggagcagcgcaagcgccgcgccgaggtccgcgcccgcctgaaaaaggtggagagcgagatcgaggagctgggtgcgcatattgtagagctggaaaatgagatcaacgaccccgaggtcctgcgcgaccatctgctgctgcgcgacaaatgcgacgagcttgacgacactcgcttccaccagcaggagctctacgatgagtgggaaaagctggccgaggagcaggaaacctttgaaaacgagggcgaatgacctttttaccgttctgtaacttgtattcctgcccaaaagcgctatactataggtttagcaagctcaccaggaaaaagagtataggaaagtatgtaaggcgggtagaacacattgcagaccaccattatcgtagcaacgcataaaccgtactgggtgccggatgacccgatgtaccttccggtacagatgggccatgccgtccacccggcctgcggctatatcggcgatgataccggcgacaatatctcggagcgcaacgcaaatttctgcgagctgacgggcctgtactgggcggcgcacaacatcgattccgattatatcggcatcgtgcattaccgccgctattttgccagccgccgcaaaagccgctttgcggacaagaagtcacgtgtcatcagccgtgaggagctctgcagcattctggctacgacgaacgtcgtcctgccgaaggagcgccactattttattgagacgaactatacccagtatatccacgcccatcacaagcaggatctggaggtgacccgcgccatcattgcgcgcaaatgccccgagtacctgcccgcgtatgacctgtatatgtccaagacccatggccaccacttcaacatgttcgtcatgaagaaggaacttttgcagcactactgcacctggctgttcgacattctgtttgaacttgagcgggagctggacatgacgggctacacggtcaatgaccgccgggtctttggctttgtgagcgagcgtctgctggacgcctggctcaccacgaacaacatcagctttgaggaactgagcatcgtttacatggagcaccagaactggttgcacaagggcacagccttcctcaagcgcaaattcttcccgaaaaaagatgcttgacgcaagaaatgtcacggccatcgtcgtgacctacaaccgtctgccgctgctcaaacaatgcttggccgccctgcgtgcccagaccgtgcagggctttacggtgctgctggtggacaatgcgtccactgacggcacggcggactatataaagacgctggcaatgcctgggctggtctgccgcaatccgggggaaaaccttggcggtgcgggcggctttgcctacggcatccgcgccgcggcggagctggggtgtgaggccgtctggatcatggacgacgacacgctgcccgagccggacgcgctggccgcactgctggccgccgatgccgcccacggtgacggctgcggctggctgtccagcagggcactcgccccggacggtaccgaccagccgatgaacttgcagcgcaaaacgatgtaccgcgatattgacggcttcgatgcggcggaggttcccgccgtgatggcgagctttgtctcgctgttcctgcgcaccgaagccgtgcggcagttcggcctgccgattgccgagttcttcatctggtccgacgactgggagtacacccgccgcatttcccgcgcaaagccctgctatgtcatcccggccagccgggtcgtgcacgccatgcagaaccccggcgtcgtgaacattgccagggatgtgcccgcccgctgggcacgctaccgctatttttaccgcaacgatgtggtgctctaccgccgggagggactgtccggctggctgtggctgctggccaaggacagctggcacaccatacaggtcctgcgcgacaggcagggctgccgcgccgagcgcataagaatcatctggaagggctttgccgccggggtgcggttccgcccgcagataccgtacctgccatgaatctgacaaaacaaatttgccataaagctgcgcactttgacgccgtcgcctttgacgtgtttgacacgcttataaaacgcgacgttgctgtgccgacaggacttttccgcctgatgggcgacgatttttacgctgcccgcatccgggccgagcgtgaggcccgcgctgcccagagcagggaagtaacgctggctgaaatctacgcccgcccctgccttgcccgctatgacgcagcggcggagtgtgctgcagagctggccgcctgtgcggcgaacaaacccgtgctggatgcggtgcaaacgcttaaaaagcaggggaaaaggctctactatatctccgatatgtacctgccgcagacgcagatcgacgcgatgctgcgccgctgcggctatccctgctttgacggcggctttgtctcctgtacttacggcgtgcagaagcgcagtggcagactgttcaagcgttttttgcaggaaaccggcctcacggcgaagcagctgcttttcatcggtgacagctggcgcgccgatgtggccggggccgcgctggcgggcatcaccgcctggcatctgccgacgccgtccgcacctgcggatgacgctgcggcttttgtggagaaccgtctgccgcagcagcgatctgacggtgaggctctcggcttttccgtgctgggaccgctggcagcggcattctgccaatggctgcacgcgcgccgtgccgcccgcccggaggcccggctgtatttcctcgcccgcgatatgtacctgatgcgggacgtctatcacacgctctacccgcaggaggagacaggctatttacaggtctcccgccgcagcctggctccggcgtttctggcggcgggggactgggccacagtgctggccgccctgccgcggcagactttgaccggtgcacagatcgccgaatactgcggcacgacctgcccgccggaactggcggacaggcagtttgatttgaagcagccggacagggaagcgctgcacaccttttttcggcagctgccccgcccggacgccgccgacgcggtcacagcctatctgtctgcgcagggcatccgctccggcgatttccttgttgacatcggcagcggcggtacaacgcagctgctgttagagcgactgctgcaatttccgctgcacgggctgcagctctcggcggatgaccggctgcgcacccgctttgcgcccgaccaaacggaagtattcctgtttgacggcaagccagcgccgcgcctgtattgggcgggtcagccgatgctcgaacgcctgctctcacaggatgtcggggccacgctgggctactgcgcggagaaggggggcatcgtccgtgtgcgcacggccaggcagcccgcagagccacgcattgcacagatccaatccggcgtgcgccgctttgccgccgcctggcgggacagcgtgctgaacggccagcccattccgccgcagcgggccattgccccgtttttgcggctggtggaaagcccgacagctttacagctggatctgctcggtgacctgacggttgaggacggtggcacctatccgctggccgcgccgcagcacacagcgcactacctgatccacccgcggcaggcaaggcgtgactttgcagaggcacgctggaagatcggctttttgcagcgtgccgtaccgctgccgctgccttacggaaaattatatctgaaactgaaaaaataatgcgaggaggtacccccatggccaagatcagcgtgatcgtcccggcgtacaatgccgagacgaccctgcgcaccgccgtggaatccatcctttcccagcaggtgccggagctcgagatcgtcatcgtcaacgacggctcgacggacggcacggaccggctctgccacacgctggcgagcgagtgcccctgcatccacgtcatcacccagaagaatgccggcatctgcgcggcccgcaaccgcggcatggaggccgcgagcggggagtacatcaccttctgtgacgatgacgacctgttctggcagggagcgctgcacctgcttttgcagacggcagaggacacccgcgccgaccttgtgcgcggcggctatgagctgctgcgccagcgcccggacggtacctttgccgagcagccgcaccctgccggaagcccctgcacgatagcgctgggccgcggcggtagctacggtgcttttttggagaacagcggcccgcagtttgtatggaacgccctctaccgccgcacggcgctgctggggctgcgcttcaatgagcggtgcagctacgggctggaggactttgtctttaacgccgcagcctatcggcgcgtcggcaaggcggtctacatcccgcaggtcgtctaccgccattttgagagcgcacagagcacctcctgcgcgcacacggcgcaggcacttttgggccgcatccgggcgctggagccatggatggaggctgaattccacgccgcccagcgctggtgcggcccggaggagctgcaggccgtctggaaggaccgccgcgcacaggccgtcacctttttgatgcaccagctgcgcgacgcacacgccccgggcgtgctgcgccgcaaggcctggcgcacgctgcgggaggccctgaccccgtacccgggcagtctgctggacaccctgcacgacgcgggacacaataaaaaacaaacaatggcactgcttttataccagatgcggctgcagaagctctacgatctgctgccggtcagagaggaacagttatgaaaacgattcttgttaccggtgcagcgggctacattggccgccatgtcgtaaaaaatgcgctggaccgcggctaccgcgtcattgcggcggatttcaacttcaagggcgtcgacgagcgcgccgagttctgcgatgtgccgctgttcggcggtgacgccgacctgtaccgcaagctgggcagcccggacgtctgcatccatctggcttggcgcgacggcttccgccataattccgccgcccacatgaaggatctgtccagccatgtgacgtttttgaacacgctgatcgacggcggcctgaaggacctgagcgtcatgggcacgatgcatgaggtcggctactgggagggtgctatcaatgagagcacgccctgtaagccgcagagccagtacggcattgccaagaacgccctgcgccagagcatgatgctgacgctggcggattccccctgcaagctgcactggctgcgcgcatactatatcaccggtgacgaggtgcacggcagctcgatctttgccaagatcacccaggccgagcaggacggcaaaaagacgttcccgttcacgagcggcagcaacctctatgacttcatcgacgtggacgagctggccaacatgatcgtggccgccagtgtgcaggaggagatcaacggcatcatcaatgtctgcaccggcaagcccatgagtctggcggaccgcgtggagcagtttctgcgcgacaagaactacaagatcaagctcgactacggcgcgttcccggaccgtccgtatgacagcccgggcacttggggcgacccgacaaaaatcaaccgcattctggcaaacgatacctgcaagcgtgcataacatacaaaaaggaaaaacgcaatgaaacgattgggcatctttttcttctatgaaaaaaacggcgacgtggatgattttatcacctactaccttgccgacctgaataagaacctgaccgagctggtcgttgtctgcaacggcaaattgagcgagcagggccgcgcggccttctcgcagtttaccgacaacatcatcgtgcgcgagaacaagggtcttgacgtctgggcgtacaagaccgcgctggattcctacggctgggcgaagctctcggaatttgacgagatcgtcatgacgaactccaccctgatgggtcctgtgcgcccgctgaaagagatgttcgacgccatgtgggagaatcaggacctcgatttctggggcctgtccatccaccacggtgccaagtcgaaccccttcaagggcaagcacctgtataactatctgcccgtacacatccagtctcacttcatcgtttaccgccagcgctttgtgcagaacccggagctgcaggcttactgggacaacatgccgatgatcgagagctacaccgactcggtgcagcgatacgaggctgtgttcaccaagcagtttgaggataagggcttcaagtgggatgtctatgtgaaaaccgacgacctgaaggacttcacagactatccgctgctcgtctgcccgacgcttttattgcgggagaaaaaatgcccgctgttcaagcgccgcagctttatgcacgagctggaggcctatctcaacgacacggcaggtgagccggtgcaggagctgtacgactatctgcgggacgagacggactatccgatggacctcatctggaagaacatgatccgcacgatgcacccgcacgattttacccgcaatctcgcgctgacccgcatcatcgagccgacggtgttggacgaggcaacggcacagagcatccgccaaaaccgccgcattgcgctggccatgcacctgtatttcatggatatgctggattccagcaaggcgtttgcggcaaagttcccgccagagacggatattttcatctcgacgagcagtgctgataagaagccgcagatcgaggccgcctttgcggacctgaacgtccgcagcgtcaccgtgaccgtggtggagaaccagggccgcgacgtcggcgccttcctctgtgacctggccccgcagctgcgggactatgactacgcctgcttcatgcacgacaaaaaagccattcagacccgccccggcagcgtcggcgcgagctttggctatgtctgcaatgagaatgtctgcaaaaatgctgctcatgtgctgaatgtgctgtgcgagtttgagaaggacccgtacctcggcattctctgcccgccgtacccgacgcacggactttacttcatgaatatgtgctccggcggctggggcccgaactttgagaacacgaaaaagctgatgaaagaccttggcatcgatgcgcctgtttccggtgaaaaatcgcccattgcaccttacggcagtgtgttctggttccgccccaaggcactggcaccgctgtttgaccacggctggcagcactcggacttcccgcccgagccgctgccccaggacggcacgatcagccatgccattgagcgcatctatccgtttgtggcccagagcgcgggctactacccggcagtggtcatgagcaagagctacgccgtgacccacaacgatacgatgcaggcctacgcgggcggcgtgatccgcccgctggcccgcgtgtttgactgcacgaccttctatggtgcggtcagctcggccaccggctttgcctacaaaaagcaccacctgttcagccactacggcccgtactccgacagccgccgccgtcacgcgcgcaactggctgcgggacaagctgcccgcaggctcctacaaggtcatcatcaacaccaagcgcgctatctttggcccccatgaaggcccctatgaggactgacaacgcatgaaacgactggtcatctactttcactatgacccggcaggctgcatcgatacggcctgccgcattgccgcacaggctgtgcagaaatacggcagggtcgtattcgtcaccaacggtacacttgccccggcggaccgcgtctgggtgcgccagtccggtgcgggccgcatcgaacgggaaaacgtcggtttcgatgtcggcgcatacagggaggctctgttgactctgggccgggagaagctggccgagtatgaggagatcgtcctgatgaactacacgctggccgggccggtctgctcactggcggcgatgttcaccgcgatggacgcccgcccggagctggacttctgggggctgacccgccactacgccatgcagagccgccgctttggcggcgcagtgcccgagcatctgcaatcccattttattgcggtgcgcccgcggctgttcaacagtgacgatttctggagctactggcaggaaatggcgctgccgaccagctacgagcagtctatcatccgccacgaaacgcggttcacgccgcattttgccgccaggggctatgcttgggatacctacgtgcagacggacgacctgaaaccggtttttgtaaaccccattatggcctgcccgcgggagctgctggcaaaccgcggctgcccgtttttcaaacggcgcagcctgttcacgccctatgcggatgaactgcgccgcacggacggcctcgccgcgcgggagctctgcgactatgtgacggcctatacggattttccgctggagctgctgctggtctcgctgttaaaaacacagccgctttcagcccttgcccaaaacctgcactggtgctatcctgtcggcgcaccgacaggggaaacacccgacctgaacgagctgggcctgcggctgcttcattacgaacagcccgccgcggaccccgtgaccgactggtataaccggcaggcagccgccaacgcggacacactgctggcagaagctgctgctttgtttgaaaaaaatccaatgcttggcgtgttaagcccatctctgccgctgtggcagggctgcaccgccgcccgccgcgccgtctggatgcgggagaaggacgcactggcacaggaggtatccgtgcccgtcggcagtgacccgccgcccgcgcccaactgcggttgggtgcttgtgcgggagtctgccttcctggacggtatcccagcctgcacaagccagcgtgacgcctggaaactggccctgaccgcccagaaaaacggtgcctatgccgccgcctttgagccgctgacccggtccgcggcgcgggcggatatcttaaatgagtatgagaccgccgccgctcagcctgccgctgtagccaagcagctggggcggctcgtcaagcacagactgcaaaagtaaaaggggagaccacccatcaaaaagcaacgcctgttttatcttgatcttgtccgtgccgcagcgctgatctgcatcttgatcgtgcatttcaacgcgacggtcacggggtattttacgctgccgcacaagctctttaccagcacgctgccgctgggcatttatctgggggatttcggctcctcgctgtttttcattgtgtccggcgcatcgctggcgctgaccgtcccggcggagcagaaccctgcgcagttttacaaaaggcgcgcgagggctgtctacccgctgttctggctcgcgtggttcgtcgtgttcagctatcggtttgtggcgcaccccggcagcttcggcggggccaggaccgtcacgctggtgctgacgcttctgggtctcgacaactttgccgttgccgcgggctgggtcggaacagactttgcctgtgtgggcgagtggttcctcggcagcatcctgtttttatacctgctgttcccgcttttgcagcgggggctgcgcaaaaagccgtggctgacctgggcgctgacgctggcggtctgcatcccggtgcacctgctgggctgggacgcgcggcttgtggccgtgcatatcccggaatttctgttcggcatgacgtttttaacgctcgccggacgcacacggtatattctggccccgctgctgctggcgggggccgtgctggcacagccctgggacggtaagatcacctgcgcgctggccggtgccggggtgttcatcctgctggcgctggcggccccgctgctggaccgcccgtggccccgcgcggtgggcgcacagcttgccaaaatatcctacgcggtgttccttgtgcatcacgttctgatccaggagttggccgcgcactttgatctggcggtgctgtcccgccgggacacggcgtttttgtttgtcgtctatctggccgcaacatttgccgcagcgcacgcgttgctctggctgcaaagaacgctgcgcaccggccttgccgccttgtgcccccaaatataaagctccgcccgctgtttccacaaaaacagcgggtatttttttaacattgtgcgcccgcgccctctgtacaaaaacgggcgggtacggtataatagaaaataatgtttgaaactaggaaaggggcgttccactgtgtccgaattctctgtttcccttgcaaaattggccgaggaagccaacctgacgattgcctacaccccctgtgagctggataaaattcaggtcacagccaccgaggtctaccgtccgggcatcctgctggccggttactacgaaaactttgacagcaaacgcatccagatcatcggcctgaccgagatgtcctatctggatgagctgtccacctcactgcgcaacacccatctggaaaagctgttctccttccagccgccggccatcgtgctgacccgcggcatgcagccgctttcggaaatgatgcagtttgccaagcagtacggtgtaccgatcctgatgtccaccgagatgacgtccgccctgatggggcagctcatcacgaccctgaacaccgagctggccccccgcatcacccgccacggcgtgcttgtcgaggtctacggcgagggcatcctgattctgggcgattccggtgtcggcaagagcgagacggccattgagctcgtcaagcgcggccaccgcctgatcgctgatgatgcggttgagctgcgccgggtatcctaccgcaaaattttgggcaccgcgcccgccaacatccgccactttattgagctgcgcggcatcggcattatcaacgtggcgcgggtgttcggcatcggctcggtccgctcgagcgtcgaggtcgagatggtcgtccagctcgagccctgggaccgcaccaagaactatgaccgcacgggcctggagacggagtattacgacatcctcggtgtcaaggtgcccagcatgctcattcccgttatgccgggccgtaacctggccgtcattctggaaacggctgccatcaacaaccgccagaaggagatgggctacaacgccgccaaggagctgctgacccagctgggcctggcagacgacattacaaaataaaagaggtttttccgttccatgcagatgatcgcagacctgcacacgcataccctgtgcgcaacgcacgcatacaatacttttacggaaatggccgcagccgctaaggagatcggctactgcgcgctggctgtgaccgaccatgcgcccgccatgccggattcgccccacgcctggcacttccagaactggagcgcgatgccccgggaaatcggaggtgtcgtcatgctctacggagcggaggccaacgtcatggacaccaaaggcgggctggacctttcggaaagccagctcaaagcgcaggattgggtcgtcgcatccatccatagctcctgcgtgccgggtctgctgacccgcagggaggctaaccgcctctggctggctgtggccgagaacccctatgtcgacatcatcggtcactccgagcaggaaaactaccgctatgactacgaccttgtcacgaaggcatttgctcgaaatcacaaggtcgtggagctgaacggcaactcgttcaacgtccgcagggacggcatccccaatatgcgcgccctgctgcgggcctgccttgccaacggctgtcatatttcagtggacagtgatgcccacagcacccaccagctgcagcacggcctgacggccctctacgccatgctggaggaaatgcagttcccgcaggagctgatcgtgaacgcgacgcgggaaaatctggtacaggaattacaactgcacggcaagccctgtgcagaagaaataggaggaattctgttatgagcaaatatacgattggtatcgacctgggcggcaccacaatgaccgccggtattgtcaacgaaaattatgagattgtcggcaagctgacctgggccacccgtctgccgcgcccggcggaagatctggaaaaggcactggccgacctgtgccgcaccgtggcccgggataataaggtcgattttgccgacatcaaatatgtcggcatcggcacgcccggcagcgtgaactttaccaccggcttcgtcggcttcaacacgaacttcggctattacgactggaacctcggccctgacttcgaggccctgctcggctgcaaggtctatgtcgagaacgacgccaacgccgccgcctatggcgagtacattgcgggcggtgcaaaggggtacaacgatgcggtcgtcattactttgggcaccggcatcggcagcggcattatcctgggcggcaagattttgcgcggcttcaacttcgccgccggtgaaatgggtcacaacgtcattgtcaaggacggcatccagtgcacctgcggacgcaggggctgctgggagcgttacgcctccgccagcgcactgacccgcgagacgaaggccgccatgcaggccgacaagaacaccattatgtggaagatgacccaggacctcgaccacgtcaacgccaagctggcctttgatgccgctgctaagggcgacgagaccgcccggaaggtcatcgacagctggatcgagtatgtcggcgtcggcatcgccaacgtcatcaacacgttcgagccggaggtcatctgcatcggcggcggtgtgtccaaccagggcgaggtcctgctggcccccgtccgcgcctatgcggagaacgagacccggaacatcaccaccggcaagttcccggtcatctgcgcctgccagctgcacaacgatgcaggtgtgatcggcgctgccgcactgggcagttctatttgataaaacgctgatactacggaggtttccatgcaggaacagacgatcacggctctgtgcgcggcgctgacggcacagcagctgccctttgcgcaggaggagccgctggccccccacacgacgtttaagatcggcggcccggcagccttctggtgtacgccccgggatgcagagcagttgcgccgcaccctgcagctctgccgggaaaacggtgtccgtgtctacctgctcggcaacggatccaacacactgtttgacgatgccgggtttgacggcgcggtcattgacatgcgcggcctgtccgggatggaaaactccggccttgatacggacgcggtgcgcatcaccgccggggccgggcagacgctggggcggctgtgcagcaaggcgcagacgctgggcctgacgggtctggaatttgcctgcggtatccccggtacggtgggcggtgcggtctatatgaacgccggtgcctacggcagtgagctgaaggacgtgctggagagcgtgaccttccttgacagtgatttgcagctgcgcacactgcctgcggcagacctagccatgggctaccgcacgagcatttttgagcagaaccccgactggtgcatcctgtcggccacggtggtgctgcaccgcggtgacggagccgccgtgctggcccgtatgcaggagctgctgggcaagcgcagggaaaagcagccccttgaatggccgagcgccggcagcaccttcaagcggccccagggcgcgtttgcgggcaagctgatcgaggactgcggcctgcggggctttaccgtgggcggcgcacagatcagtgaaaagcactgcggctttgtcatcaaccgcggcggcgcgacctgcgccgacgtggtcgcactgaccgagcaggtccgacaaattgttgaggccaggaccggctttgtgctggaacgcgaaattcgcgtggtaaaataagagagcggtggggaaaatgaattttctgatcgtgaccggcctttctggtgcgggcaagtcaatggctgtcaacgcgctggaggacatcggctttttctgcattgacaacatcccggtggcgctgctgccgcgtatcgtggacttcgccctgcagggcgaaaaccagctgaaccgcgtcgccgtcgtcatggacgtgcgcggcgtgcgcagcattgaaaagctgcaggaggcgctggccgaccttgatgaaaagaagatcgactacgatattcttttcctggatgccaacgatgcagtcattcagcgccgctacaaggagacgcgccgccagcacccgctggccgccgccgagaaaattcccatcaccgaggccatcgcgcgggaacgccgccttctgcagccgctgcgcgataaggcaaaatatgtcattgacacgtcgctgctctcggcagcgcagaaccgggagcgggtgtgcagcctgttcctggacaagggcgaaagcccgatggagctgatggtcgtatccttcggcttcaagtacgggctgccgcaggaggcagatctcgtgctcgatgtgcgctgcctgccgaaccccttctatgtgccggagctcaagcacaagaccggtctggatcaggaggtcgttgactacgtcatggcctccgagaagtcgcaggagctgctgcaccgctatgagtatatgctcgaatacgcgctgccgctctacgtgaaggagggcaagagccagcttatgatcgcggttggctgcaccggcggcaagcaccgctccatcacctttgcgcgtaagatcggtgaattttgcaagaagctcggctacgcacccagcgtacagcaccgcgacgtgaaccgaagtctataataagggagaacaccgccttgagcttttctcaagaagtgaaaaacgaaatactgcgccgcaaaatttcaaagccctgctgcaacatggccgccgcgtatgcggtggcctgttttggcaaatactttgatgaccgcggcgttgttctgcaaaccgaaaatgagggcgtggcccattttgcccaaaagctctaccgccgctgcggtgtgcaggggacggtcatcagcaaggagcgccccaccggccccgtgtatgagttcagcgtgaaggaccctgacgaggtcgccaaaatgctggcactctttggccacaccggcaaggagccgaccctgcgcatccgcccggaaaacttcaaatgccaaaactgtatgcaggcgttcatcgccacggcgtttctgtgctgcggcacgatgacagaccccgaaaaaagctataatctggagttcctctccacgcggcattacctttcccaacagctggaggccatgctggcggagcataacttccacccgcaccgcgcactgcgcaagggcgcgaacacgatctacatcaaggcggcggatcatatcgaggacctgctgacctttatgggcgcgggcggcgcggccatgcgtatcatggaccagcgcatgtataatgaaatgcgcaacaagacgaaccgcctttccaactgcgagacggccaacatcagcaaaagcgtgaatgccgccgtgcaggtgcaactggcgattgaaaagctgcaggcagcgggggcgctgaacaccctgcccgagaccctgcgccacaccgccaggctgcggatgcagtacccagacctgccgctggccaagctggcgcagaagtttgacccgccggtcagcaaggccgggctttcccaccgcatgaagaagatccaggaggccgccgcccgtctggatgctgccccggagcctaccgaaaaggaagcaacgaatgcctgaaacgacccaaagacaatttacccacctgcatgtgcataccgagtacagcctgctggacggtgcctgccgcattgaccggatgtttgaccgactgaaggcgatggggcagacggcgtgtgccatcacggatcacggcgtcatgtacggctgtgtggcgttttttgacgccgccaaggccgcaggcatcaagccgatcatcggctgtgaggtctatgtggcgacccgcacccggtttgacaaggtcaaccgcatcgacggcaacaaccacctgattttgctgtgcaaaaatgagacaggctacaagaaccttatcaagatggtctccgccggctttaccgagggcttttactcaaagccccgcatcgacaagcagctgctggaaaaataccacgacggcctgatctgcctgtctgcttgtctcgcgggcgagatccccaaggcactgctggcgggggactacgaccgcgccaggcagacggctctgtggtaccgtgacctgtttggtgcggaaaactactatatcgaattgcaggaccacggccttgaggaggaccaggccgtgctgccgcagctcatccgcttagcgcgtgagaccggtatcccgatggtcgcaacgaacgacgcccactacatcacgaaagaggacgccaagatgcagagcattctgctgtgcatccagaccggcaagaccatcaacgatgtggatcgcatggagttccagactgacgagttctacctgaaatccaccgacgagatgtacgacctgttctcgatggtgccggaggcctgcgagaacacgaacaaaattgccgagcagtgcaatttcgagttcacctttggcgagacaaagctgccgtacttcaaggccccggacggcatggagaaccaggaatactttgaaaagctctgctgggacggcctcgagcgccgctatcccggcagggtcacggacgctttgaaggagcgtctgacctatgagatcaatgtcgtcaagacgatgggctacacgaactactaccttatcgtctacgactttatcaactacgccaaaagccacgacatccccgtcggaccgggccgtggctccggcgcgggcagtctggcggcctactgcgtcggcatcaccgacatagaccccatccggtacaatctgatttttgaacgcttcctgaaccccgagcgcgtctcaatgcccgactttgacgttgacttctgctacgagcgccgtcaggaggtcattgactacgtcaacgagaagtatggccgcgaccatgtggcccagatcgtgacgttcggtacgatggccgcccgcgccgccgtgcgcgatgtgggccgcgttatgggcatgagctatcaggacgtggaccgtgtggcaaagctcatccccacagacctgaaaatgacgctgaaaaaggcgctggaggtcagccccgacttaaagacgctgtacgacgccgacaatcaggtacatgagctgatcgacacctcgctgaaggtcgagggcatgccgcgccacgcctccacccacgcggcgggcgtcgtcatcacccgtgaccccgctaccgagtatgtgccgctgtccaccaacgacggcctgcccgtgacccagttcaacatggtggagatcgagcgtctgggccttttgaaaatggattttctgggtctgcgcacgctgacggtcatccatgataccgagctggccgtgcgccgcaaggacccggatttccgcattgcgaacctcgactatgacgatcccgacacctacgcgatgctggcaaagggcgagaccgagggtatcttccagcttgaatccacgggcatgacgcaggtgcttgtcggcatgcgtccgaaaaacctcgaggacattatcgcactgatctcgctctaccgccccggcccgatggactccatcccgacctatctgcgcaaccgcaaggacccgtcccatgtgacctataagacgccgcagatggcgcacatcgtcgatgtcacgaacggcgttgtcatctatcaggagcaggtcatgcagatctgccgcgagctggccggcttcagcttcggccaggctgataacgtccgccgcgccatgagtaaaaagaagctcaaggtcatggaggcagagcgtgagcacttcgtccacggctgcaaggagccgggcaaggagtgcgcaggctgtgttgccaacggcgtgccggaaaatattgccaacgaaatttacgacgatatgatcagctttgcgtcgtatgcgttcaacaaatcccacgccgcctgctatgcctacgtggcgttccagactgcgtatttgaaatgccactacccgcatgagttcatggcggcgctgctgacgagcgtgctcgacaacacatccaaggtcattgagtacacgacggagtgccagcgcttggggataaaggtccagcagcctgacatcaacgtgtcgcgcggcggcttcacggcggacggcgagcggatccgctttggcctgaacgctgtcaagagcgtgggccgcgacctgatcgaagccgtcattaaggagcgtgccgagcgcccctatagcagcctctatgacttctgcaagcggctgcacggcacgggtctcaaccgccgcgcgctggagaacctcgtcaaagccggtgcattcgatactctggagccgacccgccacggtatgctcgagagtgtcgagggtattctgaaaagtgtcgagaccgacgcccgccagaatctggacggccagatggacctgttcggcctgatgggcggaggagaggacgagaaacccgcaaacgactataaggtcccgaacctgccggaatattccgcctctgatctgctgaaaatggagaaggaggtctccggcctctacctgtccggccatccgctggacgcctaccgtgcccagatcgcgcaggtttccacctgcacgattgctcagctgctgggcgaggacgcaaagcagtttgacaaccagacggtgacgcttgtctgcacaatcgtcaaaaacaagatcatgaccaccaagtccaacacgttgatggcctttaccaccgtcgaggacctgaccggcagcatggagctgctggtgttcccgcgcatcctggccgagtgccgcgcggccttgcaggaaaacgccgttgtggtcgccaatggccgcgtctccgtcaaggaggacgaggccgcccgcctgatcgtcgagggcgtgcagcccatcgagacctacgaccccggtaaaaactttggcatgaaccgcgtggagcgcgtcaagcgtgagacaagcgggggaggggccgccgggtatttcctgaccgtgccctcccgcgacagtgcgcagatgcacaaggtagaaaacctgctctgcaacattttcgacgggggcacggtgcgggtgtatttccgcttccaagataccggcagggccatgctggcacggcacatggcggtaaaggatgacccacttctgcgcgccgaattggagcgcattttgggcaaggactgcgtaaaagtgcaggatgttgaacactctgcaaaataaatccatacgttttgcgcgatttatccataatttcagggcgcaaagtgtggtataatgtgtatggtcgcgagattgttaaaaatttattgtaacgtgatgaccacgcctgaataaatcgtaatggttcaggcgggtccatagttcccgaaataggaggggctcgctttatggctaaggaaatcaaaacgatcggtgtgctcaccagcggcggtgacgcacctggcatgaacgccgctgtgcgtgccattgttcgtgcaggcatcagcaagggctaccgcatgatgggcatccagcgtggttacaacggcctgatcaacggcgaagtttatgaaatgaacgtccgcagcgtatcggagatcatccaccgcggcggtacgattctgtataccgcgcgctgcctggagttcaagacgaaggaaggccaggccaagggccttgcccgctgcaaggagctgggcatcgacgcactggtcgtcatcggcggtgacggctccttcatgggcgcccgtgcgctggccaaccagggcattccctgcatcggcctgcccggcaccatcgataacgacatcgcctgcagcgaatacaccatcggctacgatacggctatgaataccgctgtcgaggccatcgataagctgcgcgacaccacccagagtcatgaccgttgctctgtcgttgaggtcatgggccatcatgccggttatattgccctgaacgtcggtatcgctaccggcgctgtggctgtcctgctgccggagatcccgttcgattttgagcgcgatattctcgagcgtatgcgccagacccaggtcacgggcaagaagcacttcattatcatcgtgtccgagggcgttgtcggtgcgcaggagctggccaaccagatccaggcggccaccggcgttgactcccgtgcaaccgttctgggccacatccagcgcggcggctccccgacggtccgtgaccgcgtgaacgcctcgctgatgggctaccacgccattgacctgctggacaagggcatctacaaccgtgttgttgccgtctccggcgacaagatcgttgactacgatgtcaacgttgcactgtccatgcacaagacgattgaccgcgatatgatcgacatcgccaaagcaatctccatctaaaagtacagcttgcagggccgcattccgcagggaatgcggccttttggcattgtgaaactttttattttaggcaaaatgtcaatagtaatgtcacaaatctaaacggctaattttatccccattgcggcgcattcggcggccatgaggtcggcggggcgacgccagccgaggagacggcgggggtagttgttcatccacagggttatatactcggcatggtctgcggtgacgcaggccatgctttttccttttttgcagaaacggcgaatgagcttgttctggttctcgtttgtgccgcgctcccagctactgtaagggtggcagtagtagatcgggacaaactgctccatctccttggcggcggcaaactcgcagccattgtcgcaggttatagtcttgaacagtttgcggaagtcctcgccgaactcctgccgaagctcccgcaggacgcgcagcacctcgcgggccgtcttgctttccagtacgcggacgatctcgaagcgggtcttgcgctccgtaagcaccaacaggcagcggctcggcccggcgctggtgccgacgacggtgtccatctcccagaagccgacatcctcgcgggtctcgacctcgggcgggcgttcgtcaatgctgctgtcattcctgtgggcttttgccgggcgctgttctccttgcttttgcttcacgttgtaccgcccgacaggcaaatccagcccacacaggtgcagatacccgcggtagatatagcggtacactgtgttagcggaaatctgcggcagcgccagaccttgcagcagaatctcccgcacagcggcggcaggactgtaacgctttgtgcctatgtaatcttccagatgtgcggccaactccgggcagagcttgaccgggcggcccttgtgcaggtcgttcatctggtcggcgcggttttgcgctttctgggcggagtagatggtatacatctcgtaggtcgtaccgttcagctgctcacactggccgcgctgtatctctcggtagacggtgcgcttactgcacccgaccaccgctgcaatctgcgacgcgctgaccttagccttcaatagcgattcaatcgctatacggttttcccacgtaagatgctgtccacccattccaaaaaccaacccttatcacatcttattgtattctatttgtcgttgctgccattcccggcgctgttcctgtgccgagcgtatcaactcggtctgccggtcattcagtgccgccatgcgcacgccttgcagcagcgggccgaagtcgccgtccataatggcaaggtacgcttttatactgctgcccgcctgatggaatatgtaccgtttcagactgtcgaagttgtaatccttgcccgcatcgtaggccatgcggatctgttcggcatcccccagcagccgcgcccaccacggcgcaaccgttgcacggtcacggtttttgccgtcgtactgggaaacgtatagcagctgatttttcataatccccatgaaggtaagcccgatgctgccgtttgattgccagctgcggatgaaggacgcagcggcatcgttgcgcagctggaactcgcagcgcacccagtctttcgggatttgatcggtgtccacgctgcccttgacctcgcgttccagcgtcttgtcgtagatgcgcagccggaaatccgatttgctgctgccccagatgaccgccatttcggcggaaccttcctgtatcaggaacgttttccagcgggagatataccggccggcgcgggtgtaggcttgtacggttttcagcttcaacttgccgaaggtatcgcaggcaatatccaagcggcttatatgcagcgaagcataagtagactgtagatattttatccacttttcccacgttaggcccgggtgtgtggtttcccacgtgcggcagccggtgccggacatctgtatatagattgtgtcgctgctgccgtaggcgtagacgatgccatcataccagcgggcgtaggcataaccgtacattccgcgccggtcttggaattccagcccggacaggtagaacttcttttcgatacgttgaggcaggtacacggctttttcctcggtctcgtcgtgctcttggaattcgctaagactgaccgtaaaacagaagtagtcaacaaggattcttgttgcaccgtgggggcctgctttcttgttttcactctgcggcatttttgcacctctcaaaaattgcgttgctaaaacagaaaacggcagttttcggctaagtttgtgtggagttgtacccccgtgctacagtacgggggttttggcgaggcgcggggcctcgtcttttggcttattgttgcggggaacgggcagagcagcggcccgggaaagagttgtctgcgtccgttccgggtgttccggagcagctccgtgacagtgccggggccagaacctactggccgcaaggccctgaccccggccctgccactgcgcacctcctgcacaccctgcactgacgactgcaaaagtggtgcctgcggcgcttgcgcctaacagggtcaaaagatgcgcaattcgtccgggcggggccggacttacgattaaggaatctttttatatgtcccaggtcggggcctgggacttcgccggggagaagctgcacgcactccggcagagagcagcagccgggagagttgacgcggggaaaagctctcgcactcttgcgccgttatacgttactgctgggggaaggtgggtggcttggcgctggggccaatagagagaaaggttttctgctgccgaaaggccctgctcttgcctttgcgcgatttcagctgcgggcgtgggaaggtgcgcgccgcgcaggcgctgctaccatggggctaggcgccccatacccgccaatccggcccacttttataaattgggtgggccgaactacccgcgaggccgcaggtataccagaaagccgcggtaatagtcgcggttgtacaggtttatggtggtaatttcccggttaccgtagcgcgtaaagtcgcacgcttctatttcgccgccccacagcatgagtgaaggcccggcccacagggaaaccagcgtgtgaggggcgagcagcttttgaaattcgtttaaggtcatacaaatcacctctttgtaatacagggagaagctctgatcggcgtgccggcacgcggcagcacacacggaagtgtattacggcggcggtggtgctgcggcgtaggctaaagccttcacgccgcagcgccacctatttccgctgtatcttccgccccttccgacttcggttcgttaccgcgtcgggtgtcggagcagcaggggcacgggcggccagtatctcggcctcggtcatcatgtccttctcgtcatagcgcttctgcagggtgtccaccacggctagcgtgttgtaggcgttgtagtccttattgcgcacgaaccagcagccgcggcggagcgggcggacaagctctggattggtcacgttttccagttcccaggcgtcgtaccagctgttacactgcaagcgccagaacttgcggcactggatgacattcagcgtgacatcccgcatcagcttgtctacatggccgaaccgctgcgccgatccgtacagacttatgtagtagtggcggcagcacagcagtgtacttagaaacgtcgggtcgatgttgtccctaaagctgcggctattcagctgcacacccagttcatccacgcacgcaatggtaatagtcagcgtgccgtgctcgtcgtcgtagtcctgattgaccttagacgcggccacgacctgcgccagactgcgcagcggttcatacggcacggagagcgccacgttggagagaatcagcacacgctgcgtgacgaatttcttccggcgcgggcaccagacgggtttgccgtcgtagtgttcatacaggcccgtgactttatgcaccagcgacagcgttttgccgctgccgaagtatccgcagtagatgtccaagtcaccagtgtggcacaagttgtattgcttgcggcggatatagtcgaatgtgtccagtgtgccgtagtacagcacatgcagcggatggaatacggcgcaccgcaccgcggggaacagcgccagcacaatgaccgcgccgacagtcagaatcaagccccacatattacctccagcggttcatctgccgcatgatcccgaacatgagcttcagcacgccccagaagatggccatgcaggccagcaccgtgacgagccacggcaccagctccgcgaagttctgcggcgtgccggtgatgccgaagaaggccagtagttgattgaattgttctaccatatttttacctcaaccagatgagcagcgccgtgaagcacagcaccacaaagataaccagcagcaggccctcggtggggctgtagtcgttgaagggcttgtcccagatcgtgggggccgtggtcggttcgggcgtcggggctgtctccggcgtggcctgtatcacgatgatttgcggcgtcggctcgggtgtggcatccgggtcaggtgtcggcgttgccattgcctgcgtcagagcttcggccaatgcgtcagcgtcgatctccacaggtacacgcgcaacatcttccgcagcaggcggcggagcttcctccacaggtgtcggctcaaccgccgcagggggcgcttcaacaggtacatcttcgtattcctccgcgtgaatgccaaacgccagcgccgtgatggacagcaggcaggcgcacagggcagttataaatttattcgtcaccaagcagcagcccctttatgaaagatattacgataccggcaatcaggcaccagaccaacacgtcccagtaactgatcgtgaagccgtacagtgtaaatttatgttggaacagcccgagaacagcggtaaagatagcggtgaattgttccatacgctcactcctttagccacgatacaatgcccagcacgaccagagaaccaacggaaagcccgacaactacccaaacgtcggcaggaatccacgcggtacacgcgcccacgaagccaaggacggagtcattgactacgccgtcatattgctctttgatgtcgtccagtccggagtcaacaccgcccgcgtatttatcgtaggcgtccgtgatgtcgccgccgagggataaatcgtcgtcggtggtgtcgcttgtgctgctggaggaagaatctacggtttcctcggcgtaggccgggcaggccgtgccgagaaacaggcagagcagcagcaccggcacggcaatgtaatacagacagatcttccggacgcctggcagctgcagcaaaagtgtattacgcatattgtcaccctcgaataaatttgataatgccgataacgaagcaaacgaccacgccgcccaccagtaagccgcctaacccgggcggaaggaagggcagtaagtcgaacacgcgggagactgcccagatgatccagcttaaaattgtactgagcagcttgaatatgagcttgagcacagcactgacagcgcccagcaggccatctatgatggcatcgccgattttactaagcagcttgtcccaccacgaggaaccagagctgccgcccggcttgccggtctccggcgtggagatgctgccgcccggtttgtctgttggggcaggtgtgggagttggagagggtgcggggctgggactgggtgacggtgtaggagcagcaggctgttcgtaggttatgtagtagtagttattcgttacggtatcgtaggtatagtattttttggtttcgttgttgtagatgatgggcgtattagaaatattggttacggtttcgttcttctcgttgacggtggtgtactggggatagatgtaagtaaggttggtgctgttgtcggtgtagatgttgccgttccatgtgttgttgttgatagtaagtgtatttgaaacttgtaaatagtcagtatcataaggttcgcatatcacataaggtattttgttgattctaaaaatgaaagattctacagattcagtaggtgagacataaataaaacactctattgcagaacctttttgataaaattttctgctaacattaactttaatgtcacgattctgaacagaatcacgcgtactttcccacgaggcagagccaacaacttgttcaggaacttcataataaccagatataggagcaatcaggtaaaatcttgatctataataaaacccggatgacgtgccgttaagccaatcaccggttactttaaaaggaacatcacaagaagattgattgacttccatatagcctttgcaatagtcacttaatgtctcggaactgtgactacactgccaaacgagatagttataactttgatatgctcttgaccaagaatgacgcatagaagcgtataacttaccatcttgacttatagacggcgtaccattgtcgtcgttatacccgggaaggtctttgcggccgatgccggagggggcctgaacgagtttgccgggcttttcggcaccgaaatctagacctaacagacgggtttccttcttttcgtaaccgcaggatttacactttaaatctatatgtgcaattgcaccggcaccggcaggaatcttgattttacctgtgtctgatatttctacttcgacctctgcgcctgatgtagaccaccaaaaggcgtgaagtgcagagccacatgtaggacacgttttatctatatcaccaataatagcagagaacccgtcatcgtctgctgcagccggaaaacagagagaaaatacacaaactatacataataatagagctataatcttacgtttcatgtatacacctcttgacatgatgggctgacgcggcgtagaatcaaataaaggcggtgattctatggatatgtttgatttgacaacggttttagtatttctgttttttattggtgtggttgctataatcgcctttacggtttataaaatcgtgaaaatgatttgcttgaccattgcccgcaatgccgaagttaaagcattcggcagcagtaaggaatataccgagttcctgaaatggagacaggagcagggccgccagtgatggcggctttttttaggaagtgtaaaatggatgctataaatagtattgtgtggagtttgattgcaaatgggataggtcttttgctacccgtgtttataaataccatacaggggaaagaactcgttgaggacaaaccgtcaaactggttttgtggaagcttcatattagcgcttgtcgcgttgattgtgtgtcaatatacagatgaagtgatggttaagtttctttgtaatatgattgcaggcgggagcgcctactttgcgtttttgtgttttaaagtgatttatgaaaagtatgagaagttgtccctcgcaaactcccatgatgaagaaaagaaggataatcataataaaccgcctaatattgaaatccgaatagtaaatgtgacgagggtgaaaacccaaaaagcaaagaaagcaaaaagaaattaaaagcctgctagttgtcatacagcccgcacgcctggccgacgccgatcagagcgtgctgcaagctgtatctgtattacatgatgccgggggcgggaatcgaacccacagtttccataaactcacataagccagcgctgactcagagagttaccccgacataaaaaagaagcgtcccgccctgccctgaggtgaagggaagggcgggacgccttgctatagggaaaagagatcaatggcggcggcgcatcaggataccgacaacgccgacaattgcaccaacaatgggaacaccgataaagataccaagaatcgggttcgcggccatcgtagtgagcatattacctgccatatcggtgacagtggtaacgagggatgcggcatccgcaccaccctccgccccaagcataaccataggaaccataacaaacgacctcctttccaaccatagtcctaagcgtctttatttgaagtgtcctgtgcggtccattcgtttacagcttcgctcacggtcctgcaagtatggaccacatcggacatcctccaaccaatttcctccagcccgcgctggatgttgtcgcgcttgcgcagcagcttgtccatgtcacacagctttacatactgctgcttgcgcttttcctcgagaatggcgttttccttaatcagcctttcccggtcacggcccagaagccgggccgcagcaacgaatttttcggtgaagttctcaccggggaatgattccaccgtctgacagacgtcctccggcagacgcagcgttttaacttttgtagccaaaccaacccacatccttccacagctacaaacgtgttatcttgcagggagcctttcacttgttggcgggaacgttgggcagaacacggatagaatccacaaaaccgccctcgtcatagctcaaatcaatgcgagcgcccaccagcatagagtaaccgcccagcttcttgatgtcctcggccatgagactggcgtcaacgaactgctggcggacttcatggccttgcaaaccttcatcgcggggattgtcccgcaccagatgcaggatgtacgcattcagctctttgccggacttcttagacctctgcccaatcaacgacttgatacctacaataccgaattccatagaaaacctacctttcaaaagtgtaatacaggggtgtcaggtgtgacattattattgtaaatccacaaactttttattttataagatttttgcaaaaacctgttgacatttgaaaaaaggtttgctataatagcaaacgttgtcaggagcgagcgcaccgaggcgacgccagctatgggggattagctcagctgggagagcgcttgcatggcatgcaagaggtcaccggttcgatcccggtattctccaccacaaagacctgtcagagaattctggcaggtctttttttacatattcgattattagcgtatcctgcatgcaaagaacccatccgctttgtcacacgccgcgtaaaacacctcgccatgctggccgatgccctgcgcgtggagccgagcgtccagccagcgctcgtcgcggcctgcagcctttaaattgtcacgcatgagatggccgtctataatcaggtcataccaggtgctggcggcgtccgggtgcagctgcatatcgtcgggcgtcagaggacggttgcagcttttgggcagaaagctgatctggccgtttgtctctaaaattgccgtttctatttcgttcgggtcaaagtacccggccacgcgggcctgacccaggaactcgttcacgtctatggcagcgcgctgcaggctgcttttcaggataacaccgtcgtccatcaaaatcaggctgcgtccgctccaaaggctgcgcatagcgttgctcttgcaggcagtgtagtgcacgaaccacgtcaccagcccatagacaataagcgcagagaagggccgccaccactgctcaagattcgtcgccagctctgcgccgatggaacccaccgtgacggcgttcaggtagtcgaacgggctcatctgcgcaatctgccgcttgccgcccgcgcgggtgaaaataaacatcgcggccagcgacagcaggctcgtcagcacgacctgcccgacctccggaaaaacgtcagccataaaaaacactcctctctgcgttagcttttgcgcagttatgaccttttatacggaaaaatcagttgacaagcggcgcaaaacggcatataataagcctgtaaaaaggaaaatagcgatgaaagggccaatgccgtccgttccgtccatcagagagaaagccgtttggtgcaaggctttcacgcggaagcacggcagagccaccccggagctttcggcgcagagccgagcgtacctgcggcgttaacgcagacacaaagcggcagtgctgttgtattatattcttgcggcgctgcaaaccgggtggtaccacggaagcataacagccttcgtccctgtattggggcgtgggctgtaattttttgtggcggaccctgcatcgcaattttatggattggagaacaatacctatgcaatggaccggattgaacgagcttcgcgaaaagtacctgcattattttgagacgaagggccacctgcgcctgggcagcttcccgctggttccgaaggatgaccccagcctcctgctgatcaacagcggcatggcccccatgaagaaatggttcctcggccaggaggagccgccgcggcatcgcgtgaccacctgccagaagtgcatccgcaccccggatattgagcgcgttggcatcacggcccgccatggctgcttctttgagatgctgggcaacttcagcttccaggattacttcaagaaggaagtcattccctgggcgtgggagttcctgaccaaggaactcgagattcccgctgaccgtctgtacatctcggtttatcaggaggatgacgaggcctacgacatctggacgaaggaagtcggcatccccgaggatcacatggtccgcctgggcaaggaggacaacttctgggagcacggctccggcccctgcggcccctgctctgagatctactatgaccgcggcctgaagtacggctgcggcaagccgacctgcggcgtcggctgcgactgtgaccgcttcatggagatctggaacctcgtgttcagtcagtatgatgccgacggcaagggcaactatgagctgctggccaagccgaacattgataccggcatgggcctggagcgtctggccgtcgtcatgcaggatgtcaacaacctgttcgaggtcgataccgttgccgccgttctgcaccacgtcgagcgcatcgcgggcaaaaagtacggcgagaacgagaaggatgacatctccatccgcgtgattaccgaccacatccgtgccaccgtctttatggcctccgacggcatcctgccgtccaacgagggccgcggctacgtcatgcgccgtctgctgcgccgcgccgcccgccatggccgtatgctgggcatcaaccgtccgttcctgaccgagctggtcgaaacggtcatcgagtccagcgaggccggttaccccgagctgcgcgagcatgagtcttatatcaagaaggtcatcggcaccgaggagctgcgctttggccgcaccatcgacgccggtctgaacatcctgaccggcatgatgggccgcctgaaggaggcccatgagaaggtcctgtccggtgtcgaggcgttcaagctgaacgataccttcggcttcccgctcgacctgacccgtgagatcgccgccgaggcaggctttgccgtcgatgaggccgcgttccacatcgagatgaccaagcagcgtgagcgcgcccgcgccgagcgcctggccaaggatatttccggttggagcgctgacctgttcggtgagctgaccgccgagcccacccggtttgacggttacgagaccttgtccgagaaggctaaggttctggctctgtccgacggggaggagctcgtcgatgccatcgccaccgacgaggcgggcgaggccaaggacggcgtgctggtcgtgctggaccgtaccccgttctatgcagagatgggcggccaggtcgctgaccacggttatcttgtcagcggcgacgccaagctgaaggtcacccaggtcaaaaagaccccgaagggctatttcgtccatacctgtgagctgctggacggcaccatccacgttgacgacgaggtcaccgcttccgtcgatgagaagcgccgtgccgccatctgccgcaaccacaccgccacccacctgctgcagaaggccctgcgcgaggtcctgggcgagcatgtccatcaggccggcagctatcaggacgaccagatcacccacttcgactttacgcatttcagcgccgtcagccccgccgagctggccgaggtcgagcgccgcgtcaacgagaagatttacgaggctctgcccgtcatcgtcaagaacctgcccatcgaggaagccaagaagatgggcgctatggctctgttcggtgagaagtacggcagtgtcgtccgcgttgtcgacgccggcggctggagcaccgagttctgcggcggcacccatgtcacgaacaccgcgcagatcggctgcttcaagattttgagcgagtccagcgtggctgccggtatccgccgcattgaggctaccaccgccttcggcgtgctggatctgctggatgaccgcaccgagattttggccaagaccgctgttgccctgaaggccaacaacctgaaggacgctccggcccgcgccgaggcactggctgccgagctgaaggagactgccaaacagcttgaaatcctgaaggcccagatggctgccgccaagatcgacggcctgtttgagaacgccgccgacatcgacggcgtgcgcatcgtctccgcctatctgaccggcaccggtgctgataccctgcgcgacatggtcgataaggtgcgcgacaaggcccccaacgccgtgaccgtgcttatcggcagcgacggtaataagacgatgatggctgtcggcgtttccaagaacgccctggcccgcggcttgaaggcaggtgccctcgtcaagaagattgccgctatcgcaggcggcaacggcggcggcaagcccgacttcgctatggccggtatccgtgacacgtccaagatcgacgacgcactgaacgctgtgcccgagatcgtcaaggcggaaatgaatcagtaattctttgccataaaatccactgcaaaggagggattccggatggaggattgtctgttctgcaagatcgccgcaggcgagatcccctcgaacaagctgtttgaggacgacaagctgctggcgttctacgacatcgacccgcaggcccccgtgcattttctcgtcatcccgaagcagcacattgcgtctgccgcagccctgaccgaggatgacgccgcgctgctgggccacatctacgcggtcattgcgcagctgtgcaaaaagctgggtgtcgacgagagcggctaccgcgttgtgactaatgtcggcgcggacggcggccagagcgttaagcacctgcactttcatgtgctggccaagcgcagccttgcatggcctccgggctgatgccgggcgttgcacaaaacacttgtgaatcaataaagagaggtaaactaacatggcagatacctatacactgcacattgcgggtctgacccgtgagctgcccatctgcaaggtcaatgaccacatggatattgccgctttcatcatgttcagtgatgtggagctgaccgaggcatgcgccgcagctctgctgaaaaaagcccccgagtttgacgtgatcctgaccgccgaggccaagggcatccctctggcatacgaaatggcgcgccagagcggcaaatactggattcccgcccgcaaaggtccgaagctgtatatgcgtgagcctgtcatcatcgaggatcagtccatcacgactgccggtaagcagacgctggtcatcgacaagaaggacatcgagtatatggacggcaagcgcatcctgatcgtggatgacgttatctccaccggcggctccctgcatgcactggaaacgctggccgccaagagcaccggcacggtagtcggctgctgcgcagcactcgctgagggcgacgctgccaagcgcaccgacatcttcttcctggagccgctgccgctcttcctgcactaagcaatgaaacgaaagctcggttggtttggtctcggttttgccggggctgagcttgctgcggccattctgccgccgctggtctgtgtgcccgcggcggcatttttggtatgcctggcgctattagggataaaacgccgcagagacagcgccatcccggtactgggtgcgctgtgcggtcttgcgtggtttctggtgtttacccttgtatgggtgcggcccgtcaaggcactggccgggcagaccgtgacctgcacggcggtggtggagacggacgctgatgcttcctacagcgaaagccgcctgcgcggtacgctgcggctgactgaaattgacggcagggcggccaacgtaaaggtgcagtgcgcgtcctttcccggcgagagtgcgggggagcggttcactgcaaaatttgcgctgaccgagctgcccgacaacaaataccgcctgagccgccaaagcaagggtgtctatttgcaggcggagtatctgggcagctaccacccactggacgccagccgcgcgccgcggtttgcgctgtatcggctgcggcagcgctggtcggccacactgcgccgctggttgccgcggcagctggacggcatcgaggccgccatgctgctggcggacaaaagccgcctggatgacagcgtgcagcaggccttccgcacggcgggggtatcgcatctgctggcggtgtctgggctgcatctggcgctgctctgcgggctgctgggctttggccgcaaatggaaattttatagaccgctgattttgctgcgcactgcggcggcgctgttttacctgctgctgaccggaatgccagtctctgtatcgcgcgccgggatcgtgctgttggtggcgctggtgggggacttcttcctgctgccgcccgacctgctgacctcaacgagctttgcggccatcctgctggggctgcaaaacgcctatgcgccgtgcgaccttggctttcagctgtcgttctgcgccgtgctgggcgtgcaggctgcggcagcactggcccgcactgagcagcgcgcagcacaggacaagcccgccgccgtcaaggcgctatgccaagtggcagagcctatgcaaacggcagtgcttgccagccttgccacgctgccggtgctggtggcccacggcatggcggccagcctggtcggggtgctctgcaacctgctggtcgtctggatggtccagcccgccctgcagctgggcatcctgctgctggtatgcagcgctgtgccgtttttggcggcaatcacgaacctgacggccctcgtgctgagtctctggctcaaggggctgctctggctggtacggcgctgcgccgcactgccgtttgcgtcgatttgtctgccgcagcggtacacgctgtttgtgctggctgtgctgggcgcgctggcggtctgcttctggcatgccaggcggctgcggctctatctgcccgcggcggcgctctgcacagtgctggccgtggggctgggtgtctggatgcagcaagatgttgtgcagatcaatctggtcggcgcatccaacaatccctgcgtcgtctgcgtgcagaacgggcaggctgtggtgttcttccgcggcggggagagcaactggagcgccgtgcagaactatctggccgggcgcagcagacaggagcccgcgctggtcgttgacctgcgcgccaagccgacgcagatggaattttccgcggcagaggtcgtgacggtgcaggagcttgccgacattacgacccgtccggtgcttgacggattgacgctggacctgtatcataataaaagcgcaaacctcgctgtgctgggcgtgggggaacggcacattgccgtgggggcaggcaggctcgagctggcagagccggtgcgggtggatgtcctctgcgcaccgggcacgctgtccgattccgtgcggcccgacgcaattttgtacaccgctgccgcaccgcgctggctggacgacgctgcgggctgcaccctgcgctatggcgaggacacgcccggactgaccctgcgcccgggccgcagcatgatttgggaggaggcacagacgattgctgtacagtgaaaaggagctggaaaaacgcctgaaggcaggctgcgcgctctactatttctacgcatcggacgaggcgctcgtccacacggcggcgcagaagacgctgaaatatctgaaccgcgacgaccccgagacgacggtgctggacgggccgactccctcggtggaggagatcgtgctagctgccggtacgatttcattcttcggcggcaaacgcctggtactcatgccgctgatccgtccgtcaacctattccgacaaggatttgcaggagctttgcgacacgctggccgacaccgagaacgccatctttgtgctgacgagcatcatcgaggagagctacggcaaactgcgccccggcaagcgggagcaaaagctcattgccagctgcgagaagcttggctactgtgtacagctcaaccgccccacgggcgcggctttacaggccatggcccgcgattgggcgaaggaggccggtgcggactttgcccccggcgccgaagctgcgctgctggcccgctgcggcgaggatcagttcctgcttaaaaatgaggtcgaaaagctggccgcgctggccaactacagcacaattacaaaagaaatggtcagccggctcggcacggtcacgctcgacgcggacacgttcgatatggtcaagctgctgacgagcggccaggccgataaggcccagcaaaagctgaaaacgctgctggcgctgcaaaacgagccgatcatgattaccggcgcactcatcagcaactatctggatctgtaccgcgtgctgctgggccgccgcagccgccggagcctcggcgatgtggccaaggactttggctacaagggcaattggaattaccgcctcaattctaccgaaaaaaccgcgttgcgcttcaagcgtgcccagctggaggactgcctgcacatcctgcaaagactggacaccgacctgaaaagcagcaagctggacgccgaccttttaatgcagaaggcgctgtgtgagctggcgctggccgggagggcataaatgctgaaattggaacaagccctgctggtggagggcaaatacgacgccgcacgccttagcaatatcgtggacggcacgatcctgacgacggacggcttccgggtgttcaaggacggcgcactgcaaaggctgctcaagcgcattgctgcagcgcaggggcttatcattttgacagactccgacgccgctgggttcaagattcgccactttgtcacgggtcttgtcggcgcggagcatgtcctgcaggcctacgtcccggcgattgcgggcaaggagtcacgcaaggccgagcccggcaaggagggactgctcggcgtcgagggcgtatccgacgatttgattgtacagggccttgaaaacgccctggcaagtaaaactgcttgccagcagaaaacgacccagtcgcgctccatcacgtacaccgatttgtacgactggggcatctccggcacggccaacagcgccgagaaccgccgggtgtttttgcgccgcctcggtctgccgccgcggttgagcaaaaaggaactgctgcaggtgctcaacacactctacacctacgacgcactgaacgccgaaatcaaaaagctataaaaattgcccggaaccgtgcaagtggttccgggcatttttatacgcgcgtaacgcgatcagacttccagtttttttaattctgccatccacagcgtattgcaggcgtcgctgggcatgcgccagtcgccgcggggggacagcgtgaccgagccgaccttcgggccgtcgggcagacagctgcgcttgaactgctgggcaaagaagcggcggtagaaatttttcagccacgccagcaggacctccggctcataccggccgtcaaaggctgtgcgggccagatggtagatttttgtcggactgaacccaaagcgcagcacatagtagagatagaagtcgtgcagctcatacgggccgacgagtttttcagtctgctgggcaatcgtgccgtctgcggcggtgggcagcagctcggggctgacgggggtgtccagaatatccaccagcacgtcccgcagcgtgtcattgccgcaggtgtcggccacgtactgcacaatatggcgcaccagcgttttcggcacgccggtgttgacgccgtacatgctcatgtggtcgccgttgtaggtggcccagcccagcgccagctcgcttaagtcgccggtgccgatgacaaagccgccgttcttgttggcatagtccatcagctccagcgtgcgcacgcgggcctggcagttttcaaacgtgacatcgtacttgtcggcgggctggccgatgtccgcaaagtggctcttgacggtctcggtgatgttgatctcgccgaacgtcacgcccaaagcctcgcacagaatctcggcgttggagcgggtgcgcttcgtcgtgccgaagcagggcatcgtcagggccacaatatccttcgcgtcgcggcccagcaccttacaggcgcgcacggccaccagcagggccaggcagctgtccagcccgccggagatacccagcacgccgcacttggcgtgggtgtgctccatgcgcttggcaaggccctcggcctggatgcgcagaatcagctcgcaccgctcggcgcgggtcgcggcgtcctgcggcacaaacggcgtgcaggagacagggcggatcagcgccagctccacgggcggcagctcaaattccacagtggtgtagctgttcgtttccggcataaacgtcgtgttgcgctggcgctcctgcaccatgcggcccaggtccagctcagtcacggcatcctcgcccgcaaacggtgcagcgtcggccagcagactgccgttctcggcaatcaggttgtggcccgcaaacgtcatgtcggtggtgctttcgccatggcctgcgtcggcgtagaggtacgcacacagcagacgcgcgctctgcccgcagaccagctcacggcggtaggctgccttgccgacggtttcatcgctggcggacaggtttgccacaacggtagccccggccagtgcgtgggcacagctcggcgggatgggagaccacaggtcctcgcagacctcggctgccagcacaaaggcgggcagctgtttgcaggcaaacagaaggttcgtgccgatcagcgtctcctgcccggccagctcgatgcactcgggctcacgcataccggggataaagtggcgcttctcgtaaaactcgccgtagttgggcaggtgtactttcggcaccagacccagcagctcaccgttgcagagcaccgccgcacagttgtacagcttgccgttgtggcgcacaggcaggccgacgaggacaacgacgttcaatccctcgctggccttcaaaatcgcggcaaggccgtcctcggtcccacgcagcagggtatcctgcaagaacaggtcactgcaggtgtagccggtcagcgcaaactccggcaggcagagcagctgcacatttttttcggcgtactcgcgcatgacgccgatgatctggtcggcgttgtaggtgcagtcggccacgcgcagggcggggctggccgcagcagcgcggataaagccgttttcaaaagcgggaaagctgtacttcatagccaaacttcctttatcataatctataaaactatcatagcacagtgggcgaattgccgcaagtgcgggttttgcagggaaaatttatttttcaaaaagtaatatatacttgacataatgtaaggcgcgtgctatagtaaagtcacagcaagaggaaaggaaacgaaggcaatggcaaagaatctgaagctgaaggccgcccgcgctgcgctggatatgacccaggcggatctggcggcggtggtgggcgtgtcccgccagaccatcaatgcaatcgaaaaaggggagtacaaccccaccatcaacctctgccgcagcatctgcaaggtgctgggcaagacattggacgagctgttctgggaggaatgagcgatgaacataaaagaattttttaagcgcgacaatctggacgaaatgcaaaaacagacccttttaaaaatcgagtcacgcggcttctgggtgctgtgggtgctgctgctggcggcgctgatcatcgaaagtctgctgggctttgccccgcgggagatggcggcagaatggtttatctttatgctggggtgcgcctattcggtcctgagtgatctgcgtgctggtatctgggaccgccaccttaaggcgaacacgaaaaccaatgccgctgtgtccgttgcgggcggtgttgccgtgtttgtgtgggggcttatcaaatttgcagagtttggcatgggcgttgcggtgctgcaggcggtcatcatggggatctgtacctgggtactgtgctttgcattgctgcagctcagcatgaaggcttacaaaaaacgccacgctgagttggaaaacccaaaggaggacgacgatgaaaacgaataaaaaagagctgactgtctttgcgctctgtgcttacgcaattccgtttctgatgatgccgcttttgtacatctgcctgcaaaacgagcgggacacctcgatttttgccaacgcccagatgttctacccggcggcgggcgttatgctggcgtttttgctggcaaaacggccggatatgcctatgcggttttacatcctgcatatcacggccactgcactgatgctcgccatgagcgttctgtctgcgttcctgccgcaggagggctggctgaatattgcaaactttgtcatcattatcgcgtcggtgcttggctggatcttcctgctgaccgaaaaaaagacaaagcgcgaagactacggtctgcgcctgcacggcaagctgctgacggctcttgtcatctgcgtctatttccttgcggtcaagaccgctatggtctttctttcgatggcgatgcagggcggtgatagctgggctgaatatctggcctactggcgcacatctgcaccgtgggttatggcagtggtgcttgtaccgaacttctttttgagctttctgccgttttttggcgaggaatacggttggcgctactacctgacgccagccctgcaaggccgcttcggcgcacggcgcggcgcactggcggtaggcgtgctgtgggggctgtggcatctgccgctgaatcttttcttctacagccccgacacctcactgcagagcattgccgcacagcttgttgtctgcgtgacgctcggtgtattttttacctttgcgtatgagaagtgcggcaaaaatatctggctccccgtggtgctgcactacctcaacaacagcatggtcttagtctggaccggtacggcggatatttcaaatcagatcatcagctggacggatgtggcaatcagtgccatcatgtatggggttgtattcctgccatttctggcagcaaagtgctaccgcaagaataaataaaaaacaggtgcagccctttaaatggggttgcacctgttttttgattgccgtcagactgcaaacgccttatgcagggcatcgagggcggtgtcctcgtcctgctggcggatcagcagagagatatcaaggtcgctcgttgtgatgagcacgatttcaatacctgcaccggccaatgcagccagcgcacgggcggcgacgccgcagctggtgaccatctcctcaccaaagaggttgatcttgctgtagccgccggagaccagcgggggattggccttggctgcggctggcagagccttcataacggcggcaaagttgtcatagctcgtcgtaaagctgaaatccaccgcggagccgcggggcgtgctctggcagatcatatcgaccacaataccggccttggcaaaaacgtccaggtgctcggccaggctctgtgcgctgtactgggcaccgggaaaggtggtgagcataatgttctgctcgctgctgatcttgctgacaccgtacataaaaatcatcctttcattcaatctaacgtgaggaactcctcgtcaatcgtgctgcggagcatgctctctatgtattcgcgggagagggtgaactctccgtgtgctgcacccagttcgtctgtgtactggctgtaggggatgacccggatatttttgtacccggcctcatactggctgataacgcagtgcagctttgggtcacggatggcaatgctcacactgccgtcaggctgggtcgtcttatcaaaatacacgtccagaatcgcgccgatgacattatcgcgcgaggactgcgcgttgatgaagttgcccaggctgtagacgatgaaggtcgtgttgccgttcacaccggtcagccatgcggcgttctgtactacatgcgggtgggtgccgatgatgacatcgacgccctggtcggccagccactgagcagtctccctttgaaagtcgttgacctcgtgcgtgccctcggtgcccatgtgggcgctgacgataagaacatcgcagttcgggcgcatatcggcgatctgtttggcaatcgtttcatggtcgtccagatacacaacgccatagtctgtgccggacggcgtgggcaggccgttggtgtgctccgtataggagagatagccgaacgtgatgccgttgacggtctggtaggcgtagttgtcataggtctccagattgtaaaagcccattgtgaccacatcgtccggcatggcagcccagtgtgccatggatgcctcaatgcccgccgcccccttgtcgtagctgtgattgttggagagactgaacacgcggaagcccaaattatacagcgtgtcggtgatctcgccgggggtggagaacatcggatagccgctggcggcgaactcgtcgttgacgagcgtctcctgattgagccagttcacatcaaactggtcgtagtagccctgcatggctgcgtaggcggcgtcaaaatcgtagtggtcgccgccgcgccccttagcctgcaaaaagataccatcgtgaatcaggtcgtcgcccgtggcggaaaagtgcacggtctcgacggttggcgtcggctcgggggtcggctccggtgtagcggttggttccggctctgccggcatatccacgactacgggctgcggattgaccgcgggcagggtcacagcctgattgccgacgcccagcagagagccgacaactacgccgccgacgcccagtgcgatgaccgcgcaggcggcaagatcgttgccgttcattcgcatatcagtttacctcgcagcaggtcggtcatcgtgtaatagccgggggccagcgcagcaatatagagcgctgcctgtacggcaccgtcggcaaagacgccgcggctgcccgcgctgtggctcagcgtcacgacctcgtcggggccgcagaacagcacatcgtgctcgcccacaatgccgccgccgcggatggagctgatgcccagctcctgtgcgccgcgcttctggcgaacctgcgtgcggtcatagacgtactcatatttgccgttcgcctcggtgttgatggcgtcggcaatcatcagcgctgtgccgctgggcgcgtccagcttgttatgatggtgcttctcgatgatctcaatgtcaaactcgccgcccaggatcttcgtagcctggcgggccagctcgatcagcacgttgacacccaccgacatgtttgcgctgcggaagatcggcgtcctggtgctggcagcctccagtgcagcctcatcctccctggaaaggccggtggagcagatgacgcagggcagaccgttgtcggcaccgtactgcgctgctgcaaccgccccggcgggtgaggaaaagtcgatgatgacgcccttgcagggcagtgcgtcaaacccggcgtaaacggggatttcgccgatccgcccggcttcgcgatccacaccggcgacgatgcggcaatcctcgcgcgcaccgatcttctcgaccagtgcgcggcccatacggccatagatgccctgaatgataatatccgtcatgtgttattgttcctttcatgcaaaagtcgtgcaaaagcaaaaagccgacccgcggcatggcagtgggtcggctgtgaaattatttcagcaggccgaactcctgcatggcagtctccagctgcgcctgcactgcggcggagggcgcaacgagcggcagacggcagtcgccggcattccagccaaggcggttcatggcccacttgaccgggatggggttgacgtcggcaaacagtgccttgataagcggcaccgccttgagctgcatggacaggctctcggcagtctcaccggcgaaccatttggcgcagatgtcatgggtgtactgcggggctacgttggacagcacgctgatcacgcccttgccgcccagagccagcaacggcacgatctggtcatcgttgccggagtagatgttcaggctgtcaccgcaggccgctgcgatctcggccacgtggctgatgttgccgctggcctccttgacggcgttgatgttcgggtgcttcgcaagctcggccagcgtggcgggcgtcaggttgcagcccgtgcggctgggcacattatacaggatgcagggaatatgcacggcgtccgcaatggctgtgtagtgggccagcaggcccgcctggctcgtcttgttgtagtagggcgtgaccagcagcagtgcgtcggcaccgtcggcctcagcctgctgggacagccagatggcgtacttcgtgtcgttggagccggtacccgcaatcaccgggacgcggcctgccgtctttttgacggtatagcggatgcactcggtgtgctcctcgtcggtcagcgtcggggactcacccgtcgtgccgcagatgacaatggcatccgtgctgtgggcaatctggtcgtcgatgatgcggccaagctcgtcatagttgacgctgccgtcggtgttcatcggggtgatgatcgccacggcggcaccggtaaatacgggtctcttcatacgaattctccttacaccaaggctgccatgcgcagccgatcagtcaaaatagcccttggcagccagcagctcggccagcagcaccgcgccgccggcagcgccgcgcagcgtgttgtgggacaggcagacgaacttgtagtcgtactggttatcctcacgcagacggccaatgctgacagccatgccgttttccagcatacggtccagcttgggctgcgggcggtcattttcctcaaagtaatgcaggaactgcttcggggcgctgggcagctccagatcctgtgcgggaccgtggaattccttccaggcctgcagaatttcttccttagaaggcttattctcaaagcgcacgaacaccgcgcccatgtggccgtcagagacaggcacacgcaggcactgggccgtaaagcggggagactcggccgagacgatcttgtcgccctcgatgtggccccacagcttcagcggctcctgctcgctcttttcctcctcgccgccgatgtagggaatgacgttgtcgaggatgtcggggaaggtctcaaacgtcttgcctgcgccggagatggcctgataggtgcagacgagtacgtcagaaatgccgtatttgcgcaggggatgcagggcaggcacatagctctgcaggctgcagttggacttgacggccacaaagccgcgcttggtgcccaggcgcttgcgctgggcagggatgatgtcgatgtggtcggcgttgatctcgggtacgaccatcggcacgtcaggggtaaagcggtgcgcgctgttgttggacacgaccgggcactcggccttggcgtaggcctcctccagtgccttgatctcgtccttcttcatgttgacggcgcaaaagacaaaatcgaccttggcggcgacctcctccacattggcggcgtccagcacgaccatctttttaacgctctcgggcatgggggtcttcatcaaccagcggctgccgacggcctcctcataggttttgccagcgctgcgtgcgctggccgcaaggacaaccagattaaaccaggggtgattttccagcagcgtaataaagcgctggccgaccataccggttgcaccgataacaccaacattgtactgtttcatcccgactaagaccttcctttcacgatacccttccttatatctatgcggctcccacggaaatttgcacagataataaaaaaaccggcttgaaaaccggcacaaaatgcaatataatatcatattgcatatagcacagcgcaacacactgttttacagcgtgacagtcccgcacctgttcggctgcggacccagaaaatgcgtgccgcgcattttcttcggcgaagaaccctttcccggctctcgcccctggcagggcatgatgaaaaccggtactgatgcgcttcgcgcctctgtgtttggattcattataatattcccacataagaatgtcaagacgataacgctttaaagtaaaaaaggatgatacaaaaatgctcaaaaaagatttctggtacgacctgccgaaggaactgatcgcgcaggagcctgccgacccccgcgatgccgcccgtttgatggtgctggaccgcaaaaatgataagatcctgcactcggtattccatgagctgccgcattatcttgaaaagggcgatctgctcgttgtcaataactccaaggtcctgcctgcccgcctgatgggcaccaaggtgcccacaggcgctgtctgcgaactgctgctgctccgccaggtcaagggcgatacctgggagtgcctggcccgccccggcaagcggatgcagccgggcacaaaggtggagttcggcgacggcagcctgaccgccgtggtggatgagacgctgcctgacggcaataagtatgtgacctttacctacgacaccgagacactgtacgagaagctggacgagttcggcaagatgccgctgccgccctacatcacgaagcagctcgaggatcagagccagtaccagaccgtctacgccaaggaactgggcagcgccgccgcgcccaccgcgggcctgcactttaccccgcagctgatggatacgatccgctcccgcggcgtcaacattgccgaggtcacgctgcatgtcggcctgggcaccttccgtcccgtgaatgaggaatccattgaggaccaccagatgcacagcgagtggtactccgtcagcgaggagacggcgaagctcatcaacgagacccgcgccgcgggccaccgcgtcattgccgtgggcacaacgagctgccgcacgctggaatctgtctgggctaagtacggcaagatcgtgccgtgcagcgggaataccagcatcttcatctatcccggcatcgagctgaaagccatcgacggcctgattacgaacttccacctgccggagagcacccttatcatgctgattgccgccttctacggctacgacaagacgatggccgcctacaaggtcgccgttgaggaaaagtaccgcttcttcagctttggtgatgcgatgttcattcgataacagaaaatatcttttgcgaaagcgccggggcagatcttcggcgcttttgttgtgatgcgagggggcactgtatggggcagggcagactgttcaaaatcgtgtatcatctgttggacaagggcagagccacggcccccgagctggcagaaaaatttgaagtatcggtaagaacgatttaccgcgacctggatgccatcagtgctgccgggataccgatttatactgtgcagggaaagggcggcggtatttttatcctgccggagtttgtgctggagaaatcgctgctgacgccgcaggaaaaagagcaaattttgatggcactgcagggccttgccgccgcggaagacagccggaccgatgaactgattaccaaattgggcgggcttttccgggtgcagggcgcaaattggatcgaggtcgatttttccgactggcacaaaaatacggcgggtgcggagttgttcgacgagctcaaaagggctgttttcagctgccgcagggtcagcttttcgtattttgcgggcgaaggcggcggcactgtccgcacggtggaaccggtcaagctgattttcaagagcaaggactggtatttgtacggcttctgccttttgcgaaacgactaccgctttttcaagctgacccgcatcaaggatttgacgcttctgccggagaccttcctgcgcaggaaggcggatgtcccggagctaaaaccgacgatacagcaggagcggctgatttcggtaaggctgaaattctccccggcggctgccttccgcgtctatgacgaatttaccgataccgtggagaaggatgcgcagggaagcctgtatgtgaccgtcgatatgccagaaagaacgctgtatagctacattttgtcctatggcgacaccgttgaaatcctggagcccgacgaattgcggcgcagcatgaaagaaaagctgacccgcatggcagaaaaatataaaacatgacagggggtgtcatgctttctgcggtattctgaaaagcgcaaggaggcgttttttatgaaatacgaatggagaaggcaggaaaagcagctttacggtgcaaaaacaaccccggtcttggtgacggttccgacacaaagctgcatcatgataaacggtgaaggaaacccgaatgacacggatttttcaaaccgcgtatcggcattgtattccgtggcctatgcggtcaaaatggcttacaaaaagactgcaaagggcgagtatgacgactttgccgtctacccactggagggcgtctggcagaaaattgagaactgcgagctcatcaaggaaaagctgcgctacactctcatgatccgccagccggattttgtcggagaggacggcgtgtgcgctgcgctggaacgtacaaaacaccgaaaaccaaacccgctcttggaagaagtccgcttcggcaccgtgccgggcgaaacctgtgtgcagcttttgcatgtcggcgcgtatgacgatgagccggtttctttcgcaaaaatggacaaatttgtacacgcccacagcctgatgcgcacggaggaaggtcaccgggaaatctacctaagcaatgccacccgcacagaaaaaaacaggctcaaaaccattttgcgctatagggtaaaataattttctcggcgggggtggtgagcctgccgatttacagttgacgaaccacggattttcttttataataatctattaggcggcgcagggaaaaagccccctgcgccgcctttttcgatgaaatatttttaaaacggagatagaaagctatgccttaccgccttatcaaacaggaaggggctgcccgccgcggcgaatttaccacggtgcacggcacggtccagacccctgcgttccagaatgtcgccacggctgccgccatcaagggcggtctgtcggcgctggacctcaaggacatccgcgcacaggtcatgctgtgcaacacctatcatctgcacctgcgcccgggcgacaaactcgtggctgagatgggcggtctgcacaagtttaccaagtgggacggccccatcttgaccgacagcggcggctttcaggtgttcagtctggccaagctgcgccatattacggaggagggcgtgaccttcaactcccacctcgacggccatcgtatctttatgggaccggagcaaagcatgcagattcaggcaaaccttggctctacgattgccatggcctttgacgagtgcgtcgaaaacccggccacctacgagtacgccaaaaacagctgcgcccgcacggcccgttggctgctgcgctgcaaggacgagatgaaccgcctgaagcatgaggaaaaggccgtcaatcccgaccagctgctgtttggcatcaaccagggctgcacgttcgccgacctgcgcgttgagcacatgaagcagattgccgagtatgatctggacggctacgccatcggcggtctggccgtcggtgagcccgccgaggttatgtatgacatcatctctgccgtagagccgtttgcgccgcaaaacaaaatccgctatctgatgggcgtcggcacgccgggcaacatcattgagggcgtctaccgcggcgttgatctgttcgactgcgtcatgcccagccgcaacgcgcgccacgggcatctgttcacctgggacggcatcatcaatatcaagaacctgaaatacgagcgcgacgagtcgcccatcgacccgcactgtgactgcccggtctgccgcaatttctcccgcgcgtatatccgccatttgcagaaagcagacgagctgctgggcatgcgcttggctgtcatgcacaacctgtacttctacaatcacctgatggagcgcatccgcgaggcactggacaacggcaccttccagcagttccacgacacctatgtgcataaacttgatacccgcatctgatttttccggcaaaatgcttgcacaatgcgcatttatccgatataatagaagaaatcgttatttttaaggagtatacttgctatgatccagtttctgaatgccgccaccggcacggctaccacggctgaaatgctgatgagcttcctgccgatgatccttatcatcgtgttcatgatcgtcctgatctacctgccgcagaagcgccaggacaagaaggatgctgccatgcgcagctccatcgagatcggcgacaaagtcaccaccatcggcggtatcgtcggcatcgtctgcgccattgcggacaaggatgacaccctcgtcatcgagaccggcagtgaccgcacgaagattcgcttccgccgctccgcaatctcctctgtggagaagctggacaccggtaaggacagcaagtccacccccgtcaagaagtaattgacataaaacccacgcccccttgcatagtgttgactgtgcaagggggcgttttgttatggctaaaaatctgcgcaaaccaaaaaccggcgttaaaaatccggccgcggcggcgctgctgctgtcctttggctgcggtgtgggcgtgtgcatattgttgcttgcgctggcggcgtttctgctgacgcatacagggcttccattgtccgcagtgcggcctatggcctgcatggcggcggcagtgggggcggctgtgtccgctgccgtgctggcccgcagactgcggaaaaggctgctgctgtgcgggctgggctgcggggcgttttacgcggtctgcctgctggcggcaacgctgctggcaaacggcagactggattggcagggaagcaacgccatgctgccgctggcactgctgctagggggcctgttgggcggtgcactgacggccctgcgggcgggccgctgatgcgggcggcacagacggcgctgcgccgcccggggctgccgatgctgcggcctgcggtagagcgcccgcaccgggaacataagccgcagacggaaagcggggcggcgctggcatttggcgtgatatttctggcgggttacctgccgggcatctggctgggacgcagcgggacaacgcctctggggcagcagctggcggcctactacacaagccgccccgaaggtacgagccttgcggcaactttcggggcgcagcttgcggtgagccttttgcagttgatactggtgctgctgtgcggcttttgcgtgtggggtgtcggtttgctggcgctgctgtttgcggtgcgcgggctgttcctgggctattgcgcggcgtcagtggcagcgcaaagcggtgcgtcggctctgctgcgctatcggctggacacgctgctttctgatgtgggtacgctgcttctctgcctgtggctggcaggctgggcagtacggctggcgatggaacttttccgcgcggtgcgcgggcgtgctgcgcgggagacactgggcacagcgcggcggctggcagtccgttttgccgcggcgctggcgctgtcagcggctttcgctgccgtcggggctgtactcgccgtcattgggatcgggggcgtcgggcgctgacggcttttgctctacgtatttctgggtggccagcggggaggcggctacagcctttttcagctgctcacggttgatgtgggtgtagatctgggtcgtggagacgttctcgtgtcccaaaatctccttcaaggccagcatatcgacgccgccctgatacataagcgtggcggcggtgtggcgcagcttgtgcggggaaaacccgcgtccgctcaggccggcgctttgcaggcagcgcgcgacgatttgctcgatccgccgcgcagacagccgcttgccggtgcgcttggagacgaacagagcgtccctgtccacaaggttcggcagggaagtgcgcacctttttatagcgctgcagcgcatccagacaggcgtcattcaaataaacaagccgctccttgctgcccttgccgacaatgcggatcgtgtcatcgcgaaaatcacccatgtcaatcgtgacaagctcggctaaccgcatgccgcagttcaaaaataacgtcaatatgcagtaatcgcgctcgtaaaaatcactttgtatattacttaacaaagtgacagcctcgtcccgggtcagatatttgggcagggccctggccggcgagccgaggctgatgttttccgtggggttcgcgggcagccgattgacttgcgtgcacatatagttgaaaaagcccttcaaggcgctcagcttccgtgcgcgtgccttgggaccgttgtcagcactgcgcgcatggtcaagaaaatcaaaaatatcgtgcttggtgatcgttcggatgtcggcggtggtaatgccggtcagatcaatttcctcgggcggcgtatcgtcggccacgcgctgccagcgctgcatcatatagcggaagaagccgcgcaggtccagatagtacccgttgacggtgcgcggggagcgcagctttacaaaatcgaggtaatgcaggtagtcaaccacatcatcaggaatatccaggtacggcgcatggcgctccgggtggaccacatcaatataactgctcatggaagccctcaacttaacatattgatttgcagaagcacacggaaacgatgcttctgcttttttattgtagcacagcaggcaacacctcgtcaatttcaccaacttataagaaatgcaaagagctgctcatattacaaagtgttgataatatgtatatgtatgtataatcatgcaaatatggcttttatggcttttcgctgtgggagagggcgtccgcgacaggattttagcaagtgataatatttcgctaaatgcaaatttagcgaaatatagggagggcgttaaagcaggaagggtgcgaaaaaaccggaatcggagctcggaactgaacggaaaaaccgatagcggaagccccaaaaagccgggtcgccggacggcactttgccattgataaagtaaagcagtctgaaaatgtcagcccctccgaatgaagcctacgccaagcttgcaattcctgaaaaatctggtatgatgaataaaaaggagttgaaatcatgaacaaggacaccatcatcaaggttctgctggccatcattgcgctgatggtctttgcgtggctgtggcgtatcatcagcggtatgctcatcggtacgctggtgcttacgacctcactgctgtcagtgctgattgcgcttatcattcaaattgtgcttccgattgctgttattgtgtttgccgtaaagctctttactaagaaaaagtgagtgtgaatcccatggcattgtttgcgaagaaaaagccgcccgggcctgctgcagacgagcaaaaaatcagtctggctctgacgcccgatgaaatcgacctgctgcgcgaatgcatgaagcgcaccgaggactattaccgcggccttttgctgctgaagcaggattggaacgccgcgcaaaacgaggctgcgattgccatgataaaggtcaggctgaatatgatcgataaattgcaggaaaagatgctctacgacggccagtccgagtattaccgcaatctgcaataaaaaaactgcccgcaggaacgcaaaattcctgcgggcagtttgctattatcagcggttgacagactgtgccattttgtggtaggtgtggcgctcgccgcgaatggcaatggagtatgccatgatgttctgcggcaaagccatgccgggcacgccggtatcaccgatgtggtggatgtcggcaccggccatcttgcacatcagcgcaatctggcggatggtcgacacgtccgcgccctcctgcgaggtgccgatagccgtcagtgccagcttgccgcggctgtgcacgaccccaatcagcttgtgcgcgtactcctgtgtgatgcccggtaccgtgccgggtgccggcagcagaataatatccgcaccggctgccatgaaggcctcggcgtcggcgggggtcatgattttctccccgccctcccctgctacgccggatgcatgcatcttgccggcggccagcagcacgcggtcaccgacggcggcagaaatcgctttcagcgcttctacgatcaattcattgctgacgccgttgccggggttgccggtcagaacgatcagatcaacgcccatttcggcggccctgcgtgcattttctacggtggccaagcgtccgccgctcattttccagagcgttccatcgttgcttttggcggcctgcaggtcgcagggctccagattgatgcccacgacgcgcccggtcagacgcttgagctcccgcacggtctcgacttcgggaaccttcggcagtgcgttgatgacagggtgctgcacgtcaaacatattcagcagcagaatgtcagcactcagggaggccgcatactccgcattcgtcacgtccaccagcagcggaggcgtcaggccgatggtctcgcacgccagtacgcggccctcactgcccgcaatcgcgtccagcagctccgccttggtgtaccgggccagctcgctgggggtgcagtccagcagacgctttacgctcattcgtcgtcatcctcctcaatcacgcggccaatgcccttgcggtagaacggctcgctgccctgcataccctgctggcccagcggagaaatcgaggtcgtgatgttcagatccatcttcttctcacggctgagcaggtacgggcgggcggcctgtgctacggaggcaaacagcttctcgtccttggggccgtccagcaccagcaggtagctgcgggcgtcaccgtttacgatcataacggacagataggcagagcccacaccgggggcgtcggccagcaccgcgcagacagggtcgatcatggcgtcgggcagaatgctgggctcgaccagcgtgaccttgtcgccgggatggatgcggcgggcctgctgctcggccagctgtgctgcgatcttctgggaaacctcgtcctttgtctttttgacggactcgatcagagggcgttccaggcgcagactattgtcaccggggttgatgaccagaccgctggcctcggcatttttcgcgatcatgttggcgtagtcatcaaagcgcagcaggatgatctgctgtgcggctttgggctgtgccttctgccactcgtgcacagcgtcccaatcgctgaagcccaggtagtagcgcttgccctcggggctggtgaccattaccaggctgatcttggtctccttgggcagctgcacgcggccatcggcctccggtttgggggcgggctggccctgcaggtcaaacacggcgggggccagcagcggcgagcgtaccagctcgttcaggatgtcattgagatttttggggttgttgttctccttgaaggccgcgatggtctccttgaccttcggattgaaggcgggtgctttggggagattcttttcgttctgttcgggcatgggtccattcctcactttaattttattgcgttgatggcttcccgcaggtaggacacgcccacgagcttcaagccgggaaattgcgaagggtcaatcattttcaggttgtgcttgggcacaatggcggtgtcgaagccgacgcgctgtgcctcgcgcaggcgcgtttccagatgggtcacgctgcgcacctcgccgccgaggccgacctcgccgatggcgatggtcttttcgtctaccggcaggtcaagcaggctggacgccagcgcgatgcagaccggcaggtcgcaggcagtctcgtccagcttcaggccgccgatgatgttgatgtagacatcctgattgtaaaaggcgtatccggcgcgcttttccagcacggccaaaagcaggtacatgcggttgtagtcaaagccgctcgccgtgcgccgcgggctgggaaagcttgttttcgtcgccagcgcctgaatttcgctcagcaccgggcgtgtgccttccatgacgcaggctacgcaggtgccgctgatgccgatgggccgcccctccagcatgacctgtgacgggttctcgatctgcgcaaggccgcggcctgtcatatcgaacataccaatctcattcgtggagccgtagcggttcttgacggcccgcagcacgcggtacggcaaggttttgtctccctcaaagtaaagcacggtatccacaatatgctccatgaccttggggccggcaatcgcgccgtccttgttgacatggccgacgatgaaggttggaatctccagcgtttttgctacatttaaaaagcgcgccgagctctccttgacctggctgaccgtgccggacgacgacgaaatatccgtgcagcgcatcgtctggatcgaatcgatgacgaccaaatcgggtttcatcgattcgatcagaccgcagatctcgtccacgtcgctctcggcaacgagggagatattgtcctcgggtacgttcaggcggacggcacgcagcttgatctgccgcaccgattcctcgcccgtgacgtagagcacatttttggttttgctgacctcgccgcagagctgcagcaaaatcgtggacttgccgatgcccggctcaccgccgatcagcgttacactgccgatgacgataccgccgcccaggacccggtccagttcgctgatgccggtcacgatgcggcttttttcctcggtggtgctgatgcttttcagcttctgcggcacaaggcttgtctgccccgttacacgcggcgcagcgacggccttgccggaggacgctttggcaggctcggctacgacatcctcggtcatggtattccacgcgccgcaggacgggcagcgccccagccagcgggggctggtctcgccgcattgggtgcagacgtagatggttttgagtttctctttgggcatggatgcctcctgaaagtcgatactccctttattatagcccaaaacacgcccgggggcaagtatgctttgtaatctggatgtatgctgaagcaattttctacgtatctatattttctatagtatggaaagaatcaaccagaaaattccaatataaaatgccgcgtaaagcagtttggacttcaatgaaaaatcctttattaacaaaatatagtcgcagacaccgtagcctgttaggactatattgtgaactggacgcagcgttggtgaaccatcgccaaaaaacatttcgacaacaacggagataaacaacggaggaagtattgttgcaattgtatcaattacttcgtgcacattccatagctgtttccattgtaatattttctgtagtgcaatatacaagaaaattccaagcagacttccaattgtatttacgataaggtcatctatgtccacaacgcccgttttaagaataaactgtgcagcttcaattgaaaatgttgttagaaacgacaagccgattgctttatatatgctgaatgttttttgataatagcagtatataattccgaacggtacaaacataaccacattataaagcatgtcccatgaaacaggactgtgtccatactttaaattttctgtgatgctatgaaagggtatcatgttgactgcatcaatgcgtgttagtggacccccgataagagtcatgatgatattgaatcgcgttatacacatacaaaatacgattataaaatatagtattgtcataaattgaaaaaagtgttttcttctaatcttcatcatcccgaatgccactgctcccttccttcttattgacacaagtataccatatcaaaatccccatgtccaacaccgtttgcggtgcggacatggggattttggggtcatgtattagctgtaaagcagccctgctttacagcgtaaccttgtggtaaaccttcttgcccttcttgatgacgacgcctttattcagcgcgtcaacggtcagaacagccttcgggtcggtgaccttctcgccgtcgacgaggacgccgccctgctggacaagctggcgggcttcacggttggagccacacagacccgcggcgaccatggcggccagcaggccgacaccaccgtctttgataagctcggcgtccagcttcgtgctgggcatattctcgtggtcggcggcaccgctgaacaggccgcgggcagtggcctgcgccttttcggcctcctcctcaccgtggaccatcttcgtcagctcgtaggccagaatctccttggccttgttcagctgctcaccctcccagtggtccatctcgtcgatttgctccagcggtaggaaggtcagcatacggatgcacttgagcacatccgcgtcgccgacgttgcgccagtactggtagaactcgaacgggctcgtcttgttggggtcaagccagacggcgttgcccgcggtcttgcccatcttcttgccctgggagtcggtcagcagcgtgatggtcatggcgtaggcatccttgcccagcttgcggcggatcagctcggtgccgcccagcatgttgctccactggtcgtcgccgccgaactccatattgcagccgtaattctggaacagatggtagaagtcgtagctctgcatgatcatgtagttgaactcgaggaaggacaggcccttctccatgcgctgcttgtagcactcggcgcgcagcatattgttcacgctgaaacaggggccgacctcgcgcagcagttcaatgtagttcaggtccagcagccagtcggcgttgttcagcatcagggccttgccctcgccgaactcaataaagcgctccatctggcgcttgaagcactcggcgttgtggtcgatgtcctccttggtcagcatcttgcgcatatcggtacggccagacgggtcaccgatcatcgtcgtgccgccgccgatcagggcaatggggcggttgccggcctgctgcaggcgcttcatcagggtcagggccataaagtgaccggcagtcaggctgtccgccgtgcagtcaaagccaatgtagaacgtggccttgccgttgttgatgacctccttgatctcttcctcgtcggtgacctgggcaatcaggccgcgggccttcagttcgtcataaatcgtcatgagttttacctccgtttgttgcggcaagggcaaaaataaaagcccctgccaaatgtgaatttggcagagggcgaaagttcgcggtaccacctctgtttgcccgtccctcacggcggcgggccttcgcgggtgcggcagacaaagggctgcgtacaccccaagcgctgtaacgtgcgcacacggcacagcctactggctttcgcgttcagcctgctgctccgggctgtattccgccgcctgcactgccgaccccttgcaccaaccggggcttctctgaagcataacagacgggtactggctcccatcactgcatttaacaaaagatactgtatcatatcccacacgggttgtcaaggggtggtgcatatagaatgcgcccgctccttgtaggggccgatgcttgcatcggcccgcagccggcgcgagggctatttggatttctcaatcaattcccgcgcactggccaggctcaactcgctgaccttgtcgccggaaatcatccgtgccagcacctccacgcggccatccatgtcaagcgtgtggatctcggtgaacgtgcggtccttgcggacattcttctggatcagcagctggttgtccgcaaacgcagcgacctgcggcgtgtgggtgatgcaaagcacctgatgccccctggccgtctggtgcagcagctgcccgatgcgccctgcggccaggccggaaacgccggtgtcgatttcatcgtagatgaccgtcggcagtgcgtcacggtccgccagcgcgctcttgaacgccagcataatgcgggaaagctcaccgccggacgcaatctttgccagcggcttcggctcctcgccggggttcgtcgaaatcaaaaattccacggtatcctgcccgtgggaggacagcggcccccgcgtatgcttgagcgcaaagcggatgccaggcatgttcagaaattccagcgccgccttcatctccttattcatggcagcaaagcctttcaggcggctctgggtcagcttctcggcagcctccttggcggcggcatacagcgtctgcatctgcgctttcagctcggcgatcttctgccccgacgactggaaggtctccagctctgcagcggcggcctcgcgccgtgccagcagctcgtcgacctccatgccgaacttctgcttgatgcggtagatcgtatcaagccgcgtttcgatctggtccagctccccggcgtcaaagccgtaggcgtccagccggtctgccaggtcggtagccagctcgcgcgcgctgtagtacaggtcgttcagccgctcggacatggccgtcagcgactcgtcgagccgcgcactgttctgcagcccgtcaacggccccgcccaagaggtctgccgcgcccgcctgctcaccgtcctcgtcaccggccagcgccagatgggcggcggtgatgcccgccagaatgctctgggcgtgggttatgacgttcttacgctcctgcagcgtcttttcctcgccgggctgcagggccgcggcgtcgatggtgtcgatctcggcggtcagcgcctcaatgcggcgctgtttgtcggattcgcttgcgttcagggcatccaactgccgcttgaccgtgaccagctcgcggtagcggcggtaatactcggcgaacaaatcacggttctgggcatactgatccagcagccccaggtgcagtgccgggtttgtcaggctctggctgtcgtgctggccgtggatggagagtagccccgacgaaatgtcccgcaccaccgccgccgtggcgggcatgccgttgacacggcagctgcccttcccctcggcgttgatctcgcggtacaaaagcaggtcgtcggtgacctcgtagccgcatttttccagctgctttttgacggaggccgggatactctcaaacgttgcccagatgcacgccttctgtgcgccgcttcgcaccagctcacgcgaggtgcggttgcctaaaatcgcattgatggagtcgatcaggatggatttaccggcaccggtctcacctgtcagcacgttaaagccgggggtaaaattcacctcggctttttcaataacggctacattttcaattttcaggcttgccagcatggggcagctcctccctgtcgttaaaattacccgcggcgggtgtactgctgcagctgcttgcagatggcggctgcgtcatcctcgctgcgcatcaagataaagaacgtgtcatcgccggaaagcgtgccgacgacattgtctcactgcttggcgtcgaacacctcgcacgcagcgttggccatgccggaaaaacacttgaccagtaccatgtgcccggcgtaatccaccttgagcaccgactcgcggaaaatcatctcaaaccggctgggtgaatgcgttaccttgccggacgcagacgccggcacgtagcggtaacgcccgtcagcggtggctgttttgaccagctgcaactcacgaatatcgcgggataccgtggcctgcgtcacgtcaaagccttcctcccgcaggtgggccagcaggtcctcctgccggtcaatagggtgctgttcgatcaggtcaagaattgcctgatgacgtgcacttttcacagggatcatctcctcatcaatttgttttcaatcgcatggaactgttccgcgtcgtcgaaggcaatcaaccgcaggcgctgcccacagccggtcaccagcaggctttcacccggcagcaggtcgcattgggcgctgctgtccgcacaggcaaagctgccgtcgcggttttcggcatcagcgataattttcagatggcggtcagccgcaaacacaagcggcgcggcgtgtacattgtgcgcacagaccggcgtcagaaccaatacgtccgcggcggcgtccaggatcggcccgcccgccgagaacgagtacgcggtggagcccgtcggcgttgccagaatcatgccgtcgctgcggtagctgcccaccaatgcgccgtcgcagtacaccttataatccatcgggtgcagccgggtctgaccgaacaccacaaggtcattgatggcgtcagcctgccagccgtgggccggggcttcggcgtggagcagacggcggttggcaagggtgaactcccccgcggccagccgtttgagcttggccgtaagctcaccgacctcgcaggtcgccagaaagccggtgcggccaaggttgacgcccagaacgggcttgccgtgcttcatgcaggaaagcccggcgcgcagcagcgtgccgtcaccgccgatggtcacgacctggtcggcggcgcggtaggcatctgcctcgggcagaaaatgcacacccgtcagcccggcagaaccaaattcgttcgcaaagggctgcggcatcaagaccggcacgcccagcccggccagcacagcggcagcctgccgcgtaacggcaagcccggtgtccttggtcgggttgggaatcagcaaaaccgacattgtgtcagggtcctttctcagtgcagattgggcgctttgtccagcgtatcgtgggaggctgcgacgaccttttcaatcaggccctccggcagcggctgcggggtatcgcagtgctggacgtacatcaggtattcaatgttgccctcgggtcccttgatgggcgaaaagtccaggcccgcgggggtaaagtggttcgccatggcatacccctcggccattttcagtacctcgcggtgggtagccgggtcgcgcacgacgccctttttgccgaccttctcacggccagcctcaaactgcggcttgaccaggcagacgccgacagcgtccggcgtgcagatggcgtctgccaccgggaagatatgcttgagcgagatgaacgaaacgtccacgctgaagaacgcaaccggctctgccaggtcctcaggctttacattgcggatgttcgttctttccatattgatgacgcgcgcatcggtgcgcaggctccacgccagctggccgtagcccacatcgacggcgtagaccttgaccgcgccgttttgcagcatacagtcggtaaagccgcccgtggacgcgccaatgtccatgcagaccttgccgtccgggcgcatcggaaagacctgcatggccttttccagcttgaggccgccgcggctgacatagccgatatcatgcccgcgcacctcgaccttggcgtcgggtgcaatcatctcaccggccttgtcgaccttctgctcgttgacaaagacgatgccggacatgatgagcgccttggcgcgctcacggctctgtaccagtccgttctggcacaggtattgatccaggcgaatcttgctcatgcctgtttctcctttaaagcgttcaaaatatctgcgcagagggccgcggcgtcaagctgctgatccttgcgcagctcgggcacattggcgtgcagcagatgtctgttgtccacggcatgcagcaggaattcgccctgccagccgcattgctgcatggcaaagcacagctgctcgccgatgccgccggtgcgcaccgtatcctcggcaaacaaaatcgtgtcgtagtgcttcagtgtatcgcacacaccgtccggcagcgggtaaagctgcgtcagtttgacgcagtccgcctgtacgccatgctgggccagcagatccttggcggcaatgatctcctcagtctcggcaccgtagctgacaagcgcgacacgtgcaccatcgacagggtccagcacatcgtagcgcgcgcctgtgcagggcagcgccgccagtgcggggttctcgccgccgcgggcatagcggatcatccgcgggccgtgtgcctcgcgcacaagataggtcagccagtagcgcagctccgcatagttggcgggggcaaaaatcgggatattcacattcgaaaagaacgcaacatcgtaaatgccctggtgcgtggcaccgtcgccgggcaccagccccgcacgatccacagcgaacagcacatccagctgcatcagattgacatcatggatgatctggtcgtaggcgcgctggaaaaatgtggaatagatggcaacaacgggcagcaacccttggctggccaggcccgccgcaaacgtgacggcgtgttcctccgccatgccgacgtcaaagaaacgcccgggatggcggtgcttgaagaagttcaggccggtgccgtacttcatggcggcggtgatgccgcacagccgcggctcgtcgtcgcccaaatctgccagcgcacagccgaacgtagacgagaaggaatccttcggtgacagctcggggtcagtcagatggttcaaatcgatggacgatacggcgtggaactcgccggggttctcctcggcgggcttcaggcccctgccctttttggtgacgacgtgcaggaaaaccggcgcatactgctcgccgcgcaggttcgtcagcgtgtgggtcagcatgcccacatcatggccgtcgatgggcccgatatactggaagcccatctcctcaaacatcgtggacttgtagatgccgcggcgaatcagctgcttgccgccctgcaagaccctgaccagcgcgtcaccagccacggggatgcgctcgagcgtcgtctccatgtgggccttgacgtgggagtacttcgggtcggtgcgcagcttggtcagataattcgccatctggccgacatttttggaaatcgacatcttgttgtcgttcaggatgacgatcagattgttcagcttgctgacattgttcatgccctcgtagaccatgccgccggtaaacgcaccgtcgccaacgatgaccacgaccttgcccggctcgttcttgagctttttggcgcgggcgatgccgatggccgttgacagcgccgcactgccgtggccggcaataaaggcgtcacaatcgctctcccgcgggctgggaaatccggaaatgccgtttttgcggcgcagttgggcgaagccctcgcgccgcccggtcagcagcttgtgggtgtagcactgatggccgacgtcaaacagcagcttgtcctgcgggaagtccagcacgcggtgcagggccaccgtcagctccacaacgccgaggttcgacgacagatggccgccggtctcggaaacgctcttgatcaaaaactgccggatctcctcacacagggcgggcatatcggacgcgggcagattttttatttctccgggcgcattgatgcgctccagcaagggatagctcatatacgcacctcgtttttacaccatcggcatggcaaagcccagcacaatgccgagcgccgcaccggtcacaacttcgatcggcgtatggccgaccatttccttcagctttttgccatggggcagctggaattgctcaaacctctggtccatccattcggtgaacatccggttcagcaccttggcctgctcgccggtctcgtagcgcacgcccatggcgtcatacatgacaatgatggacagcaccgccgcaatggcgaagagcggggaattgacgccgcagtaccgccccgtggcaacgaccatggcgcagaccgtggccgagtgggagctgggcatgccgcccgcaccccacatacgctcggcaataaagcggtggaagataaacagattcagaagaaccttaataagctgggccagcagcgatgcacagatcgccgtagccagcacaaaattccaactcagcgcagcgcgcaacagtggcatgggatcacatccttatttcttacgttccagcagctccgctgccatcaggcgcagaaaatctgccccggggccaagcgcatccagcgcggccagcgctgcggtattgtggcgctcggcttcctcgtgtgcgccctgcaaaccgtacagcgtgataaaggtggttttgtcgttgtcggcgtcgctgccaacgggcttgcccagctcctccgtcgtagaggtgacgtccagaatgtcatcgacgatctggaaaaccagaccaagctcggcagcgtagcgcaccagcgccttgcgggtgtccgtgtcggggcgcacacccgcggcggcacagcccagctcgacggcggcaatgatgagcgcaccggttttgtgggcgtgcaggtttaaaagatcggcctcaccggcgcgcacagtttcaaaatgcttgtccagctcctggccgtagagcatgccgcggtccccgccgcctctggccagcagctgcacggcctcaatgcggctctcggcagagcactttgcatgagcaaggacctcaaacgctgccgtgaccagcgcgtccgcggccagcagggccgtagcctcgccaaactgcttgtggcagctcgggcgtccgcggcggaaatcatcgttatccatgcagggcatatcatcgtgaatgagcgagtagcagtgcagcatttccagcgcacaggcatagtccagcgcatcggcagcgtcggcaccggccagctggcaggcggccagcgtcagcacggcgcgcacccgtttgccgccgcccagaaggctgtagcgcgcggcctgccccagctcagactgctgcggcaggtattcatcgcacagcgcggccaggcgtttttcggtcagaccggcccaggcggtaagctgctgcttatattcctcatgcgtcatggggcacctccacatccggggcaaggctggcgtcaatctcctcgacctgcagccgggccttgtccagcgctgtattacagtaatggatcagcccggcagcctcggcgtacagcttgacggaatcagccagcggtgtggtttcatcctgcagctgggtcagaagtccctgcaggcggtccatgccttcctcgaaggatttgggctgcttcatcgggtatcactcccctgttttttgttccaaagtgtgtaccgcttccacgcggcattcggcggcggctctggcgccgcgcagcgtcacggcctcgccgggacgcagtgtttcgacggcgcagggcgtgccgttttgctccggcagcgcgtagccgcgggccagcaccgcgtaagggctcagggattccgccaccgcagcggcgctttgcaggctgcgccgggcatcctgcacatggcgctgtgcggcctgccggacagcggcctgtgcaatggcaagcgcctgcccgcggcggtctaactgctggtgctgacgctgcaaaagctgcgccgtggccagctggttaaacctattatagcatagattgcagcgattctgtatatttttttgaatattttgctgcaaaatgaatattttctgccgtacatccccctgatcgggaacgcagagctccgccgcggcggacggtgtcggcgcgcgcaggtcggcaacatagtccagaatcgaagtgtcgatctcatgccctaccgccgagaccaccggcctgcggcaggcggctgccgcgcgggcgatacgctcggagttgaacacccacagatcctctttgctgccgccgccgcgggtgaccaggatcaggtcgggccgcgggtctcggtccagcctgcggatgccgtccacgatactcttttcagcctcgatgccctgcacgctgacgggggccagcagcaatttcaccatcggccagcgacggccaatgacgttctgcacgtcctgccacgctgcgccggtcttgctcgtgacaacgccgatacacctcggtacggcgggcagcgggcgcttgcgctcgggtgcaaacaggccctcggcctccagctttttgtacagcgcgtcaaacgccatctgcgcggcacccgcgccgaagggcttcatatagtcagcgtagagctggaacgcgccgtcccgctcatagatcgtggcgcgtccgtagacgagcaccagcataccgttctgcggttcgaagttcaaaagctgtgcttgggagcggaacatgacagttttgatggaggcgttctcatccttgagcgtgaaatacagatgcccgctcttgtaatgccgcgtaaagccggaaatctccccacagacgatcagatcgttcagcgggtcgcattgctccaatacgcgctttgccagccggttcaggctggttacattgatgtagtcggccatgcgccacactccctcgccgccaggattgagatgccaatggcattgtcactggcaaattttcccggtacaaaatgtgcgttcggcacgcggttcgtcacataggtgcggatcagatcgctgctcataacgccgcccgcaaaaaccacgggcagacccggatgctcggccagggcgttgtttgccatccgcacaagcgtttcgcccacgcagagcagacagtatttgcagacatagggcgcgtcatgcccgtcggccagcagctttgcgcactggttctcaaggccggacagactgcacgtcagcccgtgtacactgaccttgggatgggctttttctttacacaaagcggcctgctcgctgacatagacgcccgccggaaacggaaagcccagcttgacgccgagccggtccacagcctgtccggcgtacagatcgctgcttgtgcccagcggcgtgatgcgctcggccccatggcacaaaagaaggtcggtggtgccgccggagacatgaaatacaagtgactcccgctcaaacagcgtgaaatcccccgccgcgtacagcgccgcggcaatatgcccctgctggtgggtcagctcgatgagcggcagcgcgcgggacaggctgaacgccgtcgcggcgctgacaccggccagaaagcacggcatatacgacccctccacggggcgcggcctggcggacacgccaacggccctgacctgcgtcaggtcggcccttgcgcccagctccgccagcatggcgggcagggctgccgtgtggtggaacagcgcgtcgctctgccgtagaccgagctgccctttcttgacaggcaaaaattttttgcaatcgcaaacaacctctccggcgtctgtgtcaaacactgccagagaggttgcgtaattgctggtgtcgatgcccagcgtcagcattggggttcgggggtgtcgccgcgctcacgcgcaacgacacccaacaggccgttgacgaactggtagtcgtcctcggcaccgtatttcttgaccagttcgacagcctcgttgatggcgacgccgggcttctgctcgtcgccgtacagcatctcggccagggccaggcgcagggcaaccaggctcacgcggggcacgcgggaaagcgtccagcccttcaggtgggcggtgatgatctcatccagctcggcggcgtggtcgttcatggcggccagcagctggttggcgaatgcgtctggggcggcgtgctcctcggcggggaccgtcggctcttcgggttcaaacgtggcggcaaacgccgtcagaaaggccgtctcgcgggattcgcggcgggtcagctttttctccatacgtaaagttcctgtctttccttgattctcttaggcgataccgcataattctaagtgccgatacggcgagcgaggtgcggcagctgctaagccaaaagcgcagataatactggatgtcttatcgagcattttggcaacgcagatgccgtgccgcagccgccggagcggcgcttaagccgtaaggcgggaattgtgcggtattgcccttactctttttcggctgcgtcggtcaggcccacgaccagaacatccacgcgggacacggtgatgcccgtcatgttctggatcgtctgcttgacgttctcctgcaccttttcgcacaggggcatgaccttgctgccgtacacaacggtgaggtgcaccgtgacggtggcaatgccgtcctccatgacgacggtgaccggcttctgcaggccggtgcggcccagaagcgagcggacgttctggctggtgccggtggctacatcggcaacaccgtcaacctccagcgcggccagacgcgcaatttttgcgataacctcggtcgagatctgtaagctgccgccgatggtattgtgtacatccatagtgtgtaccctcccgttgcaaacggccttgcggccatagttctactaatataaatcagtgtaccacaaaacagcacggtttgcaacagaatgttcagttattttacctctacaatcgtaatgtcctgtgcagtcagccccttgcactggctcaaaagcgcgtcacgtatgcgggtgacctcctcggcagtcagggcatcgctctcggtcatgacggtcacattggctttgctgccctccagattcaccacgcagtcggtaaagcccttcgacttgatgagcgtttccagcttggtttcaagcgtgatattgctgatgcggtcactcagctgggtcgtcagctgctccttctcctcgctggtcagcttggtatccttcagggactttttcagagtgtccagcgcctcatcccgcgccttgctgcgtgttaagcgggcggactcaaaaaactcggtgccggaatccttgtttacgctgacgagctgggcctcgccgtagttcttgttggcggtttcctcagcgctcatcatctgcgtatcggccccggcagctgtctcaagcacaagcgggtcggtgatcggctcggcggcctgggccgaggtctccacggcttccccagaggtgtctgacacgaccagactgggcggggcctcgcgggagaaggaccagttcaggtacacggcggctcccagcgccagtgtcagaacgacggcagttgcgccgcggcttttcagcttggcagaaagttgcttcatggtgttcctccctctagttggccgatgccatttttgcaacggtgatatgattagtgccgatgccggtcagtgcctgcaccagggcggtgacgcggctctgcacggcagcactgccgccgccctcgcagacaacggcgacgccgagcacgcggggcgtctcgacggtctccacaaggccgtccgccccgccgctgcccaaaagtacatgggtggagctgccgtcgctgtcggtgtcggtagcatagatgctctcgctgccggattccagcgtgaccataacggcagtcttgcccgcaccctccacacgggagatcagtgcggtcaggcgggtctccagctctgcggcatagtcggcggtgctgccggtcttggcggctggcgcggcgctctgcgtgctgctgtccgcgggcagccaggacgagaccgccagcagcaacagcccggccagccccatgcagaccagcaggtttacccgctgcttttcatctgccagcgctgcgcgcagccgggcggccagcggagccagacgctcccgggcggtcatggggcagcctccgcaaagcgccagggcagctcccccgcattgacggcgagcagggcctcaatggcgggcttgtcgcgcgggtccacgggcgtgatgacacatacgccattctgccagctgaccgcagcgttgattccggcgttccgcaaaacctcgcgcacggcatccaccgaggcggccagcgcaagttcccggctgtaatcggagtagtcggcggtgtcctgcccaccgggcaggctgcgtagctcccgcacaaggccgtcccagtcaagaccgtgcaccagctgcacgcccactgttaaaatatacagcaccagcacggcatttatgacggatttaaagccgttctccggccagaaaagccgcagtatgcccgccagcgcggacagcacgcagcatcccagcgctatgtgacgcagtgaagtcatcccaagcccccgttccccgccagcagcaacagcgccgtggacagaaagatcatgaagaaatacagcaccagcatggacccgcagagccgtgccccctcaaagtaaaggcggcagagctgtgcgcactgcctttgaccggtggccccggccaggatgcccgcggcggcaaaggccagcgcgcaggcaaggcactggagcagtaccggggcaaacagcgcggccagtgccagcagcgccgccagggccagagaacccttcagcaactgtacggcggcggcagcgcccgtaagcgctgcggctgcggcgtccccgacaacgggaatgacaccctgcaatacccccttgccggtccgcagggccgcactgtccgccgtggccgccagtgcgctttgcagccccagcacgagactgaacagcgccccgcagcccttgagcagccaatgtaggcagcgggaaaacagcgcggcggcatcccccatgccggggttgtcccacaggcaggccgagaccgcaaagcagaaatacagctgcatgacaggcagaagcagcttttggatgacggctgaaagaaacccggacatggcaaaaaacatgccgctgtagacaagcgcccccgacgtctgcccgcccgcggcggccaggccgctgaacaccggcacaaaggcagtcagataggtgcggcagtcctgcgccgtcgcggcgacaagttcggtcagctgcatggcagcggaaaggctcagcgtgccaaagccgagcaccgcgaggatctccacataggcgcggtacgggtccccggccagcaggcccagcagccccgccagcagcagatacccggcggactgcgccgcaaggtgcagtgcgggatgcaaaccctcggcggcccaggcaccgacggtgtcacataaatcggaaaagcgccagcgggcggcgtcggataggtcagtgccgccttcgtccaagatgtctcgagtgcttttgggcaattcgccggacagctcgtccgcaaacacaggcggcggtacggccagcaaaagcactactgcaaataggccgcaaacgagccgagcagcgattgcagcagcggcagcgcctgcaacagcgccagcaccctgccgcagagctcgatggcggtagccgccgcggaaagcccggcctccttgcaggtatcggcggcaagctgcgccaccagcgcaatgcccagcacctgcaaaagcactgccgggctctgcccctgaaaatacccatccagcgtgcgcagccagtcgagcagaggctggacctgccgcacaacgatggccagcagccccgcagcggtgcagaccgagacgaggaacgcgaacgcgggctggtcctttttcaggagcagggtcaacacagccgccacaagcactgcggcggccagcttgcacaacagcatcatagctcatagctcaaacaaggctttgatcagcacaaacaggtcactgatctgccgtaccagcatcgacagcacgacgatcagccccgccagcgtggtcatcatggcctgatcctcccgcccggagcggatgagcagctgattcagaacggccacgatgatgccggtggcggcaattttaaaaacaaggtcgatgtccataggggccactccttaccacagcaaaatggcggccagtgcgccgagacagccccccagccgcggccatagccgccgggccgtgcggcagtgctccgcagcctccgcagactgcgcctcacagcgcgaagccaggcggtgcagcgcggcacaggccgtcaggcgcggagcctcctcggcggcggaaaggctcgactgcacctcttgccgcagtgcgtccggcatacaggcaggcggtgtcagcgcggacaggctctcccccggtgcgggacaaaaaacggcaaacgccgggtcctgcgctgcgcggcgtaatagctccggtccggtgagcgcctgtgcgtccagcagctcggccaggtatgtaagcaggcgggcaaagctgtgcagctggcggcggctgttctcggcgcgggcagcggcggcaaagccgccgcccatcccggccaaaagcaaaagcagcgtgccgagcagccgcaaaagcagcgtcacagcgtcacccactgtgccaccgcaccgggatgggagcgcccggacaggaacgcggcctttgcaaaagcaccggtatccagcagtgcggccaacgccggctttttgcgcagtcccgccgggtcgtcacagtgtaccgtggcaaagaatacaaccccggaggcgacaccctgtgcgacggcctcggcgtcgccgggcgtgcccagctcatcacagacgatgacctgcgggttcatgcagcgcagcgccatggcaatcccctcggccttggtgcagcgggcgtagacatcgcaccgaatctgcgctgcgcggggcagactgcccgcctcacaggccatcagttcgccgcgctcatcaatgacgctgacaagtgcgtccccctcgcagagcttttgcacaagagagcgcagcagggtggtcttgccgctgcccggcgggccggccagcagcagcccgccggtgggggcaacggtcagtgcctccagctcgggcggcagcggacaggtcagccagcgcgcaatgcgcagattgagcgacgttacggcggaaaagccgcccggcccgcggcagcccgctaccccgatgcggcagccgccctgcacggtgaaatacccctgcttcagctcgtcctcataggcgtagaccgagcggcggcagagctgcagaaagcagtcccgcagggtgtcggtctccagcgcggcaggcagacccgatccgggcagaaatttggccgcggggcacagtctgccgcaaatcgtgaactgtacgggctggcccagccgcagacggatctcctgaatgtgcggcgcatagtgggcatccagcttggccagcggtgtgcgcagtgcgggcggcaggctttccagaatgcggtagtactcgtccatcgtttcttcacctcacactgccagtgtatgagggtgcggcgcagggtagaacaaaaaagaggacatcccgtggtgggatgccccctgaaaggtgtatgctgttttattgcccgttatccttgatcagctgatacagcccggcctcgtccagtacggggatgccaagcgtctgcgcctttgtcagcttggaacctgcggcctcaccggccacaacatagctcgtctttttgctgaccgagccagccgccttgcctccgttctgggtgatgagtgtctcggcctcctgacgggagagtgtcggcagcgtgcccgtgacgacaagcgtcataccggccagcgcggtgcccttcttctcgccggtccattgcatgttcacgccgtcgcgcacaaggcggttcagcaggtcggttgtgccgtcctttgcaaaaaattccagcacgctctgggccatgacttcgccgaagccgtcgatctcgcacatctgctcggcagtggcctggcgcagggcgtccatgctgccgaaatgctcacccagcagcgcggcggccttgtcgccgatgttgcggatgccaaggccgaaaatcagcttatcaagattgttgcgcttcgagccttcgattgcgttcaaaaggttctgcgcgctctttttcttgaatttgtccagcgtaagcaactgctcctcagtcagggtgtacaggtcagctaccgtggagaccagccccttgtcgatgagctgtacggccacagcctcgcccagaccgtcaatggccatggcgttgcgggacgcaaagtggatgaggttgcgcaggctctgcgccgggcattcggggttgacgcagcgcagggctgtttcgtcctgcaaatgcaccacgggtgcgccgcagctcgggcaggtcgtgggcatggcaaagggcttgctgcccggcagacgggccgatacgccgatgacctccgggatgatgtcccccgccttgcgcaccttgatggtgtccccgatgccgacgcctaagtttgcgataatatcgccgttgtgcaggctcgcgcgggaaacgctggtgcccgcaaggaagatcgggtcaaacacagccgtcggggtcagcacgccggtgcggccaacggtgacctcgatattgcgcacgacgctttccttgacctcgggcggatacttgaacgcaatggcccaccgcgggaacttgttcgtgctgcccagggtgcggcgggcggccaggtcgttgaccttgatgaccgcgccgtcaatgtcaaattccagcgtgccgcgggcctcgccgatggcttcaatttctttaatagcatcctcgatattctcaaacacgctgtaccgcggtgagaccgggaagcccagtgatttgatatagtccagtgtctcacggtgggtcctgaaggtgcggccctcgcactgctgcaggttaaagacaaagatggacagcccgcgctccgcagtgattttggaatccttctgacgcagtgagccggccgccgcgttgcgggggttcttgaacggcgttttgtcctccaactcctgctgctcttttaatttaaaaaacgccgagtgtggcatatatacctcgccgcgcacctcaagaaagtccggcgcgtcaggcagctcgtgcggaatgtccttaatggtcatgatgttctcggtcacatcctcgccgacgacaccgtcgccgcgggtcgagccgcgcaccagctggcccatgcggtactcaaggctgacagacaggccgtcgattttggcctcgacgacgtactcgggccggatgcctgcctcccgcacgcgggtgtcaaactcccgcagctcgtcaaacgagaacgcatcctgcaggctctccatcttgacggcatgggtcaccttgctgaatttgctgctggccgtgccgcccacatgctgcgtgggtgagctggccgtgaccagctcggggtattcggcttcgatctgcttgagctcacggttcaaagcgtcgtactcgaaatcctccagctcgggggcgtcctggtcgtagtataagcggttgtttttttctatgatgacgcgcagttcttcggcgcgtttgcgggcctgctctaattccatattgctacactccgtttgttggtatcagcttagtataccacatctgcgggggcaaattcaatccaaatcggaggcgtaggcgttcggaatatcgccgcagacgagcaggcttgccagcggatagtccgccgcaacagtcagcgttgccgtgctgccgtccaaaatcatgttgacggtgacggacagctgcaaaaccgcgctgtaccgtgtggtattgatggaaagtgactgtgttgtctcgcgtatctccccctgcacataccccttgggctggatcgacagcagccagccggggccaaggccgctcagcagtgaattgttcgtcagactgccgaacgggacagcatagcagatctccggcagagcgtccatctcggtctgcacggcgctgacaaattgggtctgcgcggccccggcggctgcggcgtccagactgacaagcccggagccctgcgtaaaaagcgcgtcgcacagcgccggggagcgcgtcagctccgcagcaacggcgcggttcatggcctgcacggcggcagagcgggcctcgtattcggccagttcgtgcagcgtcggcttgacgacggtgttgacgtagcggttcagggacagcacccccgcagccagcacaagaacggccaacaggcagaaaccgcgccgctgggcttgccgcctgtcttttgcactgcaccgccgcatagtaccacccctgcgtatcctatgcaaaaacgccccggagcgttcaggctccggggcgtcgggcggcttggtcagtgattatttgaagtagcggtccagcaggccctgcataccgcggccatggcgggcctcgtccttcgccatctcatggacggtgtcgtggatggcgtcgaggttcagctccttggccttcttggccagatccatcttgccggcgcaggcaccgcactcggcgtcaacgcgcatctgcaggttcttcttggtgctgtcggtcaagacctcacccagcagctcggcaaacttggaggcatgctcggcctcctcaaaggcgtagcgcttccaggcctcggcgatctcgggatagccctcgcggtcagcgacacggctcatggccagatacatgccgacctcgctgcactcgccgttgaagttctcgcgcagaccctgcttgatctcctcgggaacgtccttggcgatgccgacgacatgctcggtaacgtaggtgttgtccttcttctcaatgaacttggatgccggggccttgcagaccgggcagaactcggggatggaaccctctgcgatataaccacaaacggtgcaaacatacttagtcataagaattgcctcctgttattttgtaattgctcctaggacacattcctgtgccgatggctttattatacggcatgtacgcataaatgtcaataggcaaaataaaaattttaagaaagattcttatttttgaaacggacttccccggcgctgctgcctggcctgcttcggcagtgcagcaaacagcgcccgggacaaagtgcaactgatgccgcccacgatcagccctgccgccagcagcaccggcgcgtagcccagtgccatcgcactggaaagcagcacggcggccccagccagctgccccaggttgtgggccagcgccgaaccggcacagaagatatacccgctgaccggcagttgcagcagcacaagcatgacgcccagagacagcgccccgccgcacagcgacagaaacccggcggtggccccgcgggtcagaaaggcgaacagcgcctttaacacaaccagcagcagcgccgtgcgggtgcgcagaaacagcagtgcgtacatgacgacgatgttggacagtcctaatttaatagccggcatcagccccagcagcggcgacacgagcgattccagataggacagcgcgatggctaaggcaaacagcatcccggtccaggctgtctcccgggctttttgactgcgcacaggcataccccccgcaaattacaattttctttgactataccctgccgcggagggattgtcaaggcataaaaaatttacatattctgtgccggtatcgcggcaggttttgccagaaacgccttgaaaaaaacaggaaaatagtgtatccttataaaagtatagggcaagctatgcccatacgtgaaggaaatagccacagtgttataataaaaggagaacctgacctatgaaaaaactgatccccgttattctgtgctgcgccatgttgctggccgcctgcggctcctccgcagactctgcccccgccgccagcgagagcacttccgctgccgcatccgaggcagcctcctctgcggaaagcatcatcggcggcgcggacggcgagaccgacatcgtcgtgagcgatgaagccaacaccgcaaaccttgatgccgctgttgccgccatcgaggctgtgaaccccatcgccaacccccgtgcgctggatgacttttccgtggagaatgagctgatgctgacgatggacaacctcgtcggctacaagggcgatgtcacgaacgaccaggcggactgcggtctcgtctttgttgctcaggccaaggacggcaaggtcgatgccgtcaaggcagagctggaagcctacaaggagagcctgtccgccaatgacctgtacgccgagtttgccgacaaggtcgcactggccaaggatgcccgcattgtgaccaacggcaactatgttgccatcgtcattgccggtatcgccaaccccgactacgcccccattgataccgcgctggagactgcgctgaacttctgattgatccctgtaccctgcaggccgctgccgttcggcaacggccttttttgctaacgatgaaattcaccgaaagaaagggagtccgccatggtttttaacagtgtggtgttcctgttctgcttcctgccgctttccctgctgctgtattatctggtgccgggccgcgccaaaaatgcagtgctgctggcagaaagcctcatcttctactgctggacaggtgttgcgttcctgccgctgattgccgtgctgatcgtctttaactacctgtgggcgctgctgacagcgcgggcgaaggccaaactgcgcggtctgctgccgctggcagcggtgctcgtcaatttgggcgtgctggtgtacttcaagtatgccaacttcctgatcgacacggtcaaccaggtcgcgcatctggggctggcggcgctgaacatcggcacggtgctgccgctgggcatcagctactacattttcaagatcatcagctatgaggtcgacgtctgcaccggaaagatcgcgccggagaaaaacttcatcacgtttgccgtgtatgtgcttttcttcccgcagctgatcgtcgggcctatcgtcaaataccgcgagatggccgaccagctgcacgacggcgcgaaccgctgcacgccggcaagggccgagcacggcgcagagctgtttgtgttcggccttgcgaagaaggtcattctggcggactccatcggcgcactctggaccgacatcatcggcgcgggcggcgttgggctgacgaatgtctcgaccccgctggcgtggctgggcatcatcgcctacagtttacagctctactttgattttgcgggctacagcgagatgagcaacggcctggccgcactgctcggctttgactgtccggccaacttcaacctgccgtatatctcgggcagcatcaccgagttctggcggcgctggcatattacgctgtcaggctggttccgggattacatctacattcccctgggcggcaaccgcaagggccaggcgcgacagctgctcaatatgttcctggtctgggctgctaccggcatctggcacggggccagctggaactttattgcctggggcctttactactttgtgctgctcacgattgaaaaaaccttcctgctgaaatatctcaaaaagggcaaggtctggccgcatatctatacgctgttctttgtggtgctgggctggggcatctttacggccaaccagcccggcgcgccgctgggtctgctgctgcaaaagctgtttgtgccccagggcggcatttcgcccgtgtactacctgcgcaattacggtgtgctgctggtgctgggctgtgtctgctcgtccgcgctgccgcactggctgtgggagaaattcagcaaaaatactgtggcaaagctccttgtgtttgccctgctgaccgcgctgtgcgtctgctacgtagtggccgccacgaacgctactgcgctgtacgcgaatttctgagaggaggaacggacaaatgtcaaaggttgtgtaccgtaaaaacggcggcaggcgccgtgcggggtatccgctgctggtgctctgcgccgtgctgctgttcgggttctccctcgtcaatattgtgtggcccaagcgcacgcagctcgagctggaaaaccgcaaggccgcacagctcccggcgttcagcgtgagcgcactgctggacggcagctggcagagcggctttgcccgctggatgcaggatcagttctccctgcgtgacgcagcggtcaacacccagcgcgcggcggacgaggtgctgttccgaaaggcggaggagggcggcattctgctgggtaaggaccgatggatgttcacaaagctgttcacggtggacgacgccacccggaagcagcttgccaagaacgtacaggccgtcagcgagtttgccgcgaaccacccgggcaaggtcaccttcctgctggccccgtcggccagcgtcatctacccgggggaactgcccgcaggcgcaccgatggtggatgaaaacgcgatgctcgatgatatttttgccaaagtcggccagagcgccgatgtcatcgacctgcgcgggacgttcacagacctgaaggacgaatacctgtatttcaagaccgaccaccactggacgcccaacggcgcgtaccgtgcctatgagcagttctgcagcctcaagggcctgacgccgtttgaccgcgccgcgcatgagccgatcacggtgacggatttccagggcacccactactcggccacgcggctgtggaacgtcgaaaacgatgaaatcacctactacccgctcgacagcctgatgacgatctacaaaatcacgggcgaggccgcctacgagccggaaacgacggaaaacatcgtgaatatgcagaagtttaacacccgcgataagtacgccgcctttttggacggcaacaacggttattcaacgatcgagggccgaggcacaggaagtattctggtggtcaaggacagctacgcgaacagctttgtgccctacctgaccgagaattacgcgaaaatcggtgtggtggatttccgcaacttcaagtacggcttggattccacaattgaaaaagagggctatgacgaggtgctggtgctctacaacttccagacctttatcgcagacacgaatctgatctatatttcccgtccgtcaacgctctcctgacagaaataagcgatgcccggtcagaaatggccgggcattttctgtgcctattcaaataggatttccagccgcggcacgggcggagcactgccgggcccgcacagattgatgtgccagaattgcagatggaaaaaatcagcggcatcgtctgcggtcagggccgagaacgcctgctgcaattcggtgcagagcagcgcctgccaatcctcgttgtacgcccccagcggctgaaaatccgtatccctcagatggagctgcacggtggtatcctccgccgtgacgttgacccgggtgtcacagacggcctgcccgcccgcaaaggccgtaaagaagcggcccgtctgcccgcagagcgccgcggccagctgagcctgcaagccggagacgtacacggaagctccgtctgctgccagcagcgcaaagtcatacccgctgtcagcgcggtaggcgggcactgcacagccgtccgcctgggtaaaaagctgctgtaagccgcagtgcaggtcatattccctttccacggccttcatgtcctcatacagggaggcagcgtccgcggcccagctgtggtcggcggtgtccagcacaaaaaccgaaagctccggcgcgggctgggccttgtcgtagagcagcgtgccaagtgtctgcgcgtcggcccaatcacagcccggcggcagtgcggccaggtcgagcagcccgtagtagagccggcccggcagagcgtcctcggccaggtggagcgcctgcgcggcggtgttcccgcgggcagacgtggttttgtactgcacgccgtcactctctgtgttctgatcggccagcagcagacaggcggagtatgccccctgctgccgcgcaaaaaacacggcgcggacgatctcccgctcggagagcgcctgcccgcagccgcagagcagcagcgcggcgcagacggtcagcagcgccttagccttcggtacagacatgcggcggcacctcctatcccggtcaagcccacaaaactccaggtcagcacattgcgcagtgagagagccgcatctaaatcgagcttgcgcagcaccgcgcacaaaaaccagacgccgcccggatacagaggaaaccgatctaacccggcggcgctgtcctcggccttgttctgcccgcccagcagccgcaccagcgcataaaggtagagagccagcttgaccgtgacggccatgacccacagaataaattgcagccactcgagccggttgaagatcgacagtgctccgcatcgcgcggcggcgtgcaccggatcgatgcgcagcggcatggccgcgccgtagaacaattccagaatcaggtgcatccccacgtcaaacgccagtgcccacgcggccagccgcagcagcgtatggcggccacgcttgtcctgctcgggccagagcgcgggcagcaggtattccgggtagagcgtcagctggtctctgacggcggcgagaaaatcgtcctgtgtcagtgcggcagtttgcagattgacgatgcacagccgcggaagcaccgatgccagcatggcgacggttgccagtaccagcagacagagcacggcataggccgtctgggacagcgccgaaacccgccgcagatagacaacaggcagcacaacgagcagacagaccgaggtcagcatgaccgcgccgggatagagccggtccgccagctgccagagccgcagcagctccagtactgatgtgtagacgagcagcgcgccgaacagcagcttgtacacggggtcggcggccagccgccagctgcgggcaaacagccagccgacgcccgccagcagcggcgcacagaccaccgcactgaaaagcccggcgcgcggccagtaggcggtctggctgcgcagcagcacattgacgagcagactgacgagcagtgcggcgaaaagactggggcattcacgcttcatggcggctgatcacctccccggatttggcaaggcggctccagatgctgcgcacaaagccgtcccgcacgctggcccggcccggcggcatgagcgggtagagatagtcgtacccgaacggctcactgccgcaggccatcgccagaatcgtcagtgcggcgcaggctagccccggcacgccgaagcatccggccagcacgatgacggcaaagcggaacaggatcgactgctcatacagcgacggcacagccagcgtggcaatcgtcgccgcagcggccatcgttaaaaccggcacgctgacgatgcccgcgctgacggcggtctcgccgatgataagcgcgccgaccaggctgaccgtgtggctgatagactgcggcgcacgcagcccggcctcgcggacgatttctaaaagcagcgtcacgcagagcatttccagcattggcggcagcggcgtggatgcctcgccctgtgccagcttggtcaaaagccggatagggatgatctccggcgcaaaggccacggccatgacgtagagccccggcccgaacacagccagcaggaaggcgagatattttaaaatacggataagtccggcaaacactgcgcccgaggcgtagtcgtcgaggcactcgaagtgctcggcaaaaaagctgggcacaatgagcgcatacggacagcccgctacaagaacgacggccttgccctcacacaggcgggcacaggccgtggcggggcgttcggtgtaggcagctgccgggaaaagattcagcttgtcctgcttgaggaacgacgcaaagtaggcactgtccagaagaacgggaatctccacctgtttcagccgctcccgcagagcgtcgatggtttcctttggggccagggtactgtcgtagcacagacagtattcggtcttggcacgggtcctggcggtggagatttctgccacaagcgttccggtgcggaactgccgccgcagcagcgaaatgttattgcgcaacagttcggtgaatgcctcctgcgggccgcgcaggttgccctcgctcatcggtgtcgagatcgagcgctggggcatctcctgcgtcgaaagcgcgacgccgcgccgcacgccgtcgatgagcaaaacggacagtccgttggagagcagctccaccagcgcggtgcgatcctccaccgcgtcaggctcggcggggacgcggctctgggtcagcagatagtcgcacagcccctccccgccgcccagcatggcggggtcgcggtccagcatatccaacgccatgcggcagagcttttccggcgaggacagccctgtgaacatgacgatagcgcacgggattccggcaagcatcaggcgcttggtataaaaatcgtcggaacggccaaacatttcctccagaagcgcaaggttggcatccagcgagcggtacagcggtttctgcgtcatggttctccccctctcacgcaggatagtgtggccgcctttgcgggaatttatgaggaggtgccgggatgatttcttcggttgtgcgcacggtgctggtgtatctggctgtggtggtggccatgcggctgatgggcaagcgccagctgggagagctgcagcccgccgagctggtgacgacgctgctgatctccaacgttgcatccatctgcatcgacgagccggatctaccgctctcggccagcctagtgccgattttcttaatcacggctcttgaaattctgaactccacgctggtttggttttgcccgaaatatgcccagctgcttttgggaaagccggtgacgatcatccgaaacggggaaattctgcaggacgagctggcacagctgcgtatcacggcatccgacctggccgaggccctgcgcggcaaggacatcttttcccccaaggatgtttactggggcgtgatcgagccgaacggcagcatcacagcggccccaatgccgcaggacggcggcgagccgcctatgctgccgctgctcatcgataaggcagtttacaaggaaaatcttgcgttcttcggcatggatacggcagcgctggatgcactgctgcgccgtgagcagacgacccgcgaggcggttctgctgctgctctacaacggcaaaaaatccattctgatacagaaaaaggccgccccgaaaggggcggcctgaaaaggtgtgcgtatgaagcgaaattggtatgccgcaatcattctgctggctctgtgcgtgctgctgttccgggcggggcagtatgtggaccgcaccacaaccggaatgaagcggcagcttgaagcagcctacgctctggcggagcagggcgactaccctgccgcacgccgcgcgtacagccgtgcggccaaccgggcactgcgcagcactcaggtcctgggcctgcttgtgcgccgcaatattctggatcagctcaaccagacgctggccgtgctgccgccctgtgccgaggccgacagcctggcagacctcgaaatggagacgcagcgcgcctgcacccagatcgaacaggtgcggcaatcatttttcagcggattttgagcggctgtccagcatatccttcagttcttccataaaggtgttgacatcgctgaactgacggtagacggaggcaaagcgcacgtaggcgacatcgtccatctgcttgagctcctgcatggccagatcgccgatatggatggaggaaacctcgcggtcataggagttgagcagctgctgctcaatgcggtccacggcggcatccagctgggtgtagctgacggggcgcttctcgcaggcgcgcagcatgccgttcagcagcttctggcggtcaaagacctcgcgggagcgatccttcttcacgaccatcagcgggaccgtctcgacgatctcgtaggtggtaaagcgctttttgcagttcaggcactcgcggcggcggcggatcttttcaccgtcctccgtcgggcgggagtcgatgaccttggagtcaacttcaccgcaataggggcatttcatatcgggttccctccttttctacaagctcaggccttcttggcagccttcttcttgttcttccagtcgacccacagcggcgtggcaatgcagatcgtgctgtagacgccgctgaccatgccgaacagcagcgggaacgcgaaggagtagatgctgtccagacggtagatgaccgagaccacgcagacaacgcccagggcgaggcaggtcgtgatggaggtcatcagagaacgggcaaagctctggttgacggacaggttgaccagttcggccaggctcatctgcttcttgccgtacagggcgctgttctcgcggatacggtcatagataacgacggtatcgttgatggagtagcccaggatggtcagcagggcagcaataaagttgccgttcaggggaatgcgcaggaggacaaagacgccgaagacgacgaacatatcgtgcagcaaagccacaatggcggtagaaccggccttgaggccgccaatcttgcggaagcggtaggccacgtagagcaggatcagcacgcaggccgcaaccagcgcgacgacgctcttgagcaggaactccttaccgatggtggcatcgacgttgctgacttcattctggacgaagttgttgtcggggtactgctcattcagggcagccagcaggttgtcgagctgctcggtggtcagcgtgtcactgccgggcagggtgacagtcagggtctggttgccggaaatatcagagccggtctgcagggtcagattggacttgcccagctcggtgccgatggtggacttcaggtcgttcaggtcagcgtcgccctcataggccagcgtgatcatggaaccgcccttgaactcgacgtccatcttgacgccgaagatgccgcagaacacaagcacgacagcaatcagcgcacaggagaaggtgtagaacttcttgcggttgccgatgaagttgatggacggggtcttgaagtcggcaccgccctccttcttgccgccgaacagccatgccttgcgcagaggcttgaagtggacagcgccgcgaatcataacgcgggtcgcccagacgccaaagacaaagttcagcagaacgctggtcagcagggtgaagccaaaggagtagatcgtaccggcagtggaaggtccgaaccaatagaagatcgggttaaagaccttggcccagaagccgtccgtcgggccaaaggcgcccatcaggatggcggcgacgatgacgatggtcacgttgccgtcgatgatgggggtcaggcccatcttgaagccgctgttgacagcgccctcgagggtcttgttcttggacagctcctccttgatgcgctcggcggtgataacgttggcgtcaacacccataccgatgccgaggataataccggcaatgccgggcagcgtcagcgtggagccggggaaaaccgtgaaatagccggacacaacagccagcgtggcggcggcctggcccatcagggagatgaccgcgatggtgccgggcagacggtagcgcacgatcatcaggatcgcgaccagaatgaaggcaatgataccggcctgcaccatgacgtccaagctcttggcacccagggacgggctgatggtggagtagctctcggcggacagggcaaacggcagagagccggagttgatctggttcgccagcgtggaggcgctgtcctgatcgaagttgcccttgatgatggcctcaccgccggtgatggcctcgttgaccgtggcggtggagatattattatcatccagccagatggagatcgtgccgttgctggttgccagctcggtggtggccgtggcaaaggcagatgcgcccgcagagttgaacttcagctggacgacccagccttcggtctcgttgtaggcagcgcttgcggaagccacgtcgtcaccgctcaggatctcctcacccgtggcggacgagcccttgcggaacaccatcttggcggtggtgccgatctcgtcaattgcggtctgcgggttgaagtccgcctcgtcattcttccacgggaaacgcacgatgatacgattcttgttgttgtcaacgtagctctcgtagtcggtgataccgaggccgacaaggcggtcctcgataaccgttttggctgcggtcatctgggcctcggtggcctccacatcgtcggcaggcatgaacgtaacgtccacgccgccgcggatgtcgatgccgaagcggatgtcagatgcgcccttgacgtagacattcttggtgtcgccgtaggtatagctcacacccaagatggccgtcagggagaacagcacgatcaaaattgccacgacgaacaacggccatgacttcccttttctgttcatagaaacctccaaaaaacttgcccgcaccggcgggcgggattatattttactgctggtcggccagcagcttttcaacaactgccaggcgcacacagacgcagagcagtgcagaagcggtttcgacctcggtcaggctcgggtaggtcggcgcaatgcgcagatgcgagtcatcgggatccttgtggtaggggtaggcagagccggcacccgtcagggtcaggccgcagtccttgcacagctgggctacgcgcttggcgcagccgggcatgacgtacaagctgatgaagtaaccgcccttcgggttcgtccagtgggcgatgttgccgcagggggtcagctcctcggcaaaggtggtcttgacggcgtcaaagcagggcaccaggcggcggcgatgcttagccatgtgggccaggacaccggccttattcttgagaaaacggacatggcgcagctggttcatcttgtcgtagctgatgatcatcgtcgagaagcgcttgcacatgtacttcatcgagttctcgctgcaggcgatggcggagatgcccgcgcccgggaaggtgatcttgctcgtggaggtgaacataaagacacggtcctcattgccgtacttcttggcctcgttcagcaaaaccggcgtctcgatgatctcatcggtcaggtggtggacaatgtacgcctcatcccagaagatcttgaaatcgggggcggcggtcttgagcgcggcaaagcggcggatcgtctcgtcgctgtaggtgtagccgtcggggttggagtactgcggcacgcaccagattcccttgatggtgtcatcctcggcgacgagcttttcaatcatgtccatgtcggggccgtcggggctcatgggcacggaaatcagctcaaagcccatctcctcggtgatggcaaagtggcggtcatagccgggcacggggcagaggaacttgcggtgctcgacctggccccagggcttcggggaatcctggaaaccgaacatcatgccgatggcgaccaggttgtacatcagctgcaggctggagttgccgcccacgaaaacctcgccgggctgcacgccgaacacatcggcaaacagtgcgcgggcctcgggcagaccctccagctcaccgtagttgcgggtgtcaaagccgttgtcggtgatgtagttgtccatcttgagcaggtccatggccagatccatctggtgagggccgggcttgccgcgggccatgttcagcttcagattcataccctgaaacttcttgtactgggcctccagcgcagtcttttcagcggtgagttcgtcgtgattcattgcaaagtaatcagccataagtacgatccccctaaataaaatatatacgtttccctacataatcctgtgcgtgccatcctctatcttggcacaaccacaggcgtacactacattatatacgatttatctgaaataaacaagcactttttgccagatagtgcgcttttttatgcggaaaaatacaaaaaagcacatctgcaccaaaaaacagatgtgcttttgcaaaaaacaaagaaaaaacgactggaccgtaagccgggttctgtatcaaacgacgatctatcttgtccttgcgtcgccgcaaggctcacgccatcaccgggacgcgcgagactccgcataatgtcccatacggatgttgcttcgagcagggtttacatagccgcaaagtcgccagtgcgctggtgagctcttacctcgcctttccatccttaccgctttcgcggcggtttctttctgttgcactatccctggggtcacccccggctgccgttagcagttactctgtctctgtgaagcccggactttcctcaggcagcccttgcgggctgtcccgccgccgtatgttccactcgttttctaaaagagtatagcatacttccgccctgttggcaaggcattttataaaagcagccgcaaaatcagcagggctgtcacgccgggcaatcccaaaacgcccgcgcagaacgccgtaaagcgattcagcggcagcgcaatgccggtcaccggctccaacaggcccagcagagccagtgcgcccagaccgcagacggcccctgccagcagactgcgcattccgtgccgctggcgggcggcacagcgcagtacggcgatggcacacacagctgcgagcagacagggccaatattcggtcatggctcctccccttccgcccgcagtgtgcgaagcagcgcccggcagcggcacatcagtgcggcgtgctggtaggtcagctggtcaatataaaatgggtcctgcgcctccgtgaaggcgcgctcgttcgagcgcagtgcctgcaaggtcgtttccagctcggccctggcggcgcggcgctcacgctcctgcctggaaatgcgtctgaacataactcctccgtcacagcagaatgcagatcagcccgtcgcagccctcgttgatgatgcgctcaagcgtctgctgcaggcggctgcgtgcctcctgcggcatgtgcagcagttttgcctgcacgccctcgctgaccagctcgttcaggctcttgccgaaaatattcgtgctccacagcttgccggggtcggtctcaaagtctgccagcaggcttttgataagctcctccccctgctgctcactgccgacggtgggtgaaagctcggtgtggatgttggcgcgcatgatgtgcaggctgggggcgctggccgacagccgcacgccgtactgcccaccctgcctgacgatttcgggttcttccaatgtcaattcatcaatgcccggcatgacgatgccgtagcccgtggcctcgacctggtcaagggcggatttgatcttgtcataggcgcgcttggcccgggccaggctgacgacacagggcaaaaggcttgcctcgtccacgatgtccagcccggtctgttcaccgaggatcttatagaaaatatccggggcgacggcagcggtgatgctgacactgccgctggccaaatccatgccggtcaggctggcggcggtgatgtattcacaccccagctgggggcgcttgcctgcaaggtcggccatccggtgcaccgaggcagcaaaatccagcatggacgtgtagaccgcgctttgcagccagtgcccgctttcgagcatcgtgacccaggcgggcatctgcacggcgatctcgcggatcgggaactcgtacaaaagcgtttgcagcagcttgtcgagggtctcgacggtcatcgtcgtgcagttcagcggaaggaccgcgtggccgtaggtctcggccagctcggcggcaaggcgctgtgcatcgtcgctgtccggctcggcgcagttcagcaggatgatatacggcttgccgatgccgtccagctctgcgatgatacggcgctcggcgtcgagatacgcctcccgcgggaggtcggcaacagagccgtccgtcgttacgacgaggcccaccgtggcgtgctcccggatgacgcagcgggtgccggtttcggcggccaggtcaaacgggacctcgtggtcgaaccagggactcttgaccaggcgcggagcctcgttttcttcatggccgagcgcgccgtccaccatgtagccgacgcagtcgatgagccgcgccttgaagctgccgccgcccgaaagctcgagcttgacggctttctcggggatggacttcggctccgttgtcatgatggtgcgcccggcggcggattggggcagctcgtcatgggcgcgggcacgacgggcctcgttcttgatgcgcggcagcagcatcagctcggcaaaccgcttgataaaggtgcttttgccgctgcgcaccgggccgacgacgccgagatagatgtccccgccggtgcgctgtgcaatgttttggtagatttgatcctgtgtcacggatgtgtccctcctttacagcgctgcggggatcagcagacaggcggtgtccgtcgtaagctcctgcggcgggtcaccgttggtgtccagatggttggcggcggccaggtcacgggcgcgggcatggtagcgcctggcaatgtcaaagatgcgctccccctgccgggcgtagtaaatatagagggccgggccgtcgctgtcgtcgtattcctcgcccagctccacgccgcagagcgcatcaaagctctgcgcctggaacagggcgccgctgatctcgatctctaaatcgacccgcagccgtgcaccgtttttgctgctggcgacccgcgcgacggagaccccgacacttggccacgcaccgtcagtgctgccgggccagaggccgtcaggctgccaggtaaacgccttgtcgtagcaggtcagctcaccgcgggcatcgctgatgaacacatgcgcagtccccttgcccagtagttttaaatgtgtttcagccttgtttccgtcagcctgtgcggcgcacagggcgcccagcgttacaaagcagccgagaacagtgccctcggcgtcgggcaggtcgtcgtcaagcgtgaccgggatacgcccggtcaaatccgcggttttctgcaaaaggcggcagaccgtctgcacggtctgggtcttacagagcgtggagtaggcgtcggccacgacggtgtgctgcacgctgcgccagacctcgacgcgcagcttccaggtcaccgagagggacgcttcccctgcaccgtcgactgcgctcagtgtgcaggccagcacctcgccgcgcacaagggctgtgtcgtcctcggtcacgccgggcagctccagcgtctgctgcacggcaagatccttgctgcgcacggtcagctcgccggtgtcggtgttctggctgcatatttgaatttgcagcgtcccctgcacactgacctgcccggtggccggcgctgcactgccggcggcaaagctgccggtgatgtccagcacgctttccccggtgccgggcagcgccgcagcggtctcggcagtcaacgttttttcctcggtcacggcgcattgcaggccctgcattgtgcgggtgtactgctcaatgccgcagtcggccagtgcggtcagcagctcggactcccgccgcacggccaccgcagcgcagaggatgtacgcgccgcgcaggtcgatgcggtgctcactgacggcgcggcagttgcagtattccggctcgccccagacctgggccgggccgtcggcgtactgcccggcgggcagctcgaccagtttttcaaaggcaaatttctgctcggtgcgcaaaaggcgcgtgccgggctcctcgctctggtagtagacggtgcagcgcagatagccctcgctctgccagcgcccgccggacacacggttctgcaggacgacgggcgtgatcaggcacttgacgatcttgaatacggcgggcaggtagtcgggaatcagaatctccgtttccacgggaagctccagccgtgtttcccagcgtccgccgtaggatgcgatggtgtctttgaacaccttgagttccatattgcttgcccctttccggttatgttctggggcattatatgcggcagggcaaaaaaatagcccccgcccggaacaggcaggggaaaattttggattcagaccttgaaggctgcgcgtaagatccaacggaaggcgcgcgggcagcgaactacgaccacatgcatggcatacacctcactttccgtgtttgtgtacgccatactatgccgggcagtgctgcggtgttacgcatcgtcgcgggtcagtacaacgagaccgcagccgccggagcattgcagctgtgcggtgtccgcgataaactcattgctgacgccgagcggatagtccgcggtcagcacggcgttttccagcgggtagaacgcgccgcggatgcagacgccggtcagccgaccttccatcgggaaaagggagagatacttccagtccctgcgctgcaaaataagctcgcggcccggcacaagataccgcagctcgctgcgctcgttgaccagcaggacgtttacgccgtttttggcaagatacagcccggtggcaaggttggccagcgtgtgctccagccgtgccccgccaagagcgcccagcagggtgatctcgtcatagccgtgctccagcagccaatgggcggcgtactgggtatcggtatcgtccttcacatggggcagcacaatggtctcgtgctcggttttgggctgcggggcggagtcaaagtcaccgacgatgaggtcgggacgcaggtcaagccgttcggcattgtggtagcccgcgtcgcaggccacaacaaaatcaccgggctgcacatagcggcacagtgcggtggaaaccggcacggcggaaagaatcacggcacgcctgctcatttctcccactccttccgtgcgctggcttcctcatacatggcaaggtagcttgcatagcgcgttttgctgatggtcccggcctcgacagcctcacgcacagcacaaccggtctcactgcggtgggagcagcccgtaaagcggcactgcccgaaatagggtccgaactccgggaaggtgtgctgcagatcatccttcgggatgcggcagagcttctgtgcctccaggctggcaaagcccggcgtatcagccagacgccctccgcaaatctcaaaaatttcgacctcgcgggtcgtgtgccgcccgcggcccagcttttggctgatctgcccggtctcgcggtgcagcgcgggggccagcgtgttgagcagcgtcgatttaccgacgccagagttgccgcagaaggcgcagagatgcccttcaatatagcctttgacctcgtcaaggccctcgccggtctcgtaatttagctgcaccagcgggatgccgctgcccgcggaggcggtgcgcagcatatcggcagcagccaaatcagattttgtcacaacaagcacgggctgcacatccttgtagatggcagcggcggccagctggtccagcaccaacgtactgggtacgggctgggtcgtgctggtaacgatgaacagaatatccagattggcaatcggcggacgaataaagacgtttttgcgcggtaaaatctcatcgatcattgtgccgtcgtcggacagggtgacgttgtctcccgccaccggcgtgatgccgcgcttgcggaagatgccgcgcgccttgcactcgacgatgccgtccgtcgtctttacatagtagaagccgccgatgccctttgtaatatacgccatgacttcccccacatcaggcaatggggttgccctgtgcgtcgcaccgctggccgttctcattccacatggtaccgtcggtcagctgatggatctggtgactgccgtcagcactcggccaccagctctcctgcacggtgatggtaccgtcctcgttcacagtgggttcgactggctcgggggtggcgacgacctcgggcacgccggtggacaccacgagtgtgatgacgctcgacttacggaccgtggaaccggcatcggggctctggctcagtaccgtgcccgcgggctgttcgctggcctgctcgatcgtgcggatggacaggttcagccccttgacctcattgcgggcttcctcaatggtcttgccggtcaggctcggaacctggctctccttgctgacctcggagcggctgacgtacaggatgaccgtggagtcaccctcgacggtctccccggcggcgggctgggtgtagacaacagcgccgttggccacggagttgtcggacatgggcttcttggtcacgcgcagacccatatccttcagggtctgctcggcatcctcggccaccatgttcttcgtctcggggatcgtgacgtactgggtgcccaggctgacggtcagcacgatgcgctgcttttccttgacggtacgcccggccttgggggtctgacggatgatcgtgcccgcaggttcactggaatactcctccgggaattcggcgcgcagcaggttgttgtagtcggtggcgaggaactcgtcctttgtcatgcccacaaagctgatgacctgcacatcggcacggttagagaacagcaggttgctggaattggtgaagatcagatagatcaggatggcagcgccgatgacaaacgccacggccatgccgaagaagatcggcaacagggaaaagcccttggatgcctttttcttcttcttttgggcggatttgctgcggcccgggttcgaggtgccgacacgacgggcgtcacccgtgtggatgctggtggatttcgggctgggctttgtgttgcttaccacgcggttgatgttcctttccgggttgtcctcggcactgcggtactcatacgcaaactggatggacgggttgcgcttgaattcctcgatagcggccagcatctcctgggcgctctggtagcgcttgtcggggtccttttccatagctttctcggtaatctggcgcagtcctgccggggtctggggtgcgatttcggccagcggcttcggcttctccgaaatctgcatgatggcgatggacactgcaccgtcgccgtcaaacggcaggcggcccgacagcatctcgtacagcataacgccgacagagtagatgtcggtgcgggcgtcggtgcgctcacccttggcctgctcggggctgatgtagtgcaccgagccgatggccttgtcgctgacggtctggctctgtgcgcgggaaaagcgtgcgatgccgaagtccatcatcttgatggagccatctgccagcagcatgatgttctgcggcttgacgtcgcggtgaatgatgcccttggagtgggcgtgctgcagagcactcaaaatctgggtggcaaagtgcacggtctccttccaggtcagggcgccgccgcgctgcttgagatattcctttaaagtgatgccgtccacatattccatgacgatgtattgcaatttgtcggtgacagagacgtcatagaccttgacgatgttgggatggctcagaatggagatcgccttcgattcgttcttgaagcggcggaccagttcctcattgtccagaaattcgtcttttaataccttgacggcgatctggttgcccgtttttaaatcagtgccgcggtagacattggccatgccgccgacacccacgagactttcaattgagtagcggccatccagccgtttgccgatcagattatccattgttgacctccgtagcttccacgcccatgagcaggaccgtaatgttatcctgaccgcccgcctgcagggcgcggtctaccaaaatgctggttgcatcaaaaaaaggaacctcgcgcagtacctgcgcaatatcatcgtccgcgaccatgttcgtcaggccgtcggtgcacagcagcaggatgtccccctcctcgatttcgcagcggttgtactccggcacaatgttggccgagacgccgagcgcgcgggtgatgaggttcttctgcgggtggacggcagcctgctcccgcgtgatctggccgctgtcgacaagctgctgcaccatcgagtggtcgcgggtgatctgccgcagcccgcctgcgtggaacaggtaggcgcgggaatccccggcgtgcaccacatgggccatgccgcggctggcataagcgcagacgccggtggtacccatgccctgcatctcggggtcagaggtggacttttcatacacggcgcggttcgtgatgtcgaacccgcgcatgaggaaagtcttttccatgccaggctgcagggccttcatgtggcgggcaaaatactgctgcatggtgtcggtggcaatgcgtgcagcaatgcgcccgccgttgacaccgcccatgccgtcgcagacgatgccccaggcggtgccgcctgccagctgctgcgcacagtagttgtcctggttttcctgccggcagctgccgatgtccgtgatcgcggcaatcttcattcgggttggttcctttccgctgctccgttgcggagcaagactcattttccctgcgcgtcctcgcggcgcagctggccgcaggcggcgctgatgtcggtacccagacggcggcgcaccgtggcgttgacgcccagtgcctccagctccttctggaagcggtgcacattggcatcgtcggtggcagaataggggctgccgtccacggggttgatgggaatcaagttgacgtgcgcgcccatgcccttgatgaggttggcgagcttctgcgccatctcactgctgtcattgacaccgcgcaccatcgaatactcaaagctgatgcggcggcccgtctccttctggtagcggcggcaggccgggatcagctgctccagcgggaacgcatcgttgaccggcatcatgccggaacgggtcttattgtccggcgcatggagcgagacagacagtgtcagctgcagatgtcgcttcgccagctcgtcaatcttgggcacaaggccgcaggtcgacaggctgatgttgcgcataccgatgttgacgccctccgggcaggagatgatctccagaaagtccatcacattattaaaattgtgcagcggctcaccgatgcccatcaaaacaatgtgggagacgcgctcgccggtgtccttctgtgcggtgtaaatttccgccgcgatctcccctgccgtcaggtcgcgcacgcggcccgcctgggtggaggcgcagaaccgacagcccatcgcgcagccaacctgggtggacacacagacagtattgccgtatttgtagcgcatgagcacggtctcgatgcagttgccgtcggccagctgcaaaagatacttgaccgtaccgtccctggactgctggcggcggcggatgacgggggctgcaatcgtgcactgctcctccagctgggccagcagcgccttgggctggtcggtcatctgggagaactccgtcacaagcttctggtgcagccatttaaaaatctgcttggcgcggaattttggctgacccagtcccacgatgtaggccgtcagcgcgtccagtgtcaggtcggaaatgcagattttttcgcccatgcggggtcacctccttttataagaacgagtttacagtcagtttcgttccaggatggcggcaaaaaaaccgtccgtcccggttctgtggggcaaaaacagcgtgcccagcggcgtgatgtccgcccccggcagcgccgtctttggcagtacaacgtgaaaatcaggattggcggagaggaatttctccacctgggcctgattctccttatcattcactgtacaggtagaatacaccaaacggccattttcggcaagtgaatctgcgccgttttgcaggattttttgctgggcagcgagcagattctctatcccgtccaaatccttgtaacgaatgtccggctttttggcgataacgcccaaacccgagcagggcacatcgcagagcacacggtcaaacgttggccagtcggaattgtgctgtgtggcgtcattttcaaccgctacggcacaggtgatgccgcagcggtcaaacgcctgctgcaaaagcggcacgcgggcgggcacaaactcgccgctgacaagctggcctttgtcctgcatggcctcggccaacgtcaggcttttgccgcccggcgcggcgcagagatcgagcacctgctgccccggctgtgcgtcaacgcagagcgcggcaaactggctgacaagcccctgcacatggaaaagcccttttttgaatgccgcgctcgcggcgggcgaaccggcaaactccacgaccagcgcccccggccaggggccgggcgtcgcggtatggccctcctgctgcaaaagcgcggtcagggcggtatcgttcgtgcgcagtgtgttgacgcggattgtcgtcttaggtttttcataaaatgcggcggccagggggaacgcctccgccccgaactgcgcatagaaaagctcggccaccgggcgggacaggcagtagtagatcgagagccggtccagagggtcggcaaaatcggcctcggagacatcggcggcagcggcgcggcgcagcacggcgttgaccatgcctgcggcgctggattttcccagtgcccgcgtcagcttgaccgattcattcacagcggcgggcagcggtacattcatgtacagtgcctgtgccagtcccgcccgcagcacggcgcgcaccggcgcgtccagcttggcgacgggctttttcgtaaactgatttatacgatagtccagcagcggcagacgctcgagcgttgtgtaaaaaatgcgcgcggcaaaggcggcgtcgcggctatccagcggtggcgtgcactttttcagctcggcgtccagcacaaggttggcgtagcctgcctgctcctgatgaatcagggccttgacggcgagacggcgcggcgtcacaggctgtcccccgctttcagacggcggcccgcggcccaggccgtgcccgccatcggcttgccgccctcgggcgtgacagtcagcagcgcgacagcgccgttttcagcggcaatcgtcagcggcttcagggccagcacggtgccgggggctgcgtgctgcgggttttcggccaggcggctttccaacaccttgatgcgcttgccgtcctgcgcgaaccacgccacgggccacgggttcatgccgcgcacccagttgtggatgtgggcggcatcctgcgtaaagtcgaactgtgccatgtccttcgtcagcggcggggccatggtggcggcagcgttatcctgcttgcgcggggtcaactcccctgcctcgattttttccagcgcggtgaccagcgttccggcacccacggcgctgacgcggtcaaacaattcaccgctcgtctcctcggggccaatggtgaccggctccaccatcaggatgtcgccggtgtccagcccttcgtccagctgcatgatggtcacgcctgtgccctcgtcaccgttgagcacagcccactggatgggcgcggagccgcggtatttgggcagcagcgagacatgcagattgatgcagccgtacttcgccacatgcagaagctgcggcgggatgatgcagccataggccacaacgacgatgatgtcgggcgctaactctttgataagctcatcggacgagccgtcccgcagcgtgcggggctggtagaccgaaagtccgtactcaacagccagctgcttgaccggcggcgcggtcagaatctgcttgcggcccacgggtttgtcgcggcgggtaaagacaccgcagacctcatgcccggcgtccagcagggcggccaggctttcggcggcgatgtcaggagttcccataaacaggatgcgcataaattttagtcctcgttttcctcggggtagtcgtcctcatagaaatgctcggccaggtccatgatggtgatgccgtccagatggttgttctcatgctggatgcagcgggcgagcatgtcatcggcctccagttcaaaccactcgccgtggcggtcctgtgccttgactttgacgtgcttcgagcgcttgatcgcgccgttatgtcccgggaaggacaggcagccttcgtacagctcgacctgctcgtcgctcagctcgaggatctcggggttgatgaactcaatgaacttgtactcgtagttcgcgggaacctcctcgggcaggtcgcggtcatccaggcagatgaacaggcggcgcatcatgcccacctgcggaccggccagacccaggccgttcgcggccagcagggtctccttcatatcgtcaagcagagtgcccagacgatcatcaaacttggtaacggggcggcagactttcttcaggatcgggtcgccgtcctgcacaatggtacgcagtgccataaaaataacctccaaatgttataaatcaccatcagaattgaaatcgagaatcacggacgccttctgcggcagcttttcggcgtcgtaggcgtccagtgtctcgtgcaaaagcgcgcggaacgctgcgtcattgcggcatttcagcgtcagcttgtagcgaaatttgttgttgagcatcgtaatgttcatcggcgcggggcctaaaatgcgcagcgggatatggggcttttgcgcggcgtgctgacccagcagtgcgccaaaccgctgggctgcgatgaacacggccccctcctggtcaccgatgaagccgacgaccacgaacgagcagaacggcgggtacagactgaaccggcggaaggtgatttcttcccggtagaagcccttgtagtcctgcgcggcggccagctgcaaaacggggtggtcaggcacggttgtctgaatcagcgcccgcccgggcagtgcggcgcgcccgccgcggcccacgacctgggtgataaggctgaacacgctctcgtatgcgcggaagccctgcccgaacagcagcgagtcaatgcctaaaacgccgacgagcgtgaccttttcaaagtcaaggcccttggcgaccatctgggttcccagcagaatatcatattcgtgccgcgcaaactgtgcaagcatcgtctcgtgcgcgtccttgcgggaggtggaatcctgatccatccgcaggatgcgcgcaccgggtagcagctcggccagctcctcctccacccgctgggtgccgaagccgctgtagctgattttgccgccgcactcggggcaggtctgcggcagcgggtgtaccgtgtggccgcagtggtggcacaacagtgcctgctgcggcttgtggtagacgagcggcacgctgcaattcggacatttcagcacatggccgcaggtggtgcacatgccgatggtgcggtagccgcggcggttgagcagcagaatgctctgctcgccgttgtcgaggttttcttgcagttcccgcgccagccgcacgctgacctcgcgcgggttgcctgcggccagctcagcgcgcatgtcgatgaaatcgacgctgggcaggggccgcccgccgtagcggtggatcagctgcaccagctgcagcttgccgctctcggcggcgtggtaggtctcggtcagtggtgtggccgaggcaaacagcagcagggcgttttccatgaccgcgcgctttttggcaacatcgtgggcgtcaaagcgcggggcggactcgctctggtaggtgtgctcctgttcctcatccatgatgataaggccaaggttttgcagcggtgcaaacactgcactgcgtgtacctacgacaatatcggcgtttccctgctggatcatccgccactgcaaaaggcgctcggtattgttgagcgccgaatgctgcacggccagacggctgccgaaggtggacttgagccgccgtatcatctgcggtgtcaggctgatctccggcaccaggaccagtgcgcggcggcccagctccagcgtgcgctggataagccgcagaaacacaatggtcttgccgctgccggttacgccgtgcagcagtgccgcgtggggtctggcatcctccagattcggcagcagatcgttaaaaacctgctgctgctcaggggacagctccagcggctgcgggtcaaacgggatggctgcaaacaggtcgatggccttgtcctgctcggcggcggtcagcacgccctttttgacaaggccgtccagcgttgcccgggaaataccgacctcgtcgagctgccgcgcggtcagcgggccgtttttcagggcggcgacagcggccagttggcgcgggccgggctttggcttttccggcagcgcccccgccagcgtgtacaggcgctccgtagagcgggtcaggcggccttgcatgacgtgcctgccgtccacgacagcgggccggtactgtgcgccatacgggatgactgccttgacggcctcgaaccaggtgcagaaggtgcgctcttttaaaaagcgcacaagctccagaaggtccggcgtcaggcgggcatcctcgggggcggcatcgtagagcgttttcagccccttgggggcgtcgctctcgtccacctccccgacagccagcacaacggccatccgggccttgctgccccggccaaacggcaccagcaccatgctgccgggaaagaccctcccggccagctccgcggggatgcggtaggagtacagcttgtcaaagtggatgttcgcgtcgttgacggcagcctgggccagcagcaggctcattcgtcgctgccgtgctgcagcttgaactggatgatggaataaatgctctcggcgcaggagtcgacctcaatgttgacgacatgctcgtcatagttgacggagtttgcaatctctgtctcggcacgcttcaggcggcgctggatggtctcctcatcctcggtgccgcggcagcgcagacggcgctcgagctcctgcatatccgggggcagcacaaagatggtcgttgcaccggggtacattttcttgatgttgcctgcgccctcgacctcgatgacgaggatgaccgggatgcccagcttcatgcggccctcgatctcgctgcgcagcgtgccgtagtagttctcgcagtattttgtgtgctcgacgatctggtcatgtgccagatgatcctcaaaatcagctacagacatgaagtggtagttgatgccgtccttttcaccctcacgcggggtgcgggtcgtggcggagacggtgtgctgaatttcaggatgttttttcagcagagcggcaacaacggtatccttgccggtgccggaagggccggagacaacaaacagatatttttcacctttcatcgttacttcctcttttcttcagtttcttcgttggcacgcccggtcaggctttccagcgggatgccggacaaaatcacatggtcagagtccatgatgagcacggcctgggtgcgccgcccgtagctggcatcgatcagtgcgcccttctcgcgggcatcctgcaccagacgcttgataggcgcagaatccgggctgacgatgccgatgatgcggtcggcattgaccatgttgccaaagccaatgttcagcagcttcatggcgaacctccgttactcgatgttctgaatctgctcgcgaattttttcgatttcggatttcagctcgacgaccagccgcgtgatggctacgtcctggcacttggagccaatcgtgttggactcgcggttcaactcctgcgtcaaaaagtcgagcttgcggccaatcggctcgtccagctcgaggatctcgcggtactgcgccacatggctgtgcagacggacggtttcctcgtcgatggcggtcttgtccgcaaaaatcgcggcctcggtcacaaggcgtccctcgtcgatgctgcgatcccccagcagctcctgcaggcgggcgtagagcttatcgctgtaggcctgcacgcggcccgcgctgttctcctcgattttggcgacgagcgtttcaatcgtggtcaggcggcctgcaacatcggccttcatcttctcgccttcgacggcacgcattgcgacaaaggcatccacggcctgctcggccactgtcctgacgtcctcccacagctcgtcctcattcgtcggggcggcagtctgggtcagcacgtccgggaagcgggacagcatcccgacggagacgtcgtttttcagatccatccgctcggccatcgcattcagcgcggcgcggtagccctcggccagctgccagttgacggtgacgacggtatccgccgccgtgacggtctggatggaaaggctcagctctaccttgccgcggctgaccttggaggcgacgagctttttcagcttgtcctccagaaatgcgcaggagcgcggcaggcgcgaggagtactcaaaaaagcgcgcgttgacgctgcgaagttcaaccttgatgtcacggccatgcagcagcgcaccggcacggccatatcctgtcatgctcaaaaccataacctacacctcataaacacatatattttatattttactatttttgggcgcaagatgcaaggctgacaccgggattttgcaatatttcacgcagtttttgtggcgcggtaaacaaaaaccgcccccgcggcagagcgggagcggcaattcttttacttagacggggtgagacttgttttcgtagtcggcgtgcagagcatcgacaccctgcagacgggcgttgcgcttctcaaagaacttgggcgcgacctgcgggaacatggcgtaggtcagaacgtcctcctcctggatggcgtacttggaggcctcggccttcagcttctccatctcgggctcaagggtgtcggcaaagcggcaggtgatcggctgctcgcccttcaggatgaagtcactgaactccttcttaatgggcgcgggggtcttgccgtaatcgccgtggaccaggcccttgaactccttggtgaccatcttgtagcgctcacccatgatgacgttaaagacggcctgggtaccaacgatctggctggtcggggtgaccagcggcggataaccggcatcctcacggacgcggggaatctcctccagaacgtcctggagcttgtcctccttaccggcgtccttcagctgcttgagcatgttggagaacatgccgcccggaacctgatacagcagggtgttggcatcaacgcccaaagacttctggttgatctggccgttggcgatgtacttctcacgcagcttgttgaagtaagcgcggacgacattcagctggttcagatccagaccggtgtcgtagtcggtgccctgcagagcggcgaccaggctttcggtgggcatgtgagaagtgcccagagccagagggctcatagcggtatcgacgatgtcggcaccagcctcgatgcccttcaggatggacatggaagccaaacctgcggtgtagtggctgtggatgtccacggggatcttgacggtttttttcagctcggagaccagctcatagcaggtgtagggcttgagcaggccggccatatccttgatgcagatggagtcagcgcccatctgctcgagagtcttggcgtagttggcgaagtactcgttgttatgtaccgggctcagggtgtagctgatgcaggcctgaacatgggcaccctccttgttggctgccttgatggcagtctgcaggttgcgggggtcgttcagcgcgtcaaagatacggatgacgtcgatgccgttggcaacggacttctggacgaagtactcgacggcgtcatcagcgtagggacggtagcccagcatgttctggccgcggaacagcatctgcagcttctggtggggcagctccttgcgcaggatgcgcagacgctcccaggggtcctcgtccaggaagcggatgcaggagtcgaacgtagcgccgccccagcactcaacggagaaatacgggatcttgtccatttcgggcaggatggggcgcatctcgtccatggtcatacgggtggccagcagagactgatgggcgtcacgcaggacgacctcagtaatcttaatgggtttcttagccaatgtgattcacccggcctttctattagttcatggtgatgagcaggtcgccggagttgacaacatcgcccttgcgcacattgacgctggcaatggtgccgtcctgcggagcgctgatctcgttctccatcttcatggcctcgaggatcagcagggtgtcgccagccttgacggagtcaccggccttgaccttgacatccaggatattgccgggcatgggagcggtgacggagacggcaccggcggcaccggcaggagcggcggcaggtgcaggagcagcggcgggtgccggagcggctgcgggggcagcaacaggagcagcagcggcaacgggagcgccggtgccttcctcaacggtgacattataagcaacgccgttaacggtaacgatcaggtttttcatggaaaagtcctccctatttcaaggttgatgattacagcgtgatattgccgtgcttcttagccaggcgcacagtgcgcttgctggccagcatatccagagcctgagcgacagcgccgcgggcggtggcagcatcggcaatggcgtcagcagcaccgttggccacagcggcattggcgctgcagacctccttggcgtaggcggcagccttggccttggtggcgttgacgatgttatcagaagcgaagatctcgtccttgtacagaacggtgacagcggcctcgggagccagcggggctacggtgcagccctgcacggcaacacgccagtcagcacaggcggcaaagaccgtgtaggcagggccgacggcctcaccggccagtacggcgaccttgacggtggtagcctcggcgtagacaccggccatacgggcagcctgacggatgccgcctgcctgatcgtcgccctcgctcttgccgaagccctcggtgttgacgatggtcacaacggggatgctgtaggcatcgcacagacgaacgaagcgggcagccttggcggtgcacttgtggcacagggcggccttctcggtggccaggataccaacggcgctgccgttgatggtggccagtgcggtgacgatgttcttgccgtagcctgcgtacagctccacagtgctgccctcatcggccagagcggcgatggcgtcagccgcggagtacttgacgaggtcaagagccttggaaggagcggcaaagtcgaacagcgcaggaccggccagattgttggcgggcagcagggcgacgatggaggcagcctgcttggcggcgtcaacggcgtccgcagcagtaacggcggctacaccggccttggcggcaaacgcggcagagccggcgtttgcaaccttgtcctcagcgttgaacggagcgttcaggaacagctcggcatcctctgccatgacacagacgtccgcggcagcggcgttgatggcgttggtaccggcgcaggtaccggtgacaacggcgacctgaggcacaacgccggaaacgcgcgcgatctctgcggtcaggcgggcgttggcgttgagcagatcaagaccgccctcaagcttggcacccgtggaatcatagaacgtaacaaccggtgcgccggtctcggcggccatctccagcacgcggatattcttttcaatatcctgcacgccgacgggagaaccgtcctcaaacacgacgtaggcgttctggccgtttgcacagccgtaagcagcactcactgcgccgtcggtaaacagcggcgagtaggtgccgtcatcaaaaaatgctgcaaggatctctgccttgccgggcttatttgctgccatacagtttcctcctatggtaaagctgactgttttttataaaaatactttacaaaaaatccgccatttaattgaattatactacgttcgcgacgtttccacaagtggaatattgcacatttttcagaattatctgcaattttagtcagaatttgtgcgctttttaagggggccggggcggcgggccgggctggcagcacggctctcccctttgccggcagatttcatggctgcgttgcgcagggcattgatctcgctctttttcagctcacggtactcgccgggctgcagcataccgagcttgacgggaccctcggcgctgcggcgcaggcgcacgacctgcaggccgacagcggagcacatgcggcggatctggcggttgcggccctcgtgcagggtgatctccagcacactgcggcccggctcatcgaccacgacgtggatgacgcagggcttggtcttgacgccgtcatccagcacaacgccggacgacatctcgatgatctgctgctcagtggcgcggggattgaccgtgacgcggtacagcttgccgacaccgccggacgggtgggtcagcatattgatgaacgcgccgtcatcggtcatgagcagcagcccctcgctgtccttgtccaggcggcccaccgggcgcagcatggcgggcacatcggaaacaagatccatgacggtcttgcggccacggtcgtcagagcgggtcgtcagatagccgcggggcttgtgcagcatgatataggtgtactggcgcttgcgcacgatgcgctgtgtctgcccgtcgatcatgaccttgtcatagtcggggtccatcttgtcgcccagggtgaccgggtggccgttgaccttgaccttgcccgcagcgatcaggcgctcggcctcgcggcgggagcagatgccctggtcggccagtaccttttgaatacgttgttctgccattaaaatttatactccttattcggcgggtgcgtcagcacccggcttttctttcttgatgagcgcagcgaccttgtccaccagctccggcagcgaggctataacgttgtcaacggcggagaccttctccaccagctggacggtgcgcacattgccattggaaacgacgaggaatgccaccggcgtgaccgagacgcctgcgccgctgccgccgccgaacatctgcttgttggagctggggccaacgtcggagccgccggacacaaacccgaaggtgacgcgggagaccgggatgatggtggtgtcatccacatggatcgggtcgccgatgatggtctcggcgttgaccatgtcgcggattttctcgatggtgacgcccatcagaccttgaataggatgttcagccattgtaagttcctccttttatcgaaaaaagaaatcgtttatgcctttgcggcgggctgcagctgcgggtccttccacagacggtacagcagccggatgacgagccagagcagcacagcggcgcaggacgtcagacggaacgagacgatacgctcccctgcgcgctcgccggtgaaatccggctcgagccagaggcggtcactctgtacgcggatgtactgctggaccagagccagcagattgttggcaagcgccatttcggcgccgaacagctcggcggtggcgctggcctcgtcggcggtcacggtccagaagatgtctagcccggacacccgcaccgaacgcagcagatgacgccccagccagcctgtgtggcccagcatgcaccgggcaaatgccatcgggtcattggacagcagctgcatagcggcgtcgatgcgcgccgagatgccgaacggcagaccgctctttttcgcgctgccttcagcatcggcgtcttcagcggggacactgtcagcaggcttcggcgcttctggtttcccctgcgccgcgggctgccgggcgacggtctgtgcgggcttgtccggcttgacctccacggtgacggacgcctgttcgccgtccgccgtcttgcgcacggtctgcccgggcggtgcggcggaggcgggctttttcagtgcttccggctggcccttgcgcggccagagcgtgaagtgcagcggtccgtagcaggccgtggcccgcacgctgcccgggcggtacgcaaaccgaacgcccagcggtatcagcagggcgacgagcagcagcaagagcaccgccagcagcacccagccgatcagtcggagaaggaacaacagaatagccataagcaatcacttccattccagctgaccgtcgtcgccttccgtctcctccggctcggcgctctcggcagcctcgccgtgaagcggcggcaggtcggccagactgccgaggccaaagacgcgcagaaatgtgtccgtgacctggaaagctaccggcttgccgggcaggtccagacggcccgcctcctcgatcagtcccttgtccaacagcttggtgacggtggacgacgagtcaacgccgcgtacctgctcgataaagctgcgggagacgggctgattgtaggcgatgacggccagtacctccagtgcggcgggcgaaagcggcgcgttgcggcgggtgtccagaatgcgcttgaccatctcgccgtagtacgggcgggtcgtcatctgccagcggtcaggctcgaagtacagaatgaccatgccgctctcctgctcatcgtagcgcttttgcagcttttgcaaaagcgtggtgacctcgtcggcgtccagccgcagggcgtcggccaggcgggcggtctccacaggctcggcgtgggcaaacagcatggcttcaagagagccgagctcctgtcgttctgtcatggcgttttgtcctttcttctgcggtgtgtgcggtccagctgcaaggtgccgctgtcgtcgaccttgacgcgtcctgcgcggatgagctcgagcagcgccaggaaggtcgctacgtttgtgctgcggctttcctcgtggctgaacagctggcccattttttgcaggctgcccttgagcaagccgcgcagcatgtgggagacgcggctggcgacggagacaaacggcgcggtgacgagcggctcaaacttttcctgcgtgggctttttcttgcgggtgctgcggcccatcagattgaaccacgcctgcacgagccagttcgggtcatggcggcgggtgtattcggcagcgccgaccagcggcatcggctcacgggctacggtgtacaggtcacgggcacggctgcccagctgggcggccacctccttgcaggcgctgtactcgatcaagcgccccgtcagctcggccttcatgcgctcggcctcggggctgcgcggcagcagaagggcgcttttcatctgcaccagatgcgccgccatgtcgatgaactcgctggaaatctccatccggtcctgctgcatctcccggatggcagcggtgtactgctcgatcagctccatgatgttgacatcatagaggttcattttatttttgcccaccaggtacagcagcaaatccagcgggccctcaaaatcttctattttaaatgtcagaacttccggcaaaaactcaatacccccaaagcagctccgcaaagcctgtcaggtgcagcatcagccgccacataccgttgacaagccaagacagcggcgcgtccagcagacccaaaaacaccagtgccagcacggccagcataatatatcgctcatatttcatcgctctgaaatagagccgctgcggcaaaaacaagagcgcaatgcggctaccgtcaaacggcggcaccggcagcagattgaaaaccgccaggctcagattcatggctaccatataatataggaacatcgtcagtacgggcacggcatcccccagcccgctgtaccagcacagcttgtacagaatcatcgacacccacgccagcagcagattgctggcaggccccgcggcggcggacagcgccatgccgaccttggggttcttatagttgtacgggttgatcgagacgggcttggcccagccgacgcctcccaccagcatgcacagggcaccaagcgggtcgaagtggcgcagcggattcattgagagacgcccggcgcgcacggcagtgtcatcacccagcaggtggctggccagcgcgtgggccgactcatgaaacgggatggtgatgagcacgacaacagcgcgcagcagatactgcacgatcaccgtgggagacaacaatccgttcaaaaggtaacaccaccccattaaaagcttagtctattatatcgtagaaacggcggcaagacaagccctgtaggcaccgaaaacacaatatttagcgcctgaatcaaacaaaaacgcaaaattatgaaaaaaatcaaaaaaatttctgtcaaaacacttgcattttcgcgcagtatacgctatactattaaagctattgaaaaggaggtgcaagcaattatggccaaatgttcttgctgtggcaagggtgtcacgttcggtatcaaggtttctcactctcatcgtcggagcaaccgtacctggaaccccaatgtcaagcgcgtgaaggcgatcgtggacggttccccgaagtatatctacgcctgcacccgctgcctgcgctctggtaaagttacccgcgcggtctgattggaaggaaaaaatgccggtcacatcgtgtgaccggctttttctcttttacgcttgctttttaggaggtgggtctatgctcccccgtgaccctgtaatgctgttgagctatgtaaacacccaactgcgggaccgcgacgccagtttggacgcgctgtgtgaccgtgaggagactgaccgtgacgcgctgtgtgcggccctgcgcgagatcggttatgagtatgacgctgcacagaatcgctttgtgtgacgtcggtttgtgtgaagtttgagagaggaagttgaagtacccgatgaattttatctttgtcagcccgcattttcccaagacctactggaatttctgtgaccgtctgcaccgcaacggcgtcaatgtgctgggcatcggtgatgctccgtttgacgagattccctgggaattgaagcagtgcctgactgagtattaccgcgtgaatgatcttggcaattacgacgagatgctccgcgctgtcgcgtactttaccttccactatggcaagatcgactggatcgagtccaacaacgagtattggctggagatggacgcccagctgcgcacggatttcaacatcaataccggtgcaaagaatgacttcatcgagcgcatcaagtacaagagcaaaatgaaggaaagctacatcgctgcgggcgtaccggtggcgcgctaccatattgtcagcacactggccgaggcccgcgccttcatcaaggaggtcggctacccggtcatcgtcaagccggataacggctgcggtgccgaggcgacctacaagctgcgcaatttcactgagctgaaagaattctacgccgagccgcataacgtccggtacattatggaggagtacatcaacggcaccatcgtcagcttcgacggtgtggccgacagccattgcgtgccgctgttctacacctccaacgtgttccccaccccgctgctggacatcgtcagtcagaacggcgacctctcctactggacgcagaagtccgtgcccgctgcgctgaaggatgtgggcttccgcaccatcaaggcgttcggcgcaaagagccgcttcttccactgcgagtttttccagttgaatgaggacaagccgggtcttggcaaaaagggcgactacgtcgcgctggaggtcaacatgcgccccgcaggcggctacacgcccgatatgatcaactatgcgaactcggtagactgttaccagatctgggcggacatggtctgctacgacgaggtacgcaacgccgagctggacggcccgaagtatttctgcgtctacgcaggccgccgcgactgtcatgagtacaagcacacccatgcgcagatcatggccaagtacggctcccgtatgcggatgtgtgagcgcattccccaggcgctgcgcctggacatgggcgactggatgtacacggccgttgtgcgctccaccgcggagcgcgatgcgtttattcggtacgtgcaggagcaggcgtaacgaaaaggcttccccctcgggggaagccttttacttatataaaacaggagcctgaccggctgtggtcaggctcctgttggtttatttcagcttcacgctcttgtggtatacgaccattgaaatgcccgccgtgatgacctcggtcacccagaaggcgttccagatgccgtcggcacccagcaggcggcagaacagccaggccagtggcatgatgacaacgatgtaacggcacagcgagatgaccagtgactgcacgcccatgccgagaccctccagcgagccggaggcgacgacggaaatcgtcgagacgatgaaacctacgcagatgatgcgcagggccgacgtgccgatggcgatggtctcggcgttcgagctgaaaagcccgatcagctggccggatagcaccagacagagcaccgtgcccgcggccatgatggcggcgcacatgcccatggacgtgtggtagagctttttgacgcggtcatactcccccgcgccgtagttgtagccgatgatggggcgcaggccctgcacaatgccgttggcgggcaggtacaggaaggtctgtaatttatagtagatacccagcacgacgacatagctttgagagtagacggccagcagcgagttcaggaaggtgatgagcaccgagggcagcgccagattcaggatggccggtacgccgatggaatagagctgcagggccattttggcgtccggtttcaggcagccggagcgcagcctgaccgggatagggctgacgaagtagacaatcagatagaagatgagaggaaccatctggccgatgccggtagccagcgccgcaccggcaatgcccattttggggaacgggccgatgccgaaaatcaacagcgggtccagaatgatgttgcagaccgagccgcccatcaggccgatcatcgtaatgttcatccggcccaccgcctgaaagatcttctcaaacgacatggcggccatgatgacgacggcgaacataaaggcaacacgggagtaggtcacgcccatggcaatgacggtctcgtcgctggtgaaggagcgcaggaaccgcggcatgatggcggtgcagacgatggaaatcacgacgccgtggatcagcgaaagcaccatgccgtgggtggcggccatgtcagccttttctttgttgcctgcaccgagatgcagcgagatcagtgcggcaatgccgatgctgaagccgatggcaatcgcgttgatgaggttctgcaccgggtagacgagggacagcgcagtcatggcttcctcactgatgcgggcgacaaagaggctgtccacgatgttgtacagtgcattgaccagcatcgagacgaccatgggcagggccattgaggttagcagcggaaaaatcggcttttctttcatgaaggtatcgttcatgggcttctccttttgacacaacaaaaaccacacaacgctttcccggaaagaaagcgctgtgtggcgaaaagtagtatcagaactgtaaaaatccacaccttgttttaggtgttcctattatacaaaccggcgcggaatttgtcaagccgcttgcaacagctgcgcaaaaacgctacaataaagacaaaaatcgtattgcgagggaaaacacatgaaaaagctattggtctccggcgcaggcggctttgtgggggcgcgcatcatgacccagctggcgggacggtacgagctgtgcgccttccccaaaggaatgctggccgcagcggatgagcagaccgtggccgactgggtgcggcgcgagcagccggacgtgatcgtacacacggcggcgctctccgacacgggctacagcgaaaagcacccggacgagtcctaccgcgccaacgttctgctgccgtgctggatggcggctgcagcgcaaaaaagcggcgcaaagctggttgcgttcagctctgaccaggtctacacgggccttactgagcacgggccgtttgacgaggatacaccgctctcccccgccaatgtctatggccgccacaagcaggagatggagcagcgcgtgctggatattttgcccgatgccgtgctgctgcgggcggcctggatgtacgacctgcccgggtacggcctgccgatccgcggtaacttcctgctgaacctgctgaccgccgctatgcggcaggagacgctgcggttttcggcgcgggactaccgcggcatcacctatgtgcgggaggccgtggagcggctgacccaggctatggaactgccgggcggtgtgtacaactttggcagcgagaacgactgcgacatggtcacgacggcccggcgcgcctgtgcgctgctggacatccaccccgtcgtagaggcggcagactggccgcgcagcctgctgatggacggcggcaggttccgtgcggcagcgggtgtcggctttgacgataccatgacgggtgtacagcgctgtctgcgggattacggtctgctgaaataaagctacaataaaaaaacctgtaccggcaaaagcggtacaggaatttttttacatctcgccgcgtccggccatggcacggtacagcgtcgtctcatcggcgtattccagactcgagccgacgggcaggccataggccaggcgggtcgttttgatgcccagaggtttgatgagcttggcgatatacatcgccgtggcctcgccctccaccgtcgggctggtggccatgatgacctctttgacggtgtcattcagacgggccagcagctccttgatgcagagctgatctgcaccgatgccatccatcggcgaaatcaggccgtgcagcacatggtacaggccgttgtactcgtgggtgcgctcaattgacttgatgtcgcgcgggccctcgaccacgcagatgatgctgcggtcccgcttctgggaggcacagatcttgcagacatcgccggtggtgtagtcctggcagatgcggcagcggtgcaggtcacttttggcgtgctcaatcgccttggccagctccatggcctgcttgggcggcatcgacatgacctgataggccatacgcaccgcacttttgcggccaatgccgggaaactgggcaaactggtcgatcagattctccagcggctcaacattgttgttgaacataggcaacctcttagcccagaccggggatgttcagaccgccggtcatcttggacatctcctcctcggagtccttgtcaacggcagcggcggcgctgttgacggcggcggcaatcagatcctcaagcatttcaatatcatcggggtcgacggcctcgggcttgatcttgacggcggtgatctcatgcttgccgttcatcgtaacagtgaccatctcaccgctggcggtgccggtgtactccttggcttcgagctcctcctgcttggcgcggatgtcgtcctgcatcttctggacctgacgcatcatggcgttgggatcgggtcggccatagcccttgggcagtcttgctttcatggttgtatcctccaaaaataattatttatcaacgattttcaaatcgacaccaagcgcctgcatcgtgtgcagggtctcatccaggctgacggcagcggtgatgtcgtcggtctttggctcctcataggggccgatactgtacttggtgcgcgatacacggtagatagtttccttaagacgcttgctgacctcccggttattgcggatataatcgcggaaggcgtcgctgcactcaaacagcacgcgcttgccgtcgcaataggcccgggtgccgcgcaaaaaggagatgagcatcgcatcattctcctccaaatcggccagcacggcgggccagaaggcgaacggctccagcgggcctgcctgccgcggcggctcggccttacgcggggccggggcagcgggtgctggcggtaccggcgcgggagtttgctgcggggcgggcttcagctccggctgcaggaacggcgggtcatcgtcaataggcggcggtacatcatccggtgcagcggcgggaacgctctgcggctgtaccacgggcggcactacagaggacgcagcctgtaccggcggcgctgccgtgtaggcgcgcggcgcgctggcgaacgcctggggcgcggtgggtgctgccggggcgggctgccggatgataacaggtgcggcggcagtctcgggctgagtcagcgagaaaatcgccagctccagctcaatgcgctggtcagtgccgcggctcattttctcaagtgccgagccgaacgcattgaccgcacggatggcctcccgctgcgggaagtccctgcgctgggtgtaggcggcctcctcctccggcgagatgccggtcagaagtgacgtgccgcccggcagcgcacagagcatcagattgcggtaatgcccggccagctccatgcagaggcggcgcatatcgacgctctgctggcgcagctcggcgattttttccagtgcagtgacggagtcccctgccgcgatggcgtcgctgatctcaaacaggtagcccctgtccgtgacaccggccatacggcggacgagcgcctcgtccacgtggttgtcgacaccggcgcaggtgtccagaatggacagcgcgtcacgcatggcaccgtctgccagacggccaatcaactgtgcggcgttctcgtccagctcgatcttctcctgcccggctacgtagagcagccgcccggcaatgtcatccgccgtgatgcgggtgaagtcataccgctggcagcggctcaaaatcgtgacgggaaccttctgcacctcggtggtggctaagataaagatgacgtgctcgggcggttcctccatcgttttgagcagcgcgttgaacgccgcggtggagagcatgtgcacctcgtcgatgatgtagaccttgtacttgcagaccgacggcagataggccacctcgtcgcgcaggtcgcggatgtcgtcaacgccgttgttcgacgcggcatccatttcgatgatgtccatgacggaaccggagtcaatgcccttacaaatttcacactcgccgcaggggtcggggctggaggtgtccagacagttgaccgccttggcaaagatcttggcgcaggtcgtcttgccggtgccgcgggtgccggtgaacagatacgcatggccgatgcgcccggcagaaatctggttctgcagggccgtgacgatggccgtctggccaaccacgtccgcaaagcgctggggacgccattttcgatacagggcacggtacatcggctcacctcctgcaaagctacaaaaaacagcgggcagagcacgcggctgcgctgctttgcgtacagatgcaggcttgaccgcggcactgggcaagcgctgcttaatgctgctcggttccccgcctgacatggttcacaggctgcccacgcgcgggacctgcatctgtacgcgaaacagcgcaattcagccctgtccgcttttagtattatacaataagtttggaataaatgcaagcgttatcttatatttcaggcatctcggacatcaatcttcctgcaggcgctggaccatcttgtaaagggcctcggcgctgttgaagttctgcggcatgatttcggatgcgggaatcgaaatgtcgtattcctcattcagggccgagatgatctgcagaatgtcgaaagagtccaggatgccgtcatcgatcagcgttgtacaggtggaaaagtccacgtcctctttgatttcgcttaaaatttccagtaaacgttccattggtatttctccttttcaaattatcttacacagcgggtgtattgatgggataggtcggcgtttcgctgcgtaccgggtgcggcgtgccgttctgccacagaatgacctgcggcaggtcgcggctcaaaaacagaccaagtccttccgtaacagagtaggcaccggtgttttcaaaaacaagcaggtcgccggggcatagtccggccagcggcatactgcgcacaagaacatcgttcgtagtacaaaggctgccgcaaagtgtccagtcctgtacggaagctgcccgggcagcaaaatggcgcagatgcgggcgtttcatacccatgatctggccaagataattcaggtggttcattccaccgtccacaatgcagtagtgctgcccgccgtggtccttgcagtccatggcggtggtcaggtaataaccgcattcggcggtgtaaaaccggcccatctcaacggtcagatggacccagctgctgacttcgcgcagtgctggcgcaaggtctttggccggggacagtgtgtcggtaaaatcgtcgccgtcaaaatacggcaccgccagccctgggccgtattccagttccggcagacgcaggccgaaggtctgctcaatttcagcgtacagttcccgcagcatggccagctctttttgctgattgaccagctttttgcgctgggtcccgacaaagtagtgaatgccgataaactccagatcaggtgtttccctgcgatgcgccaatgcggtgaaaaggtcttcctttgacatgccgaactgactgcccgcgttcagccgcagcagcacaggcagccgtttggcggccttgcgtgcagcatcctgcagataacggacctgcagcagagattccgctgtgcaggtgccgacgccgtcggccacggcgcgggcaatatccacgggcgtcttattaacacccgaatagataacacgtgcatccgcagcatgcaggctctcgcagagcgaaagctctccgggactgcatacttccagccgcgcagtgacctgcatcatggcaggcagcagaaatgggttggctttgatagaatagcaaaggtcgatttccctgccccagattgcctgaatagcgcgcacgcgggcctgcaaagcgtcagtgtcaaagacaaacgtcggtgtgccgtaggtggcagcgattttttgtaaagaagcgtcggtcatttatgggctccttttttcgtcagggcagccagtgccgtgcggtcaattttgccgtttttattcagcggcatctcgtccagatgcacagcagtattcggctgcataaaaggcggcagactttctttcagcgcagccagcagggcggctttctcacagctgcccgtgtaaaacaggtggagccgctggcgttcggcatcaaacgtgcagcaggcacgggtcacagcgtcgcagcgcatagcagcagcttcaatttcgccaagctctacgcggtgtcccatgtgcttgatctggaaatcccggcggccaatataatacaggctgccgctttcgtcgtagcgggccagatcgccggtgcggtaaatacgttcataccagttggtgttcagcggattctgggtaaaggcctgcgctgtgcgcacagggtcagcatagtagccgagggcaagcgccgtaccggaaacgcagatctcccctgcctgcccgggcacggtgacaagggcgtcgttctcgtccagcagaaagaccttctcgttgggaaacgcgcgtccgatggggagcgcctcatccggagcaaaatcgcggtccggcaaaatggcgtaggtgcagttgcaggtaatctctgtcgggccgtagaggttcacaaaccgggcgtgcggcagagcggacttccacttcatcaggtgcttgatgggcatgacttcgccgctgaacaatacctgccgcacgcgggaagggatacggtagctgaagccgttcatgatggagacaaagcacatggcactgacggcccagacaagtatggtgacctcatggtctgccagatagtccatgagttttgtgggctgactgaaataagcgcgtgggatgatctgcaccttagcccccgtgtacagtgccgtgtacaggtctttgaccgaaacgtcaaagtcaaagggagcctgattgcccagaatatcgttttgtgtgatgccgaaaatttcggcaaactgcgggataaaatccagcaccgagcggtggctgacggtgacgccttttggcacaccggtgcttccgcttgtaaagttgatatacagagggtcaacgtccacagcctgacggcggcggtttgccagcagtgcagcgtccgcgggtgcggccagcagatcgtcaagccggatgatttgcccgctgtaccccagcgcggcggctgcggcagcgtgggcctcgtccgtaacaagaagtgcaggggtcaaagtatccaatacctgcaaagtgcgggcagcgggctggcgggtgtcaagcaccgagtagcagcagcccgcgtagactgtgccaagcatggcagcaaaggcggaaacggatttttccaggtaaaatgccaccgggtggcgcggcatcgtgcgggacgccagaaagctgccgacgcggcgggccgtgtcggtcagctgtgcccaggtacagtctatctggtcatcccccacagcgggggcatccgggcagcgggcggacgtggcttcaagccagtccagaatgtttgtttgcatagaaagctcttttcttaaaagttggcatagaggaaaccaacggtttcattgacgcagataaagctgaggagtaccatgaaaataacaagatagtataaaccccagcgcagcgcaagcggcagccgctgtacctctgcgtaagggtcgcggccttgttccttcagcacactatgggcaaagaccagaagggtactgatgatgacaagcccccaggccgggccggagactgccgcgaaagcgccgggtgcgttcgcggccaatgcggaaaaattgaaatccgtaaaggtgttgcgcaggtagatgcacccctgcacaaactcattgcggtcaaagtaccagccaatgttgacgatgataaaggtccgcaagatgcgaaaaacgtgccagccgcggctttcggtaggaatgtgcagcgccgtgttgagctttttgaaaacgggctccagcaggtcagccagcgcaatgacaagaccgttatacagaccccaggcaaggtagtgcgcctgcgggccgtgccagatgccgactacggcaaacacaagtaggttggcgactgcagcgggcagcacacggccaaaatgtttgccccaatgcgacgtggcccacttgccgaagcgctgcatcggcttggtcagtgcaaagggatagaacaggtaatcacgcatccacgcacccagcgaaatatgccagcgccgccagaaatcccccagcgaggtagaaaaatacggctgccggaagttgggcatcatctcaatgccgtacagctgcgcaacacccaataccatatcaatgccgccggaaaaatctgcatactgctgcagcgagtacagcaaaatggccagcagtgccatagaaccggccagcttggggtcattgccgtcgaggatggcggcaatcgtcggggcggtcaggtttgcgatggcatatttcttcattgcgccgaacagaaacaggaacagtgcacgcttggtacgctcccagttccaggtgtgacgggcggtgagctgcggggccatctctccgtagcggttgatgggaccctggatcagctgcgggaaaaagctgatgaaaagcagaaagcggacgtagcttttctctgccgggtgccgaccacggtagcagtcaatcagataaccgacggcctgaaacgtgtaaaagctgatgccaagcggcatgaccagccccagtgaggacggcgctgtggccgaaaatgcaccggagagcagctccgcaaaataggaccagtatttgaagtagccaagcacaagaaagttggcagtcagcacagcagcaacaagacattttttgcggcgcaccgcctgtgctttgatggcctttttttcgtccttggatatgccagaagcctttcgccgcgcggcggaatcggcctccagctttaccagctgcaagccgccgagccagatcgtcaacgcagtgaaaagtagaaaaacaaggcccttccagccgctggcggtaaaaaacagcaggctcaaccccagcaggcagatccattggcagcggctgaaaacagtataatataaaatgagtccaacgctgaccagcaggaagaaactcagggaatagatttccacactacaccatccacaaaatcaaaaatcgacagaacattcataatatcgctcaaaatcggcagaagaaccaacaatacgggcattcacgcggaactggtaggtgccgtgctccgccgctgcgtactcggtccaggagcgggtagaatacgcggaaacccggctgtattcgctctcccccggcgctttgacccagaactcgtattcagcctgtacggacggaccgtggtaggaaccggccagcagcaaaatcttgtccgggtgaacctccggcgtcatgtagacgttggtgatatagtttacggcggccagatattctgacggcgtctcgaacaacgattccacatcctgcccggcgtccagcatggccagaaactttgccatgctcaggctgaacgcatggccgccggcagcattcatgtgggtgaaatccttgtgatagtcaggctctttgttctcaaacagctccggctttgcaaggttaaagtcataataggaagccccatactgtgctgccagctgcttgaagtaggcgtagtcgtcaaaatacgtctcgtagctcacgacatccagcgtggtcttgggcgcgctgatgagcaaaagacgcgtgccgttctcctgacagagctgcagcatggaggtcagctcctcaatgtgctgcgcgctaaagtcgtgggcgttctggttccaggtgttctccgcaccgacagtgtcaaagttgatgaccgcggcatcctccggctgggcatgggccgcaccgcgccggtgcggcagacgattcagcacggcattccacttttgttggatcgtagcgggccagtcggtgggccagctgccgctctgccagggaaaaagcgcattcagggaatctgcacctgtaaagttatcacggctggtcatgtagcgcagcaggtcagcgggcttatccttccaggaacccgtctgcagctctgcatataaaaaagccttttgggctttggcatagggtttgcctgtcatgttggtcagatccatgacaaggatcacataccggggagaatgctcccgaagcagggtctccagcgcgatctgcgacatatccaagctttgagagtttgttgccatcagtgcaacggtctcccctgttgcggcggcgagttcttcttcgggcagggcgcaggaagccagcgaagagccaatgacggcaatgtcaatggactgcttttggtggtagctgcgccacatgtcaaggctggaaccgttatcgggcggcataaagccgcagaaaatcagatttataatcagaaaaatcgcggtgaacgctgcgattttggctatgtacttcaaaagatacgctcctaaaacagacaaagaaaggaaaatgtccaaaaacagtgaacacagctattatacatcaattggaacttccctgcaatggtgatttgctgacaaaggtaagattttacaattgtgcaaaaaaccgcgtttcttcgtgaaacgcggctctatacaatcagcctaaaagctgcttggccaaatcagcgctggccttggcatccttgcagtagtagtcggcaccgatgtcccgggcgtagtcgggcgtcagcaccgcgccgccgaccatgaccttacagtcaaggtgcgcggcatgcagggcctcgatcgtggcctgcatattggggacggtggtcgtcatcagggccgacaggccgacgagctttgctccggtctggcgcacggcctctacgacacgctcggggtcaacgtcgcgcccgaggtccagcacgtcatagccgtagttttcgaggatgacacggacaatgttcttgccgatgtcatgcacgtcgcccttgactgtggcaatgacgatcttgcccttgctgccctgcgcctggccggaggcggcaattttggccttgatggcctcgaacgcagcctgcgcggcggtggcggcctgcaaaagctgcggcaggaataccgtgcctttctcaaagccgtcgcccacggcgtccagtgcgggaatcagcgagacattcactacgtccagcggttcgcgcattgtcagcgcggcgtccgcggcggcgcgggcttcggccttcaggccgcggcgcacagcctcaaacagggcgtccccgcccggtgcagcggcgccgacctcggccacggtggcagcggacttgctcgtctgcgtcgtctggatctgcacatcggcataggcggcaacgtagtcggtgctctgtaaatcctgcgaggtcagcacgcggtaggcgcgcacggcagccatcatttccggcgtgttgggattcatgatggcaaggtcgagcccggcagacatggccatcgtcaaaaacgttgtgttcaggtagccgcggcacggcaggccgaagctgatgttcgacacgcccagcacagtgcgcacgcccagctctcgcttgcagcgggacagagcctccagcgtctggacggcaccctcctgctgggcgctggcggtcagcgtcaggcagtcaatgtagatgtcctcattcgggatgccggcggcgttggcagcggcgacaatgcgttgagcaatcgcaaagcggccctcggctgtcggcgggataccgcccttgtccagcgccaggccgacgacggcggcgccgtactttttgcagagcggcagaatcttttccagcgtctccggctcgccgttgaccgagttgacgatgggcttgccgttgtagatgcgcagcgcacgggacagggcctctggattcgaggagtcgagctgcagcggcaggtcggtgacagactgcaaatccttgacaagctgctccagcgtggcggcctcgtcgatgccgggcaggcccgcattgacgtcgagcacctgcgcaccggcctcggcctgggccacagcctgagtgcaggggtaggcgctgtcgccgtcccgcagggcctgctgcagccgttttttgccggtaggattgatgcgctcccccaccacagtgatgccgtcgacctccacaaagcggaccggcgtgcacagacagctgcggcggatggggatcttgtcagccggggtcagcgggctgaaggtctcatgcagcttggcgataaacgcgggcgttgtgccgcagcagccgccgaccatcgaaacgccgatggcggcgtactccttcatctcggcagcaaattcatccgggtcgagattgtagctgccgtcggggttcggcagaccggcgttcggcttgacaaagaccggaacacccgcgggcacgctgcggcagaggcgctgcgcgaagggcagaatctccttggggccgagcgaacagttgatgcccacggcgtccgcgccgagactcgctgccgtgacggcgtagctttcgacagtgcagcccgtgaaggtgcgcccgcggctctcaaagctcattgaggtaaaaacaggcagatcgcagttttccctggcggcgaggatggcggccttcagctcatacagatcggtcatcgtctccaaaaagacgaggtcagcccctgccgccgcaccggcgcggatgacctgtgcaaactcattgtaggcatcctcaaacgccagcgtgcccgcggggacgagcagctcacccagagggccgatgtccagcactacacacgcgccggtggtctcggcggccttgcgcgcacagacgatggaagcggaaacgacctcctccaccgtgtggccgcagccggtcagcttcttggcgttggcaccaaaggtatttgccagcagaatatccgcgcccgcgttggcgtagtcagtgtggatggccgttaaaacctccggcatttccagcgcggcgagttcgggcttctgcccgggctgcagaccgcgtgcctgcagctgggtgcccatgccgccgtccagaaaaacaaaccgcttgcggtcaaaaacttcacgaatctgcatacgcttctcccctatcagtcttgtgtgaaacaggtcgtgccgcgcttgcggaacgagcaggtctcctttaaatggcaggtcgcacagcctgcgcgggtgccggtcacgggatggtcggcaatgcctaaaatggcggtggtactcttgcggggggtcaaaaggtgctggggcgtcacggccaggccgcagccgcgcaccgtgtccgccgcaaggcagagcgcgtcgttcagctccagcggacagtcaccgtagcccggcgcgtagcgcccggtcataaagacgccctgcgcctcgatttgagcgcgtatttcgttctccagctcgtcacagacctgttccaaaagcaccgaggccagcgcgtctgccgcggcggccagggcaatgtcagtcagttccatgcggcgcaaaagcttgtccacctcggccccaagggtcgctgccagcagaaggacctcgccgcaaccctgcagatggcgcgtcaggtcgctgccgcagttttccagcggcagggcggtacgcggcagacggcggtacaccgcacgcggcgcagcagcggtcagcacggtctgctcggccttgtccagcagggccgcggtggcggcatcgggcgtccagccggacgcacccatgtagcgcagcgccgtggcgcggtcaatggcggtgggcttgcggcactccattacagcagatccctgatgccgtcgtagaccttcgcggccacggcggcgtcattcattgcgtacaggtggatgccgtctgcgccgccctcaataaggtcgcgcagctgcctgacggcgtagtcgataccggcatcgtacaggctggccgggtcgtcctgatagcgggagatcatacgggtgaactcagacggcaggctggccgaagaaagcgaaacggtgcgttcgatctggctgcgcttgacgatgggcatgacaccggcagagaccggcagtgtgatgcctgcgcggcgtgccagattcagaaagcggtaaaagtgcatgttgtcaaagaaaagctgggtcagcaggtgctcggcaccggcggcctgcttgatgcgcaggttctcaacatcatgcagcaggctgtcggcctcggggtggccctccgggtagcaggcaccgtgaacggaaaaatccggcttcttccatttgataaaggacgtcaggtcgctggcgtgtttgaagtcggggctctccgggcgggacgggctgcgatccccgcgcagggccagcacatcccggacgccgacagattccagctgatccaaaatctccgctgcacgggtctcgtcgttgcccatgcagatcaggtgcgccagcgtggggacatgcagctcgttctgaatgtagtcggccacctccgcggtggagacgccgcccgcagagccgcccgcaccgaaggtgacgctgatgaagccggggtccatggcctgcatctggcgcagggtgtccttgagcttttccatctgagtggtctgtttcggcgggaagcattcgatagagaaaacgcagcgtttggctttgaactgttccgtaatcgtcattttctactccttatttttacgccgcaaaatcggcggagtccgcggaagtttccacgttgagggtgttgttctgccagatgaaggtgaggctgccctccaagtcagtgcgccatacctcggcaccgacctctgcgcaattttgcagggcagcgcggtgcggatggccgtaatcgttgtgcagcccgcagctgacggccacggcctcgggccggactgcctgcataaaggtcaggctgttggaggtgtaggacccgtgatgccccgccttgaaaagagtggcatgcagggtcgggccgtaggtgtcgaccaggcgctgctcggcgtctgcctctgcgtcgccggtatcgagaaagcggaaatcgcccgccgtgaacagcgtgcagagcgaggcatcgttgacgctgtcggcatcctcgctgccgccctgcaaaatttgcagcttgccgctgccaagcgggtattcctccccggcttctgctgtgaaaatttctgctccgctgtcggcggccagctctgcgagatggcgcggccagtcggcagtctcatctgccgtgggctgccacagcggcagcagcagggtcttgaccgggagggtgcgcagcaccgcgcgggcgttgccggtgtggtctgcgtggggatgggtcagcacaagatagtcaagcgacggcacacccagcacgtccaggtcatagagcagcgcgtcctcagcctcggcaggaccggtgtcgatcaggcagtacgcgccgtcctgacaaagcagtacggcatcgccctgcccgacatccagcacatacacgacggtactgccgtccgcagtctgcggagtgctttcctcggtttggagcggtacgccgagcgcggcgcgcagctgctgccagccgggaacgctgcccctgccgcccaagagctggacgacaaacgcggcaagcaccaacaggcagacggcaaccgccgcggccaggctggcaaagcgcttacccgtcatactggccgttcagcttgcgctcctcccactcggccttggtcacaagcacggcgcggggcttggcaccctcataggggccgatgatcttttcctgctccatctggtccatgatgcgagcggcgcgggcgtagcccagcttgcagcggcgctgcaaaaggctggtgctggcctgtccggattcaataacgcactcaacggcctgctcaaacatggcgtccagtgcaccgccgccgtctccgtcatcgtcgccgcccttcttgctgcccttttcggcaacggcgcggcgctccatttcggcaatcatttcttcatcgtactgggcggtggaggtggacttgataaagctcagcaccgcgccgatctcctcgtcggtcacaaaggtgccctgcacacgcacgggcttggacgcgccgacgggcaggaagagcatatcaccgttgcccagcagcttctcggcgccgccgctgtccagaatggtgcggctgtcgatctggctggaaacggcaaaggcgatacggctggggatgttggccttgataaggccggtgatgacgtccacgctggggcgctgggtcgcaacgatcaggtggatgccggcggcgcgggccttctgcgcgatgcggcagatatagtcctcgacctccttgcccgcgaccatcatcaggtcggccagctcgtcaatgacgatggcgatatagggcaggtgctccataccggtctgggcggccagcttgttgtaggccttgatctcgcggacgttgttctcggcaaagagcttgtagcggcgctccatctcggccacgctggcacccagcgcaccggcagccttgcgcggctcggtgacgacgggcatcagcaggtgcggaatgccgttgtactcggccagctcgacaaccttcgggtcgatcagaatgagcttgacatcctcggggccggagcggaacaggaagctgatgataatggagttgacgcagacggatttaccgctgccggtggaaccggcaatcagcaggtggggcatcttgcagagatccgcgacctgcgccgtaccggcaatgtccttgccgagggccatcgtcagcgggctgcgcatgttgatataattctgggattcaaagactgcgcggatgttgacggtggagcgaatcttgttcgggacctcgatgccgacggcgggcttgccggggatgggcgcttcaatgcgcacacccgcggtggccaggttcagggcgatgtcgtcggccaggcttgtgatgcggctgaccttgataccggcctggggctgtagctcataccgggtgacggacgggccgcggcagatgtcgagcatcgtcgtcttgacgccgaagctgtccagcgtgttgaccagaatgtccgcgtttttcttcatttcgcgggcggccccggcctcgtcgtcggggcgtgtggcgttaaagagattcagcgacggatagcagtagggctccggcggttgctcctccgaggtgggcagacgcatggcgttggggtcggccttggccgcacagggcggcgtatggatgggcgcaccggcagagttgccgacagcggtgctgacctgcacgcgggcagcctccccccgccggggcacagtgaagctgctctgggtcgtttccgccgcagggcgggtcatggcaggggcagccggtgcggcggtgtagggatcggctgccggggccggagcctcgacaacaggctgggcaggggcggcgggtgtctcggccagcatatcatccagcatttcggagacagagcgcccggactgccaggcagcgctgaccgcactgccggtatcgctgaagctgccgcccagtgtcgggatcggtgcggaaacagcgggggcctccggtgcggcgggcacagctgcgggggcggacgtacccagcggcgcagcgtctgcggccatctgtgcagcaagatcagccggagaaaggaccatcgtatcgccctgcacacggcctgtcatatccagctgcggcagctcgacagggatcggctctggctcgtcctccacgggaatgagaggcgtgtcaaatttgggctcctgcgggacaggcgtcagcggggtctcaaactcggtaggctgcggcaggtccagcgttgtctcggcactgacctcctgcggcgtatagtaaggcgcgtggccgctgacagcgcggttgatgagcgcatccagctcgtcctgcggcgcgggggacgcctgtgcagcgggcgcgggcgtgaccggggtcagcggggtactgtacaccggcgcggcaggctctgaggcaggctgcaattgcagctcaaaatcctccttcggtgcgggagcaggctggggctgggtgtggcgcagtgtgctgttggcccggttggacagcggatccatgccgaacgtgccgcccgggccgatgctgaccggctccagcgggtcagcgctgacggccttttggcgggcattttcccctgcactggggccaagatccacgtcaaacgacgcatgggtctgggcggcgggcttggcggaaaacggtgcctcgggcacagcaggtgccacggggggcgtgtaggcggcctgccgctgcggggcgggcggggtctgcttcgggaaacggctcgtgtccgcgatgacgtcgtaaaccggatggtgcgggcggctgctgtccggcagcgcaccggtcagattctcgacgctctcctcctcgggctcctgctcaaacaggcgggtgtcgtaggcggtctcggctgcggcgcgctcctcgcgcttggcctgcagaatcttgtactggccgtctacaaacagaacgacgtccgcgggggtgatggcaaagaagaacatcagccccagcaggaagatgagcagcatgataatgttggaggcaggacgcccgaacagcgccagcagcgtggcaccgatgggcgccccgaggacgccgccctcccagaagtaggtgccgccgcgggtaaagagcatcttgacgatctccccaaccttgaggttctcaatattaagtttggagaagatgactggcacgctggcgcagagcacgcccatcagcgataccttgcccgcaaacagcgcgacgcggtagccggtggccagcaggtaggccaggtacagcaggaacggtccaaccagataggtcgtgataccgaaaacgccaaagtaccagctgcgcagcgtgcgccaaagattctgcccgggcacaagcacgagcgcaacgcaaagcagacccagccccaccagcaggatgctgcgggccaggttcggggtctcggcgcggcgctgggcacggcgggacggctgacggctgcgggaggccgcactgctgcgcgcggatgcggagcgcccggtgctgctgcggcccgtgccgcgggaggaggcggtgccctttttgccggaggagttctttgttgattttttaccggaacgagattgtgccatgttatagtgtttccctctcttatttctctgaacgcttcattaggcaataccgcataattcccgccttacggcttaagcaccgctccggcggctgcggcacggcacctgcgttgccaaaatgctcgataatacacaaagtattatctgcgcttttggcttagcagctgccgcacctcgctcgccgtatcggcacttagaattatgcggtattgcctttatatataagtagtctgtacaggtacaggacggtaaggacatacgacttttattttagcacgatttccggggattgtaaagaaaaatgcccgcggtgccgggttacaaaaaataaatccccgccctgagggatgggcggggatttacaagaaaggaggagaagaacacatgaaaatgtgataaagctatttgacttggggttcatttagcttgcaactaaattgtaactgttttgtcaccgaatgtcaatagcaaattgtaaatcttttgtcatttttcaatttgttcacatttgtgtccggctcactcccctgttaattcgctgtactccttggtgggtgcgtcgccccagccggttttgccgctggcagcggtggcaccatcccagtagtgataggcgtaaatgttcaaaatctgcgattcctgccgggaccagccgccgtttgcgtccttggggcagcgctcatacacatacaaggcacagctgccgtttgcggagtcccggtcgtactgcaaaaattctacggcgtcgtcggtatcgttcaggatgatgtagtcctccccttttgcggtcagcttgaactcgtaggtggtggaggtttccttcagataggtttcgtagatcacgtcatagccggtgctgatggggtctttggaaatggtttcctctgtgtcgggttcggcggtaggggcagcggtgggcgcaggctcctccgtgggggcagccgtcactgccgggagcggcgtgggcgcgggcgcagtttctgcggggatgctgcggcggcccagtacggccatgcaggcatagcctaggaacaggacacaaaaaagggcaaacaaaacggtaaagagcgtttctttcaccttcggctttcgcttctcggcacagcgctcccgcagaaaatccagcacgttttcggggcactcgttctcgcacaaagcaaagccagcgaggctggagaccatcaggcagacagaatctttccgcacaatgacccggtaaaggtcgtcataccagatcgtgctttgggaatacgagctttgtaccgtgaagcaatcctcgtaaaacgtgtagtgaatgagcttaccccgagcgctttgggtggttttgtacgcaaaaaccgcaaccgcacgtgtcatggtaaagacaaagggaatcgaaagaatccccaatacaaagcccaaaaccgaaagagaattggcatacaaaagcagcaaggcgacggctgcggcaagctgccacaggttccgacgattgatgagaagcatccgctttacgtacattccttgggtgctatgggcatccaccgtataaagtggtgtgccttgcggctgttccaactgccaggatttttggtcttccatgtcgagtacgctccttccgtttgcatacagatttttcctgattctagcacagagcaaaaccaacgtcaagcactattcgcaaatcggcaggcgcagctcggcacaggcaccgtgcgcagcgggaaggttggataaaaccaacacaccgccgtgggattgcgcgacttttcgtgcaaaatacagccccaacccctggtgggcggcgtcactgcgggcggcgtcggtgtagagcatttcccccgccttggcaagagcttccggcgtaaagccggggccggtatcggtcacacgcaggatgaaatcctgtttctcttttgtaaccaacagtgtgacggtgccgccgcggggcgtatagcgcacggcgttgtccagcaggttttcggcagcccggagcagatcgcactgcgccgcgcacagcgtcccctgccactgctcgtccagcacaaactgtaccccggcaggtgcacagagggcgcgggcggtttccgccagcgtgctgacaaggatgtgactggaaaaggtttcccctgcggcggacggtgcacaggcggtgcgcagggcggccagatattgctgggcacggtccgtgccacgcaggatggcttcgacctgtgtttgctggtcggcggacagagcatcctcggccagcaggtctgcgttgccctgaatgatggacagcggcgttttcaagtcatgcgtcagcgcggcaatctgctcggcgcgctgctgctccatccgccattggctttgcaggctgtcggtcagttctcggcccatcgtctgcatggcatgcagcgtggcggaaaactctcgcaggtgcgcgccgtctgcgtcaatgcgctcgggctgctgcgcagcgatggcatccaccgcgcggtgcagacaggcggtctcggcggcaaagacccgcacggtgcagtgggtctgccagcccagccatgcaatgaccagcagcgccagcaaaagcatgtagcaggtctggaaatccggcagcgtgtcccgcagggccgggtcggcgtagggcgtagcatagtcgtactgcaaaaggcaaaagcttccgtcagccattttgacatcgtactggtactgcgtataccccagattgccgctgccgtgaaaggcattgagggcaattttcagatgccggtcatccatgttggtctgcagcaccgtgtcattctgcaccacagcccagcggcacaggtcactgatttggttggaatcaaatgtttctgcggtcacggcggctacggtctcccgggcctcggaacaggcctgggcggacgccacggcaggcagcagaaaaccgctgtttatcagctgcataaaaatgacccaccagagtaccagaatcagcgcacatccgccgccgcacaaaaagagataccgcagcagaacactgcgcagggatgtcagttttcgttttgccattggtagccaactccccatatcgtttgcagcacctcccctgcctcggctgcgcgcagcttggcgcggatgtttttaatgtgctgggtgatggccgtgtcatccgctgtaccgtcataaccgaacacggcttcatagatttgttctttggaaaaggtctgccctgcatggagggccagcagctcacagatggcgtactcggattttgtcaggtgtaaaggcgtgctgccaacgccggcttctttggcagaaaggtccagcgttaccccgccgcgggtgattttatgggacggcgtgcggttctgccgccgcaggtgggcggcaacccgggcacgcagctcggccacgcggaacggcttggtcaggtaatcgtccgcaccaagaccgagaccggtcagcaccgacggttcatcggtgcgggccgtcagaaacagaatcggcgcgtccgtctcggcgcgaatgcggcggcagacggcaaagccgtcctcgccgggcatcatcacatccagcaggatgcagtctgcccagcggcagagcgtatcggtcagctgtgtgccggaggtgcgggtctcaacggtatggccgtcgcgctccagcgctgtttttagcagtgcgcagaggtcgtggtcgtcgtcaactgccagaatgtgtgccataagctctccttaccgcgtaagcgtgtagacaaggcaggatgccccgtagagaagataaatgtgtgccgggtagaaccagtagaaaagctgcttgtggccgctgccgcgctggccgttgtacagcgccatgccgataacggcaaagacgccgagccactcatagtagactgtgaacatctgggaaaaggcgaaatccggcagaccgcgaacctgcagaaagaccagaacaaaatcacacaggaaggtcatagccgcccaaaagaccagccgcaggcgcttgtggttatacagcgcatacagcacgatgcccccggccagaaaagaccagccgccgtcggtgatggatgtccacaaaggcagcggcgcggtgatgacccacgccaacacggcagagccgatcggtgcgtcctgaattttgggaaaaagcatcagcagcgctacgatgcaaaacggccagacaatcggcatggcagcagccagtgcgccccgcacaaaccggcgctggcgcagccagtcaatgccctgccagactatgcagagcagcatcagatcctgaaaaatggcattcatcgggtagaagccgtccccgcggcggaaggcccctgcatagagcatgaaaaattccaccgtgcccatcgcagtaccgatggcccagatacgcaggaagtagcgcctgcggtcatgggtatgggcgaagccctcaacagtgcagaacagaaacagcggcgcggacagccgcgccagcatactgaaccattccggtacaacgcccgtaaattcaaaaaagtagtgaatgtgatccatcaccatgagcaccagcgcaatggttttgagcgccgtgccggtcaggcctaatttttgctttgtcataataataactcctttacattgtcgatgtaaacagtgtaacaggggtttgtgtaggaattataaggatttgaacgtcagcagcgattcaaaggcggatttgccctcgcgctcgccgtcaaagtagaactggttgtcagcaagggcggcgcggcgcagggtgaagctctcgccgcggggtacctcgcggtggtagctgatgatgaaatccgaaatctgcgcactgtcccagacctgccacggtacggcatcgcagacaatgtcggcatagcgggtgttgttgaggtggccgttcatgtcgcagcgggagtaggctgcggtctgcgtacccagcgtctcgcagtcctcgggtgcaacgcggggcaggcgcatcggcagctcaaggggcacatcctcggcccactggtcgtcaaactgctccgggtgcttgcgcaggatcatacgcttttcggtatcaatgagtacccagcggctgtccattgtggcgacctctgccccgtcggcatcgtaaaaatgggtgatgcgcttgttgacggcgcgcttgcagcgctcgggctgggtgacaagggtcagttcctcgtccacacggggcagccgtgtgacgtgcagggccagcttggccagcacataggcggtgtgggtcttgcggtacagggcatcgtccagccctacggcctcggcgtgggcggtagcaacctgctgggcatagcgcagcagcgcccccagcttgacatggccgaggtggtcgccgtccgtgcggtagacggtaaatttttgggtgtaggttatgagcttttcgggcataaggaagccctccttgatggattttgaattgattcgccaagcagagtatagcacaaatgttggaaaaatgcaaaggcgggggctttggggctggccgtaggggctgatgcttgcatcggtccgcggaggggtcaagacccctccctacaaatcgaaccgtaaaagggtgcagcggcaaggctgcgggccggcaaacaaaaaggctgcacacgcaaaacggtgtgcagcctgaaactgtttaatagttatcgcgggattttttgcggagcttgcgccagatattgaatgcagagatagcgatggccagaagcagcagggcaagaaccatccagccgctgccgccatcctcatagctcttcatctcgctccactgggcatccatggctgcgttgatgtcgtcgggcagagtctcaaagacctccgccttgtccagaacctccgcgcccgggtaggcaatttcgctgtacttcaaatcgtcgtccagcatctcccacacggcggtgatgggggtggaatagccgatgaagtccgcgttggcaaggccgacgtccggctcacacaggtagttgatgaacatttcggcggcctcctggtgtttggcgttggccggaatgcacatgctgtcgatgaagaagttgacgccttcctccgggtggacgaaagcaaggtctgggttttcgtcgatcatcgtgatggcatcgcccgcatagtagggcgccatggcggcctcgccaccctccatcttgtcaaagacctcgtccatgacataggcttgcacgatgttcttttgggccttcagcgcgtcggtgatggcggtaatctcgtcaacggactgcggattcatcgacaggccaatcgtcttggctgcaatcgcgtaagcgtcgcgggaattgttgaacatcagcacattgtttgtgtacgcaacatcccacatgtccgcccatttcgtgggcggctcctcgaccatcgtcgtgttgtagatcaggcccgttgtgccccacatgtagggcacgctgtacttgttgccggggtcgaagctgcggtccagatatgtttcaccgatgccggcaaagttcggaatgttgtccatgttcagctcggacagcatgccctccttggccatcttgcccaccatgtaatccgacgggaagatgacatcataggatacgccgccagatttcagcttggcgtagaggctctcgttggagtcgtaggtcgtgtaattgaccttgatgccggtcagctcctcgaatgcggacagaacgttgatgctctcgtcagaaccgtcggagatgtacaggccgttgttgtagacattcagcgtgatatggtcgttggcaaagcgcttccaatcgtagtcgccggagacggaaatatcctcgttgacctcgatgtcatcggcggccagcaccggcgcggcgctcatcatggtgacagtcagtgcggccagcgctgcagcggaaaactttttcagcttcatcttcagcgccccccttcgtccagcatggctttgcggatggccttctggttgcggcggtaggcgcgggagtctgcggcgttggaaatcaggatgattgccagaatgacgcagaatatgactgcagacagcgcgttgatctcggggctgaccttcttgcgggtcatcgagtagatggcgataggcagtgtctgcatcgtgccggagttgaagtaggaaatcatgaagtcatcgatagagtaggtcaggcagatgaggaatgccgacaaaatggccggggacagctgcggcatgatgactttggtgaaagcctggcgcggtgtgcagcccagatccagcgctgcattgtacaggctgggatcgagctggcgcagcttggggcctacattaaagataacatacgggatattgaaggtgatgtgcgcaatcagcagcgtcggccagccgaagatgccgctctcgccgccaatgccgaagttctgcgccatgacgaagagaagcatcagtgagacaccggtgatgatctccggattgacgacaggcacatagctgatgttattgatgatgagctggcttttgcgggacatcgagttgatgccaagggtcgccagtgtgcccagcaccgtggcgataatgctggacaccagcgccagcacaaggctaagacccagcgcggacaaaatcatctcgttgtggaacaggcttttgtaccagccgagggtgaagcccgtaaagttcgagcgggatttgctctcattgaagctgaacgcaatcatgaccgcgatgggcagatacatgaagcagaacaccaggatgacgtaggtgcgcatgagcaatgcggaatgtttttttgccatatcacatcactccttccatctcggactcgtcaaagctcgaagtgaagctcatgcagagcaggacaatgaccatcagcaccaggctcatggcggagccgagattcagattgtaggagttgccaaggaactgcagctcgatcaaatcgccgatcagcaggttggagccgccgcccagcatacggctgataataaaagtagagactgcgggcacaaacacctgcgtgatgccggtggcaatgccggggccggtcagcgggacgagcacccgaaacagaatatgccagacgttgcagcctagatcctgcgcggcctcaatgatggaatcatcgatttttgtcatggccgtgtagatgggcaaaatcataaacggcaggtagttgtacaccatgcccagcacaaccgcacctgaggtgttgatcatgttgaaggggccgaggccgaacaaactgaagaacttgttgataaggccgtttttctccagcagtgtcatccaggcgtaggtgcgcagcaggaagttcatccacatgggcagcataatgagcatcagcataatgtgctgcttgttggcgcgcaggcgggagagaaaataccccaccggaaacgccatgaccaggcagatcacggtagaaatcgcggccaaaatcaggctgcgggcaaacacgctggaataccgcccgatctgggtgaggttgtcgaaggtgaactggccgtccgcgttcgtcatggcgtaccagatgacgatgaaaagcggtacgactgtgaaaatggccatccagaccagatacggcccggccagccagcgggaggatttggatttgagcatggatcacacctccgaacgcttcatgatatgaatttcgtccgggccgatgttcatgccgataagctcgccgggctggctggcctgggtggaatggatgatccactcatagccttccacatcgacgtgcatttcaaagtgaacgcccttgaagatgacctcgcgcacaaggccggtcagcataccgatagagggcggcacgatctgcacgtcctccgggcggatgacgacctgcacaggctcgttgactttaaagccgcggtccacacaggtgaaatcatggccgccgaagttgaccagaaagtccttgagcatgacgccgtcgacaatgttggagtcaccgataaagcgggcgacaaaggcatttttgggttcgttgtaaatatcctgcggggagccgatctgctggatcttaccgccggacataacaacgacggtatccgacatggtcagggcttcctcctgatcgtgggtgacgtagacgaaggtgatgttcatttcacgctgcaggcgcttcagctccagctgcatctccttgcgcagcttgagatcgagcgcgccgagcggctcgtcaagcagcaggacgcggggctggttgaccaggctgcgggcaatggccacgcgctgctgctggccgccggacagctggtagatgctgcggcgttcaaagcccttcaggccgacgatctcgagcatctcgagcaccttcgggcggatctcatcctcggtcatctttttcaggcgcagaccgaaggcgacgttctcaaacacgttcaggtgcgggaacagcgcatacttctggaacaccgtgttcacaggccgcttgtacggcggcatgttggcgatgtccttgccatcaaaaaagacattgcccgatttcggtgttacaaagccggcaatcacacgcagggtcgtcgtcttgccgcagcccgaggggcccaggaaggtgacaaactccttgtcgtggatgtccagcgaaagcccgtccagaaccttctgcccatcgaactcgacaacaatgtctttcagagatacgatcagattttcattcatttttattgcatccccctttgcggaatttcccgttacagcactctctttacgcaccgtttcttccttgggtcggcacagagtccttgacgagtcagcgccaattatgccgccccgcaaaggtttgttacacgactccctgctgaagaagccgctgcaagcagcacatacaacgccaatgtgtcagggcagaaaagatttgccctatagatgcacacacaagatacattatacggcttgtggaatgtttgtcaataaaaacctttcatattatggtaatgaaaatttcatatttcggtaaagcggtgcgcagtatcatttttttactgcaaaaccggctgccccggccgccacttccccaccagaatcgggaaatacctgcgcgccagcgtgccgtaaattttgccgcacacgacgagatacaagtgcagtgacagagcaaaacgaagtgcagcgtttgcaagcgcagcggtgcattgacagaaaatcaggcggtaaaaacgaaaattcataaatgcctcctttgcatttgcagactaacggtctgtaaacgaggtaaaaatcagcaaagctcctccaacagagtgcattgttcctctgtcaggaggtcaaggccaatccccctgcgggaaaagtcaagacatttgccgcagattgtacggtgcgcggtggtgggcggcgtgttataattatccgcatagagaggtgaaatgaatgtggcaaaaatcggcgttatcgatgtgggcggcgggctgcgcggcatttacgcggcgggcgtgttcgactggtgcttggaaaacggcgtgaaatttgattacggcatcggcatttcggcgggcagcgcgaaccttgcttcctatctgagcggccagcgcgggcggaactacctgttttatgaggaatactcgatgcgcaggcagtacatgggcgcgggcaatatgttgcgcagcgggtcgtttttgaacctgcaatacatctacggcacattgagcaacgcgggctgcgagaatccgctggattttgaaaaaatgtctgccaatcggatggagtggtatatgatcgccaccgatgcgacaactggcaagccaaaatactttacacgcagcgatatgcatcaggatgactaccgcgtgctgatggcttcctgctgcatcccggtggcctgcaagccaatcgtcattgacggcatcccctattacgacggcgcgctgggtgatacgatccccttgaaaaaggcatttgcggacggctgtgacaaggtcgtgctgattctgacaaggccaaaaggcactgtgcgcgctgacagcaccgaccgtaagctggcacgagtcatccgccgccgctatcctaaggcggccgagcagttggccttgcgggcgcagcattataacgagggtatcgcgctggcggaacagctggcagccgagggcaaggtgcttatcatcgcaccagacgatacctgcggcgtcaagacgctgacccgcgaccaagaggcgctgaaaaagctctactccaagggtatccgcgacgcacaagccatcgaggcatttataaaataaacgaagcccgccgcttttccgggatacggataaagcggcgggctttatgtttttctagtaaaattacgccagattcagccgctttgtcatgagccactgggtcagtgcccacagcagggcatcgacaagggcaatcagcgcaaagacggcgagcagggtgagcacgataacgcccaaggtattgtcgggaccgaaaaacgacgcggcgctgaagttagtattgttcaggtacttatacccgcggaacgcgacaaagactgccgtcacaagggctgccatctgcccgataaagccgatgacaaagtaggcggcgatgctgatgagcagccgctgctgggtaaactgcgcggcaaaggcacaggccagatatgcgtgcagcagtgcgcccgcgataagggccagtataatcaaaagcattgcagaccagatggcgacatcctcggcagtgacgcggctgaaatccaatgcaaacccgctgccactgaccgtgtcggtagtcagcatgccgcaaagtgtaaaaaataccatgccgaacagagtccataccgtgccgcagatgaccttagcagcaatgtgctgccaaatgggcacgggcagagccagcatcaagtacccgcgctcgcccaacaggcggtaaaactgctgaatttcaataaaaaagcagatggcgagcacaacaagaaggcttacggcagatgccagtgccagcaaggccatggcgaccccggccagcggcagcctgtcggaggtgttctggacaaaatggctcagaatattagtaaaaatgttcagcacaagcacgcccgccgcaatgggcagaacaacacggcctgtggatttgaactcataatgtaaaagattcgtcagcatttgtaaacctcccggaagtaagcgtccacgctctcccctgtttcctcgcgcagctcgtcgacggcggtctggcgcaggaccttgccgtcctgtaaaagaatgacctcgtccagcaccttttcaatgtcgccgatgaggtgcgtggacagcataagcgcggcatcctcactgtagttgtgcatgatggtgcttaaaatgtagtcgcgggcggcggggtccacgccgcccagaggctcatccagcaggtagagcctggcggcacggctcatcgtcaggcagagctgcatcttttcctgtgcgcccttgctcatggaatcgattttgtcccgcccgccgatatgcaggtcggccagcatggcgtttgccttgactttgtcaaaatcggtgaagaaatccgcgtacaggcttacggcgtcatcggcggtgaactccgtcggcagggccatacggtccggcagatagctggtgacagccttggtgaaaacgccgacaggaactttatcaataatgacgctgcccgccgtgggctgcaaaagcccggcagagattttcataagcgttgttttgccgctgccgttggggccaagcaggccaacgagcttgcccggcgtgacggcaaagtccacgccgttcagcgcagcggtgcggccatagcgcttggtcaggccgtgtacctcataaattgcatccatggtttactccttttttggtgcctgctgtgcggtctcgcgcagcagggtctcgatttcggcttcggtcaggccgagggcctgcatctggtgcagaaactccgccgccagcgtaccggcgcgccgacggcgcaaggcctgcagggcagtgtcatccgctgtgacggtgcgcccggcggtgcgctgcgcctgcaaaaggccgcggctttccagctcctgcaaagcacgctgcatggtgttggggttgaccccggcgtcagcggccaactcccgcacgggcggaatgcggctgccgggcgggaactcccctgcgacgagggcaagctccaactgctcgaccagctgcacatagaccgggcggcccgcagtaatgttccagttcatggtgttttatactcctttgtattattgtgttaagagcttaatacaataatacacgcgggatacagctttgtcaatagaaaaaataaaaaaatcccccgccgggctggcggaggaaatattgcatgatacaacgtcaggaaatatgatcctcgatccatgtcaacacgtagtcgaacacctcgtcgcggtttgtttcgttgtgcagctcgtggcggcctccttcaaaaatctggcaggtcagatccctgacaccggcgtcacccagcatggcccagaccttgcgaacgccgctgccgtagtcgccgacggggtcgcagtcaccggcaatcagcagcacgggcagatccttgtcaatagcctgtgcccatgcctttgtgctgacgtggttgagcgtcgcgagcatctcgcggtaggtcgcagcggtaaaccggaaggtacacagcccgtcggcgtcataggctttcacaacgcttttatcgcgggaaagccaggcgttgggcgactgcgcgttctcgattttcctgcaatagctgccgaagttcagcttgaccatcagcggcgagacatagcgcggtcccttgatgcgggcaatcagcccggccagacgctggccgacgacattcataaagcttgggcctgccgtgccggaaatgatcagcgccgtgatgctttccggccacttctcggcgtaccagcgcgcgtaaaagctgcccatgctgtggccgtagaggatgatgggcgtatcgggaaagcgctcgtgcaggatacggttcatcgtgtgcaggtcgttcaggaggtggcaacggccattcggctcaccgtagtggccgtgctcccctgcctgggcggtgtcaccgtggccgaggtggtcgttgcccgccagcgcaatgccgtgggcagcgtagaactcggccatcggtgcatagcggcgcacatattcgcacatgccgtggctgagctgaaggacagcccgcacaggctggccgggtacagtgtagaggaatgcggaggaggtgtgctttccgtccgacgacgggaaggcaatggcttcgcagtggaggttgggcatgattacagttctcctttgatttttttccagtattgtgcgaaagcctgctcgtttttattatcgccggggacatagtactgccggtccttgatggcgtcgggcaggtattgctgggcggtccagtggttggggtagtcatgcgggtagaggtagtgctgccccttgaccttggcgtctgcgccgtcgtagtgcttgttttgcagctggcgcgggatgggcccggtgcgcccggcctgaatgtccgcaatggcggcattgatgccgtcgtgggcggagttggacttgggtgcggtagccaccagcaccacggcatccgccagcggcagacgggcctccggcagaccgacggcgttggcaatgtcaacagcggccttgacgatggggatgatctgcggccaggccaggccgacatcctcgcacgcgcagaccatcaaacggcggcaggcgctgggcaggtcaccggcttccagcagacggcccagatagtgcagcgctgcgtctgggtcggagccgcgcatcgacttctggtaggccgagacgatgtcatagtggtcgtcgccgagcttatcataccgcatggccgtgcgcacggcgacctgctgcaccatgtccagtgtgatcgtgcggcagccgttttctacgggtgcagcggtgacggcaaattccagattgcccagcgccttgcgcatatcgccgcccgcactctgggccaggtattccagcgcgtcgtcgggaatgagcacgggagacttgtcctcagccccgaggcgcgcagcggcgctgcgcagcccggtgcggatgtcgtcggtggtcagggatttgaactcaaacaccgtgcagcgggacagaagcgcgttatatacataaaagtagggattctcagtggtggaggcaatcagggtgactgtaccctgctccacacattccagaaggctctgctgctgtcgcttgttaaaatattgtatctcgtcaagatataaaagaatgccgcccgacgcgccgagtgtgccgatgtccgcgagcaccgacttgatgtcgctcgtcgaggccgtcgtgccgttgagcttgtgcagctgcataccgctgcccgctgcaatgatgctggcaacggtggtcttgccgacgccggacgggccgtagaagatcatgttgggaatcttgccgctctcgacagtgcggcggaaaacctgatttttgccgagtagatgctgctggccgcagacctcatccagggtgcgcgggcgcagacgctgtgccaatggttccattttgcgttcctttttttagataagtttgagatagtgtactaaaacatcatacttctatacttgattataacggctcggcgtggtagaatcaagagaaaaggattgaaacggagaaaatgctgtgaccaaacaagagctggctgcgatctgcattgcgcgcctgaaggcagaatatcccgattccgactgcacgctggattatgaccatgcgtggcagctgcttgtgtcggtgcggctggcggcccagtgcaccgatgcccgcgtaaacgtggtggtgcaggagctgtttgccaagtaccccggcgtaaaagaactggctgcagcggatcctgcggatattgaggccatcgtcaagccctgcgggctgggccacagcaaggcacgggatatttcggcctgtatgcggatgctgcgcgacaggtacgactgccatgtgccggatgatttcaacgcgctgcttgccctgcccggcgtgggccgcaagagtgcgaatctgatcatgggggacgtattcggcaagcctgccatcgtgacggacacccactgcatccggctgtgcaaccgcatcgggctggtggacaacgtcaaggagccggccaaggtcgagcgggagctgtggaagatcatcccgcctgcggagggcaacggcttctgccaccggctggtggaccatggccgcgccgtgtgcacagcccgcaccaagccctactgcgacaaatgctgcctggcggacgtatgccgggcacgaaaggaatttttgcatgaataaaacgacggaaaaccgcctgggcggtgagctgcgcagccatcaggcagcccggcgcctgctggaggagctgcgccgcggacgctatgcagacgccgcccagctgcccagcgagctggagctggccgatgttctgggcgtgagccgcaccgtggtgcgcgatgccctgagcgatctggagcgcgacggctatctggagcgtgtgcgcggcatcggcacccttgtcaaccgcgatgtggtccgggtcgagaaccgcatggaccagaagctggaattcaaccgcatgatccgctcaattggccgcgtgccccacagcgataacctgatggtcacgcgggagactgccatgccggagctggccgcaaagctcggccttgacccggagcgcgagcacacacttgtgtttgtgcgccgccgggtactggccgatgaaacgccggtgctctactccaccgatattctgccgctggcgctgtttggcggcaagcggctggatacgatcgatttcagccgcccgatctttgagatcgtggagcagcactgccatgttgaggtcaccgagacgctgacgacgctgcacgccgtacagggggcgcccggcatccgccgccagctggggctgcgcccggagcaggcacttttgcagctggatgagatctgctattcccgcacctgcaagccggtgctttgctgccagacctgctatacggatttctttgactttgcgatggtgcgcaagctgatttgattttgaacggcacagcgccgtttggaataaatagagtaaacaaaggggattgtgtatgagacatttgatcgacccggcggatttcacgctggaagaaacgctcagcctgatggaccttgcagaccgtatccatgatgacccggctgcctataaagatgtagctgcccgtaagcggctggcaacactgttctacgaaccgagcacccgtacccgtctttcgtttgaggcggccatgctgaacctgggcggtcaggtactgggcttccccgatgccggtgtttccagcgcctccaagggcgagaccgtagccgataccatccgcgtgatcagctgtgtggcagacattgccgccatgcgccaccccaaggagggggcaccgctgcgcgcgtcccgctacagccgtattccggtcatcaacgccggtgacggcggccacagccaccccacccagacgctgctggacatgatgacgatccgccagcgcaaggggcacctggatcatctgaccatcggcttctgcggcgacctcaagtttggccgcacggtacacagcctgatcaagagcctgtcccgtctgccgggcatgaagtttgtgctcatctcacccgaggagctgcgcgtgccggattacatcatcagcgagatcctcgagcctaacaacatcccctatgttgagacacgcagcatggaggaggctctgcccgatttggacgtcctctacatgactcgcgtccagcaagagcggttctttaatgaagaagattacatccgtctgaaaaacagctatgttctgacaaaggaaaagctggctctggcccccgcggatatgccggtgctgcatcccctgccccgtgtgaatgagatcacgctggacgtggatgacgacccgcgcgcagcgtactttgaccaggtgcagaacggtgtccatatgcgcatggcgctgatcatgactttgctgggtctcaaagaccccaagaccggggaggtagcgttcaatgttgaaggttgatgaaatccagaacggcgtggtcattgaccatattaccgcaggcacgggtctggcgctctaccacatgatggagctggaaaagctgcacaatgccagcgtggcccttttgcagaacgtccgcagccaaaaggacggaaaaaaggacataataaagatcgagggcgatgtcagcgagatgagctttgacgttctcgcctatgtcgacccgaaaatctccatcacctttatccgggacggcagggtgacggagaaaaaacaccccgagcagcccaagcggctggtcaacgtcatcaaatgcacgaacccgcgctgcatcacttctatcgaggagggctgtgaccacatctttgctctgacgccgagcggacgctatcgctgcatctactgcgagcaggagttccgcgtaaaaccgtaaacgaggtaacactatggaaaagccgaaatttcacctaaaccctaatgaggaaatcgtcaaaaccatccgcgagggcctcaagcgcacgggcggctactgcccctgccgcttgcagcatattccggagaatatctgcatctgcaaggagttcaaggagcagctggccgacccggactaccacggtgcgtgccattgcgggctgtatgtgaaggattgaggacttttcccttttacaacaattatacacttataataagcaaaacgaggtatctgccacggaaagcaggtacctcgttttgcttatgctacacgcacgccgccagtgtatcctcggtcaggataatgtgcccgtcggcgtccacatcggcggtgtaaacggtgccggggtgggctgtaccggcagcgatgcggtccgcaagggcctgctccacggcacggctgacggtgcggcgcagctcccgcgcaccatagggcggcaccttgtccccggccagcatcttggctgcggcgggcgtgtggtgcagcgtgtagccctgccgggctgcgcgctgctcaagctcgacaagcagccggtctgcgatcccggccagctgctccgggccgagcgggtcaaagaggacggtctcatccaagcgccccatcagctcggggcggaaaaactccttagcctcctggatggcttgctggccgcggcgccgggtctcggcagcggcggccccaaagcccagcggcgacgtctgcccggacagacaccgcgcacccagattagaggtaagcagaataatagtgttggaaaaatccgcccggcgtccctgggagtcggtcagattgccgtcttccaagatttgcagcagcaggttctggatgtcgctgtgcgccttttcgatttcatcaaataagacaacactgtacgggcggcggcgcacggcctcggtcagttggccgccctcgtcgtggccgacatagcccggcggcgcgccgagcagccgtgcgacggtatgccgctccatatactccgacatgtcaaagcgcagcagggctttttcgctgccgaaccagcattttgccagcgtgcgtgccagctgggtcttgccgacgcccgtcggcccgaggaacagcattgctcctatgggccgcccgctctcccgcaggccggtgcggctgcgtcggatggcggatgccacggcggccacggcctgcggctggccgatgacctcggcggcaaggcgctgttccagattcgcaagccgctccctctcggcttcgcccacgcgctctgcgggcacgccgctggccttgctgacgacccttgcaatatcggcgggggtcagtgcccggcggttcccgctggcatcggcaatgcggcgggccgcggcggcttcgtccagcaggtcaatggccttgtcgggcagataccgcccgggcaggtaacgcacgctcagctccaccgcggcgtggatggcctcgggcgggatgctgacaccgtggtagcgctcataccgcggcatcagtccggccagaatcgtttctgcggcagcaggggtgggctcctcgaccatgacccttccaaagcggcgctcgagcgcggaatccttctggatggttttgcggtattcctcaggtgtggtcgcgccgataagctgaatttcgccgcgtgccagcatcggctttaagatgctggcggcgtcaatggctccctccgccgccccggccccggcaatgatgtggatttcatcgataaacaaaatcgttgagcggtcacggtacagttcttccaacaggttcttgaaccgctcctcaaagtcgccgcggtatttggtgcccgcgaccatcgacgccatgtccagcgccagcacccgcttgccgcgcagtgccggggtgatctgccccgcggcgatccgctgcgccagtgcctccgccagcgcagacttgccgacacccggctcacccaggaggcagggattgtttttctggcggcggcagagaatttcaatcatgcgatccagctcggcatcacggcagagcaccgggtcgagccgcccctcctgtgcgaggcgcgtcaggtcgcggccgtatttatcgctggggcggcctgtgcgggaggcagccatccgcggctgggcgggcagcacaagctgaccggaaagctggcggcattcccgcgcggcctgcggcagctcgatgcccagagccgccagccaccggctggccgtgcaggacgagtcctcgaggatggcgcagagcaggtgttcgttctccgccctggcggcactggccgcgtgcgcccccagcacggcaaactccatggccttgctcagctcgggggcaaggtcccggctgtgcaggcggcgcggacggcccgccgcgtgggcggcggtatgctcggccagggcggtggatgtcacccgcttgcggcgcagaaaatccgccgctgtcccctgtgctgtctgcaccagcgccagcagcaaatggccggtatccgcctggctgcacccctgctgccccgccagcaccagcgccgtgtgcacggtgcgtgccgccgtgaaggaaaaacctttatatctgtagacccagaacatctgcaaatcctcctctgaaaagtacccattgaaagtatagacgccgggccaataaataatcatcgaaatctgggggattctgcaagacaaattgagaaaaccgtggtataataaactgattgtttttatttttacgtatgaggtggttttcaatgcacaaattgatgcgctacatcaagggctatgagaagcaagccctgttagcgccgcttttcaagatgctggaagcctgttttgaattgtttgtgcctctggtcattgccagcatcattgacacgggcatcaaaaacgaggatgcagccttcatctggacgcgctgcggcctgctggtcctgctggctgctatcggcttggccagcagcctgacggcccagtggttctccgcaaaggcggcgctgggctttggcacggcattgcgcaaggacctgttccgccatattggcacgctgagctacagcgagctggacggcatcggcaccccgacgcttgtcacccgcatgacgagcgacatcaatcaggtacagaacggcgtcaacctgacgctgcgtctgctgctgcgctcgccgttcatcgtgatcggcgcgcttattatggcgttctccatcagcccgaagctgacgctgcttttcatcggcgttacgatcatggtgtcgcttattatatgggccatcatgcgcgtgaccgtgcccatctaccatgaggcccagaacggcttggaccgtgtgacgctgctgacgcgcgaaaactacgtcggtgcacgcgtggtacgtgcctttgcccgccaggcggacgagctggccgcctttgtggagacaaatgaccacctgaaaaagctgcaatttgcggcaggccgtatttcggcgctgatgaacccgctgacctatctcgtcgtcaacctggccgttgtggcgctgctgctgcgcggcggtgtggaggtcgatgccggtaagctgacgcagggcgaggtcattgcccttatcaactatatgagccagattctgctgagcctgctgcgtctggcggatctggtcgtttcggtcacccgcgcactggccagcggcatgcgcgtcaatgagattctgaacacccacacgacgatgcaggatcccggcacggcagagctggctgtgaacgacgctgccgaggcggctaagtttgagcacgtcaccttcacctacaaggatgccggcgcaccgagcctgacggacatcacgttcacggctaggtccggtgagaccatcggcgtcatcggcggtacgggcagcggcaaatcgacgctgatcgacctggtctgccgcttctacgatgccgacaacggcggcgttgcgctgttcggccatgatgtaaagcagtacagctttgcacagctgcgcaggctggtgggcgtcgtgccccagcaggctgtgctgtttacaggtacgatccgcgacaatatgcagtgggccgcccccggcgcttccgacgaggaaatctggcaggcgctggagatagcccaggcggcggaatttgtccgcggcaaacccggcatgctggatgcgccggtggagaccgcgggccgcaacttctccggcggccagcgccaacgcctgacgattgcccgcgcgctggtaccaaagccgaagatcctgattctggatgacagtgcatcggcgctggattttgcaacggacgcagccctgcgcaaggcaatcaaagaggaaacgcacggcatgaccgtgtttatcgtctcccagcgcgcggccagcgtgcagcgagccgaccacattctggtgctggatgacggtaagctggttggcgacgcgccccatgccgagctgctgcgcagctgcgaggtctataaggaaatctgcctgagccagttgagcaaggaggaggtggcaaagacgctatgagcaagacaaagcaaaagctggaccagaatacgatccatcgcgtcctgaagctgatccgcccctacgctggcatggtcatcctgacgctgacctttgcgctgatcacagtggtcacgactctgctggccccggtactgtccggtaaggccgtggatatgatcctgggacccggtcaggttgattttgcaggccttggcaaaattgcgatagcgatggctgccacgattgcctgcacagcgctggcccagtggctgatgaatgtcgtcaataaccgcattacctttcaggtcgtgcgtgatatgcgtgtccgtgcgtttggccagctggagattctgccgctcaaatatatggacgcccaccgccccggcgatgctatcagccgcattaccaccgacgtggagcagttcagcgacggtctgctgatgggctttacccagctgttcaccggcgtgctgacgattttgggcacgctgggagtcatgctgttcatcgactggcgcattgcgctggtcgttgtggcgttgacgccgctgtcgattttcgtcgcgcggttcattgccacccacacctattctatgttcaaggtgcagagcgagacccgcgccgaaatgacgagtctggtcgaagaactggtcggcaacgagcatcttgtccgcgcgtttggctatgagcgccgcgccgaggaacgcttcgataagatcaacctcgatttgcagaagtgcggcgtcaaggcgacgttcttctcctctaccacgaacccctgcacccgctttgtgaatgcgctggtctacgccgccgtcggcgtgctgggtgcgttcgtcgccattgctggcggcatcacggtgggccagctgtcggtctttctgaactacgccaaccagtacacgaagccgttcaatgacatttcggacgttatgaccgaactgcagaacgcgctggcttgtgcgcagcgcgtgtttgacctaatcgacgagacacccatcgtgcccgatggcccggatgctgttgccctgccccacggcgcgggcagcgtggagtttgaccacgtcaggttccgctatgtggacgatgtgccgctgatcgaggatatgaacctgaaagttgtgccgggtcagcgcattgcactggtcggccccacgggctgcggcaagacgacactggtcaatctgctgatgaggttttatgagatcaacggcggtacgctgcgcgtcgatgggtattccatcgacaatgtgacccgcgacagcctgcgcggcaacctgggcatggtgctgcaggagacctggttgaaggccggtacgattgcggagaatatcgcctacggcaagccggatgcgacccgcgaggagatcatcgccgcggccaagaaggcgcacgcccatagctttatctgccgcctgcccaacgggtacgacacgcaggtagccgaggacggcggcaacatcagccagggccagcggcagctgctctgcattgcccgtgtcatgctgcgacgcccgccgattttgattctggatgaggcaacgtccagtatcgacacccgtaccgaggtgctggtgcaggatgcctttgaggagctgatgaagggccgcacgagctttatcgtggcccatcgcctgtctaccatcaagaacgctgaccagatcctggtcatgaaggccggcaacatcattgagcgcggaacccacgaagaactgctggcgcagggcggcttctacaagcagctgtacgagagccagttcgccaaggcataaaaccatacaccgggaaagaaataggaggatgtattatgagtcacattaccattccggaaggataccaaagccttttgggtttgtatgacacccagaaggccatcggcctcatcaagacgatctttcaggagaagctctgcatggcgctgcacctcaagcgcgtcacggctcccctgtttgtcaagcagggcagcggcctgaacgatgacctgaacggcgtcgagcgccctgtttcgttcgatgtgcccagcctgaacgagcaggcagaggtcgtccacagtctggctaagtggaagcgctacgccctgtacaagtacggcttccgccccggtcagggcattgtgaccgatatgaacgccgtccgccgcgacgaggagctggacaacctgcacagcatctatgtggaccagtgggactgggagcgcgttatcactgccgaccagcgcacgctggaatttctgcaggagaccgtgcgggacatcgtggacgctgtctgcgcaacgtctgacgagctgcgctggaagttccccgagctgaaaaacaacatccacctgggccgcgaggtggcatttatcacgacgcaggagctcgaggacaggtacccggacttcacgccgaagcagcgcgagaatgcctttgccaaagagcatggaaccgtctgcatcatgcagatcggcggcaggctcaagagtggccagccccacgacgggcgcgcacccgactatgatgactggacgctgaactgcgacatcctattctggcacaagccgctggactgcgcactggagctgtccagtatgggtatccgcgttgacgccgacgccctgcgccgccagctggacgccgcaggctgcccgcagcgcgcggagctgcccttccacaaactgctgctggatggcaccctgcccctgacaatgggcggcggcattggccagagccgcctgtgcatgctgctgctgggcaaggcccatgtcggcgaggtacaggtcagcctgtgggatgacgctacggtacaggcatgcaggaattcgggcgtggagctgctgtaacccttgacaaacccctgccgattgtgatattatattagagttcccgctagtatagcacaattggcagtgcagctgatttgtaatcagcaggttgcaggttcgattcctgttactagctccaattaaaaaagcgcgttagcaaagcaaatccactttgcaatgcgcttttttcttgttattgtatgtctttttgcgtcctaaacagtaaaaaacaggtcgtaaacaagtcgtaaacgcagtagaatcgcataacgcggagtcagggttgaactcaggaatgctgctgtacataaagctgatggattgttcttgaggaatatttagagaagcttttccttattgcaccctactctatatactcctaaaaaacgcccggtaggcgtgatgcttaccgggcgttttgctttgctgttttaaatgtttgccagtgccgtctgcagagcgcagtaattctccagtgtcagctgctcggggcgggaacgctcatcaagaccggcggcctgcagggcggagatgacctgcgccttgggcaggtgcaggccattggcgatggcgttggcggcggtcttgcggcgctgggagaaagcggcgcgaatcagcgcgaagaaggcggcttcatcgccgttcggcacggttacggcgggcttcttcctcacatccaagcggatgacggcgcttgtcaccttgggggcggggtaaaagctgccgggttggacgctgaacaacagcttcggctcggcgtaataggccacggcgtagctgattgcacccgcatcccgcgtgccgggggcggcgcagaggcgctgtgcggcctccttctgcaccattacggtaatgttccggataggcagcttttcctccagcagacgcatcagaatcgggctggtgatgtagtacggtaggtttgcacagacggcgacgggcttgccgccgaactcctcggccagcagagccttcaaatcgaccttcagcacgtcgttcaggatgagcttgaagttgtcgtagtcggccatcgtctcttccagcagcggcggcagacgcttgtcgacctcgatggagacgacattgtccgcacgcttgcaaagctgctcggtcagcacgccgatgccggggccgacctcgagtgcgccccagccggggccgataccggaggcctccgcaatgcgggggcagatgccggggttgatgatgaaattctggccgaagcccttggacagggcaaagtcataccgtgcgcagaggtcacggatggtggacaggtcagtcaatgtgggcacggtggacgtcctttccgagtcaataaaaatcagttctgaccagccagtgccgtggccgcgttgacggccttgctgatctgcgggtcagtatcaagtgtataatcgtagtaggcgttctgctcgtcgacggagagcgcggcgtcaatgtcgggacgcaagccctcctcattccaggtctgatcctcgttatcgagcagcaggcccaccgtgatgtaagcggcggagccgtcggagaagctctgggcgtcgctcagaacgacgcccttacccgcagttttggtgccgacgagcgtcgcaccggccatcttgcgcagggcattggcgaacagctcggcgctgcccgcggtggagccgttgacaaggcagacaatcggaacgttgatctcggtctcatcggacatgcgcagcacggtcacattgccgtccctgtcctgctgcttggcgatctcaccggaaggcacacagtaatccgcggccacaagggcggcgttcaggttctcgccggtgttgtcgcgcaggtcaaagacaaggctgttcgctccctgctgcagcaactcatccacagcagccttgaactcgctggccgtgccggaggtgaaggcgtcaatgcggatgtacccgcaggtgtccgcgaccatctgacgggtgtagatggagggtgttttgtagttggagtggacaagattcagctgctgctcctggcggtccggcgtcaggtaggtgatcgtggtggtcgtaccctcctcacccagcagcttggaggtcaggcgcgcggtggaggtgatgttgcgcgtcgactcatcgttgatagcggtgatgaagccgccgacctgcatcccggcctctgcggcgggcgagttgtcatacaggcggatgatgcgggcgtagccggaggatgtgtcattgacgacagcgacgccgatgccggtcagtgtgcccttctccacagactgcttctcgctgtattccttggcggtgtagtagacggcgtacttgtcgttgatgccgttcatgtagcccgcagctaagcggtcattcaaggtgtcctcgtcgatggtgaaatactcccctgcgcggacaaaacgatcaatttcggacagcttgttgtactggcgctccttgtttttgacgctggacactgtggtgttgaacatcttcatggacacgaccatggtcagcgagaaggtgacggccattgcaatgatggcaatggtggccgccacgccaagactgatttttttgctcatgggtctgatggctccttactgtgtttgcgttatgccccgtaggctagtgagaaaaataccgtagagaaaaggctgagtatcatcagaacggcgactacaaggcagaaaatacgcacggaggttttgtgcttctgcggcttcatacagattcccctttcgttatgagaggtagttcatgacattgaccaggacgttgttgaccttcatttccaggtgcagatggttgcctgtggagttgccggtggagccgacataaccaaggaccttgcccttttccacgggctggcccacgctgacaacgggcgcgctgttcatgtgggcgtacagcgtcgaataagtattgccgttgtcatccttgccgtggtagacttgcacgtagtagccccagctccagtggtaggccgcagcggtgacgacaccgccggaaacggcgtagatttcggtgccgcccggtgcggcgtaatcggtgccgcggtggccgttgccgccgaagtagcaggagacgtacttataggtggccagcgggcggccaaagtccagcgagcactggatggacgcattgccgtaagcctggttggcggcgttcagcgcggcgtccagctcggcagcggccttatccacggccttgttggcttcgatcagggccgccttgttggcctcgatttcggcatccgctgcggaaatattggcgtcggtctgggagatattctgggcaagctcattcgtcttgccgtccagcgcggtcttttgggtctccagatcggcctgcgtggcctccaggtccgccttggcctgctccagctcggcgcgctgctgctccagctcggcgtgctcattttcaagctgttggcaggtgtcctcgtccttattaacgatctgatccaatgtggtggcaaaggtcagcagctggtataggttggtggcactggacaacagtgcgatggagccgccgtcattcagacgctgcatcgcacgcatacgatctttaaagtccgcccagcgctggtcgtattcggcctgcttctggtcgatctcttgctgcttccggtcaatctcgtcctgtttgttgacgatttcctcatccaaagaaccgatctgctcggacaggttgctgatctggcttaaaatcagtgccttctgctgctcaagctgcgttttgagcgcctcagcgtcggccttgttgctctgcgcgtccttgagctgctggttgaccttttcctgctcagtctgcagttcctgcagcctctggcgcaggtcgctgacgctggaggaggcggccagcggcgtcatgacggtggaaagcgtcatgctcatggcgacagccgcgctcagcagaagcgaaatcagctttttgccgtgttttacatgcttcatggtcttatacgttccctttatcccctgttatacattcagatgcttgcggatgctggtggcggtgccgaggccgcagagcacgaagcccagcagcacaaagccgccgacgatgtagtaccagacgctttccagcgggacaagcgtgccgccgaacatctgcgaaaggttggacggattctcggcataccagcggcagagtgcatagtacgcgccgcagacgatgccggacgcaatgccagccgaaatcaggccggaggtgacgccctcgacaaagaacggaaagcggatgaagccgttggtcgcgccgacgagcttcataatgccgatctccttgcggcggttaaagacggtgattttgatcgtgttgttgatgacgacgatggagacgatggccagcaccgcgaccaggccgtagcaggcgtagttgatgaccttctgcagggacgtgaaggtatccgccatagccagcggggccttgacgctgtaaacgccgtcgatctgcatgagctgggcggagacttcctcaatgttgtcggggtcgtccacggtcacgcggtagttgggagtgaacgggttgtcattggcaaagacctgctgcaggtttgtgtaatccttcagcatatcgctgtaggtcgccagaacgtcctccggcgacatataggtcacgctcacaacgtggggtgtgttgcggatggccgcgtcggcggcggcaatctgctcgtcggtggcgacctcgctctcgccggtgccgcccatgtagacgacggtcaagttctggttgccgatgtattcgaccatgtggtcaatgttgatgcccagcagcgaggctgcgccgatcagcaacatgcagacggtcagcacgcccatggaggcaaaggtcatcagccggttggcgcgcagattgtgcaggccctggccgactaagtagataaaactggaaaaacgcatggtgtcccctcttacttacaaatcagtcctcgtcgtactcgtagtcgtcctcttcgcgctcggccatggcggcagcgtagcggcgcgcggcagcagggtcagcggtatcggaggctaccatgccgttggccagcgtgatgacgcggttgccgtacttgcgggccagcttgtggacgagctcgtgctcatgggtgacgacgacgacggtgatgttgaccttgttgatggcctcaaacagctgcatgatgtccatcgacatttcggggtcgatgttgccggtgggctcgtccgcgatgatgagcttggggccgtgggccagcgcgcgggcaacggccacacgctgctgctcgccgccggagagctcatccggcaggcggtccattttgtcctccagaccgacaagggagagtgcaaacggtacgcggtccttgatctttttggtcgagatgttcgtcacgcgcatggcgaaggcgacattctcatagacggtcatggtggggatcaggcggaagtcctggaacacaacgcccatctggcggcgcaggtagggcaccttgcggcgcttgatgcgcgttaaatcctgcccattgataaagaccttgccctcggtgggcttctcctccatctggatgagctttaaaaacgtggatttgcccgcgccggaatggccgaggataaagacgaactcgccctcgtcaatatggatgttgatgtcctccagtgcgacgttctcatcgttgtgggtctcgtaggttttatatacatgttcaaaatcgatcattcggggttctcctgccgtggtgtggctttgctgttatggttacagtcatacatataatagaataccatgtcagacctctgcggtcaaggtgctttgcggctgcaaaaagcaggaaaatggcgctgccttgcggtgcagcgccatttgtgaaagtttttttaaaatcaatatttggccgggttggcggacagatatttcttgaccatcagcgccaccttaaagacgatggcatcatcgaagttgcgcaggtcaaggccggtcagcttgcggatcttctcaaggcggtagaccagcgtgttgcggtgaacgaacagaccgcggctcgtctcggagacgttcaggttgttctcaaagaagcgctggatcgtgaacagcgtctcggcatcgagggagtcgatgctctcctgcttgaacacctcgcgcaggaatgcctcgcagagcgtcgtaggcagctggtagatcaggcgcgcaatgcccagatggtcatagctgatgacctgacgctcggtgtcaaacaccttgccgacctccatggcaatctgggcttctttaaagctggaggccaggtccttgatgttgccgatgggcgtaccgatgccgacgacggccttgatgtaatggtcgccctgcagcgtatcgacgatggaggcagccagcttttccatatcgcgggtgttgttgtcgggcttgatctccttgaccaggacggtgtcggtctcgctgatgttaaagacgaagtccttctgtttgtccgggaaaagaccgctgacgacatcgtaggcggaaatatcattgccggaggtcacgcggatcagcagtacgacgcgctgcacgtcggagacaaagtgcagctcccgcgctttggcgtagatgtcgccgggcaggatgttgtcgagcacgacgttcttgatgaagttcgtcttgtcgaatttttcgtcgtggtactgcttgatgctctgcaggctgatggagagcatggcggcgaactgctcggcggtagtgtcagtgccctcgacaaagacagcgtagtcattgtgcttggcgttggagaactgatggtaggcatacccatcgcgcacgaaagcatccccggccgtctggcggacagcggccacgccctcgcgcacctcaccgatctgtcccagctcagagcaggaaatgacggtgccggtctcatcaatcacgccgacgacacgatccactgcgtccttcatctggtagaccacgttctggaataccctgtttgccataatatgtgactccccttttagctgttatttagacagtctgcaccggtgtgcagtgcgggctatgcgtgtttggcaaaattgccgtttggtaatctgcctgaaaaccaaaacatcataatgtatattttacacaatccgcttggcttttgcaacatattttcacgaaaatcgcaagattttcttgtacattttttaaatcagcacaaaaaatgtacctgccggtgttttcccggcaggtacaacgtccgtcattttgacgatttttcctcttttgtctggttcatggcaccggtgccaccctcgacgacgccgcggcgctggaatacataggtgatactgcggaagaaaatctttacatcattccagaatgtcacatgggcagcgtactcaccgtcgtagcgggctttgacgtcaatcggcagctcgtcgcgtccgttgacctgcgctaagccggtcaggcccggacggatgtcgttggcgcggaccttgtcgcgcgcctcgatcaggtcgtactggttgtacagtgcagggcgcgggccgatgacgctcatctgccctgccagtatgttgtagatctgcggcagctcgtccaggctcgtcttgcgcaggaaggcaccgctcccggtaatgtagctgtccgcatctttcaaaaggtgcgtgggaacgtcgtgcggggtgtcgccgcgcatcgtgcggaacttcaggatgttaaagtgcgttttgcccttgccgacgcggcgctgcttgaaaaagaccggccccggggagtcgagcttgatccacagcgcgaccagccccatcggaattgcaagaatgatcgtggctgccagtgaaaggataatgtccagcaggcgcttgccgtaacgctcgtacataaatcagccctcctcggcgggatgctctgtctcccggagcttctgtgcaatctcctcccgggagaaaagcgcggtgttgccggtggcggccacaacggtgtggtcggcgcgcacgcggcggttggggtggtaggtcgggaccatctcctgcagaacgtcgacgacctcgtcgctgttgtgcagggcagagtccttgagccgctgcaggtcggtgtagaatttttccagatcgatctgcatgggcggcgcgatgaagattttgttgtgggcggttttggccatcttgtcctgctcggagtccatgagcagttcctcgtacagcttttcgccggggcgcagaccggtgaccttgacctgcatatttacgcccggctcgtagccgtagaagcgtatcaggcggttggccagatccatgatcttgaccggctcgcccatgtccagcacgtagatgctgccgcccttcgccagaccgccggcctgcagaacgagctgcgcagcctcggtgatggtcataaagtagcggacaatatcgggatgcgtgatggtcacagggccgccgcgcttgatttgctcctcaaacagcgggatgacgctgccgtggctgcccagcacgttgccgaagcgcaccgcaacgcaggtcatcgacgtggcccgggagaaggtctggatcagcatctcgcacaggcgcttggtgcagcccatgacgttcgtcgggttgacagccttgtctgtagagagctggacgaaccgttccacgccgtgctcggcggcggaggtcagcaggttcttggtgccaaagacgttgttcttgacggcctcggcggggctgatctccatcagcggcacatgcttgtgcgccgccgcgtgaaagacgacggacggatgataggtgtcgaacacatcgtccagacgtgctttatcgcggatggagccgatgagggtgataacaggagcctcggggccgtacttgtttttcagctcggtttccagctcataggcgcagttctcgtagatgtcaaaaatcagcagacggcggggctggtagcgcatgatctgacggcaaagctcgctgccgatggagcctccgccgcccgtgacgagaacgattttgtcatgcaggtactcggagatctgggcattgttcagctggatctcgtcgcgggagaggaagtccgccgtgttcagctcacggaagcccgccgccacaggattgccgttctcgtcaacagcctgcgggtcactgatcatccgcacgcggcagtgggtggagttgcagaggttgatgatctcgctcaaacggtcacccttgaccgtcgtgatggcgatgacgatctcgagaatatgatatttgcgcaccagctccggtatgtcggagatcgtgccgcgcaccggtacgccctgcacgcgcaggcccttcttggtcaggtcgtcgtcaacgatgcagaccgggttgccgaaactctgatttttcgttttgcagaggttgacggcccacgcaccggcgttgccggcgccgacaatgagcaatggcgtgttgtcctccggcttgttggccttggcgttgcgcatcgtcaggaccagccgccacaggaaccgcacgcccgctatggccgccgtgttgaataccgcgccgaagatcagcaccgcgccggagatcgggcggctgtggtagatcagatcgaacagcatgatgatgcccgttgccagcccggaaaggcaggtcaagcgtgcaaggtcgcgcataccggcgtactcccacatgatctcatacagtccgccgaaccagaacacgatcatataaatgggcaggacgtataagagcatcggggccatggcgcgcagtatctccacgcggcggtaggcgtcgccgctgtcaaagcgcagcatgacggccagccagtagcaaagtacaatgagcccgcagtccagcagcatcagtgcgatgcggcgcggaagcccttttatcagttgttttgagacctgttgcatcgattccatccttactatacgttcttctatctgaaaacgggcgcaatacggcccggcaaaattgtcatatagactattataacacaaaaaggccccatttgtcctacttttgggcagacaaatggggctaatattgtataaaaatcgtggtaaatttttggtaaaacagacgaaagcgatttactcgacggtcacgctcttggccagattgcgcggcttatcgacatccaatcccttggcgcagctgacgtagtaggccagcagctgcagcggaatgaccgacaggctcgtggcaaagtgcgggtcagtcttgggcacgtaaaccgtgaagcccgcagtgtcctcgatgctgtaatttccgtaggtggtcaggcccatcaggaaggcaccgcggctcttgacctcgaccatgttggaaacgctcttttcaaacaggtccggctgggtcaggatgccgacgaccagcgttccattttcgaccagagaaatcggcccgtgcttcatctcgcccgcggcgaacgcctcggagtggatgtagctgatctccttaaatttcaaactgccctcgagcgcgacggcgtagtcgaggccgcggccaatgaagaaggcgtccttggcgtttgcgtacttgctggcaaaccactggatacgttccttgtcggccagggtcttttcgatcttctcgggcagagcctccagctcggtgacgaggtgctcatactggccgtccgccagcgtgccgcgcacacgggcaaactcggtagccagcaggtagcaggccgccagctgggtgctgtaggctttggtggtagcgacggagatttccgggccggcccaggtgtacattgtggcgtcggcctcacgggcaatgctggagccgacgacgttcacaatgccgatggtgcgcacaccgcgctccttgcacaggcgcagggcggccagcgtgtcggcggtctcaccgctctggctgatgaccatagcgagtgcgtccttttcgagcacgggattgcggtaacggaactcgctggcgacatcgacctcgacggggatgcgggccaggctctcaaacacatagcgcgcggccatgccgacatggtaggcggagccgcagccgatgatgtagagacgatggacattcctgatggcctcctcgtcaagggccagctcggacaggtcgatctggccgtccttgaggcgcggggagatcgtatcgcggacagcggcgggctgctcgtagatctccttcatcatgaagtgctcgtagccgcccttctccgcggcctcggcgtcccactcaatggtggtggactcgcgggtgatgggttccttgtcgatgttgaagaactcgatggagtcgggggtcaggcgggcaatctcgagattgtcaatgtagtagaccgtgcgggtgtacttgagcagcgcaggaacgtcggaggcaatgatggcaccgtcctcgcacttgccgacgatgagcgggctgtccttgcgcactgcgtagatgacgccgggctcgtcggcaaagagcacgcccagcgcgtaggagccacggacatgcagcatcatgcgggtgatggcgtccagtgcgttgcctgcggactcgcccatgtaatagtagtcaagcagctgggcaacgacctcagtgtcggtctgggagacgaagctgaagcccttgttgatcagacgctccttgatctcctgatagttttcaatgattccgttgtgtacgacggcaatcttctggtcacgggaataatgtgggtgtgcgttgacgacggacggctcgccatgggtcgcccagcgggtatggccgatgccgcagctgccgggcacggcgctgccgccgtcggtcatctcgctcaggacctttaggcggcccttggccttgacgacctcgatcttgccggcagcgttctgcaccgccataccggcagagtcatagccgcggtattccagcttggccaagccgtccagcagaatgggggcggcctgtgccgcgccggtaaagcctacgattccacacataacaggtatcctccctttgttacagcgttgaaactatactttccattttattggattagagcaaaatacttctacagtatatgccatttgggtacaaatgtctatagctttacgcggattttgtacagatgtgcgcagcacaaagacaaaacgggcagccgtcaagggctacggctgcccgctgcgcgcattctccctttccggtttcttacaccatataagaacgaatcaaaagttatcgcgcatttattagcatagcacattcccggaagaatagcaagtgcaatctgtatacaagagaacattttgcacgttttgcaaaagaatctaaagtacatgatgcaattactttcggaaattagtcactgacccgacgcgctacgacgacatagcgcccgttggcggacgaatactcgcaggtagagagggtcagcagctgctcaccgtaggcagggcggatgccgctgttcacgtcgctgcgagagatgacctgatccacatagcggttgtaggcgtcctcgtccatgtcgatgtactggttgtagataaacgaggtgtcgttgacgacatcgatggtgaacgcaccgaacacctcatacttggcgtccccgtagacggtgtcaaactcaatgaaggggtgctcctgatagtagtcggccctgcggtactcggtcaggcagccgaagatcgtgccggttttcatattgtggccgtagatgatcaggttgtcgctctcggcgttggccccgagcgtcgtttgctcgtccaggtacggtacgccgtagacgctgtaggctttgttgaagtcatgacgcagatagaagtccttgttgtccggcgcgtacataaccggaaaatccagattggtgccgtcgatggagatccagccgataaagtcgctgttcttgtcgcgcagggcagcaaacctggcaccgttggggttgacattctcccctgcaggggccggggtcgccgcggtatcgatcatcgactgaaggtcggcaaactcgctctcggtcttgcggtcatcgaggaaccgcttgaccagcaggccgccgctgatgaggaagatcgcggcgaaaacgatcatcgcgagggtgtacagcagattaccgcgcttttttttgcacttcgcggtctcgcgccggcgatagtcctcgtcgttgtcctggtcgtagaaggccgcaggttcctgcggagaaaccttcgtcagatcggtgactgtataggatgcctttacctgaacggaaggggtctgcggcagcggtgcatcgctgcggtgaatctttgccatgatggattctcctgtaacacaatactatctttaggcaataccgcacaattcccgccttacggcttaagcaccgctccggcggctgcggcacggcatctgcgttgccaaaatgctcgataatacacaaagtattatctgcgcttttggcttagcagctgccgcacctcgctcgccgtatcggcacttagaattatgcggtattgcctttactatacaacctgcgcggcaaaaagacaagggaaatatcacacaaaaatctgtaaaaaatatccgtcccgcaccgtgcggcgcaggacggacagcataaacagattactcgcggatctcgatgccgagcttgaacttcaggttgccgagaattttcttgacgaagcggtcgatctcatcgggggtcagcggcttgtcagcgggctggaaggacaggctgaacgccatgctcttcttgtccgcgccgagcttttcgccgcggtagatgtcgaacagctcgaccttggtcagctgcttgcaggcgcgctgcatctcggtgacgagggtgccgcactccatgctctcgggggcgacgagcgccagatcacgctggaccggggcaaactcggggatgggctggtagtggatggcggcggggaccagtgcgtggaacgcgacccagtcgatctcgcccagatagatgttcaggttggcgcggctgtccttgggcagcttgagctcgcttgtcacatcattagccagcttgccaaagacaccgacgcgctcgcccttgcacaggatataagcggcaataccggggtgcagccaggcaacgtccgtcgcgcgctcgacggtcagttcgacgccgaacgcagcgccgaagctctcgacagcacccttgactgcgaagaagtcctcctcactgccccaggcagcaaagcccagatgcagacgctcctcgggcagctcggtgacgggcagctgcttcgggatgtagatgttggacatttcgaacagacgaccctcggcgttgcccttgcgcaggttgtcgacgacgacattcagcagggacggtgccagcagcgggcgcatgatggtcagatgggaggaaatggggttcaggatacggatgaccttgcgctccggcgcgtcggcggcaatgtgcagcatgtcaaggtcagcgtcggcgtagaaggccagcgtctcggcctcgtagaagccctgggcacacatggtgcgcttggccttggcctgcgccttctgctcggcggtcaggccgccggtggtgacagtggcagccttcaggaaggtggggacgatgtgttcatagccgtactcgcggatgacctcctcggcgaggtcgggctcaccgacctcgatgtcctcacgccagcggggcgcgacgacctgcatcgtgtcgccgtcggcttcgagtttgacctcgaactgcaggcggttcaggatgtccagaatcacatcggtgggcacagtgatgccgaggatggcattgataccgctgaccttggccgtgaaacgcttgccctcacgcggggcaccggcggaacagtcaaaatgggtggaggtgacctcgccgcagcccagttcctgaatcaggtgcagggcacgggccatgccaagctcggtggtgtactcggagatacccttctcgtaatggctggaggcatcggtgttctggccgaggccgcgggccgtcttgcggatgttgtcgcgggcgaacttggcgctctcaaacagcagctgggtggtggtatctttaatttcgctgttcaggctgcccatgacacccgccagcgcaacgggcttggcgccgtcgcagatgacgaggttgttgggcgtcagggtgaactctttttcgtccagcgttgtgatcttctcgccgtctttggcgcggcggacaaggatctggcagctttccagcgtgtccatgtcgaaggcgtgcatgggctggccaatctccagcatgacatagttcgtgatgtcaacgacgttggagatgctgcgcagaccgcacagggccagctgacggcgcatccagcgtggggactcgcccggcgtgatgttgcggacataatggccaatgtagcgcgggcagagatcctcggcctcgacgctgatggacaggcgcggatcaacacagtcgctgaccgtgtagtcggtggcgggcatcttgaggggcttgttcagcactgctgcaacctcgcgcgcaatgccgagcacactctggcagtcggcgcggttggccgtgatggaaatatcaaaaatgtagtcgtcaaggccgacgacctgctgaatgggcgtgccggggacagtgtccttcggcaaatcgagcaggccgtagacctcggcaccggggtacagatcatcgttcagacccagttcctcaccgctgcacagcataccgttggactcgacgcccatcaggggcttcgccttgatttttacgccgccgggcagcgtggagccgtcgagtgcggcggcggtgtgcataccggcgtagacgttgggtgcgccggtggaaatctggatgtcgtggccgtactcgccgcagtcaaccttgcagatgtgcagatgggtgccctcctgcgggacacactcggtcacaacaccgacaacgaccttggagatctcgccgccgaggtcgatcagctcctctacctcaaagccgcagccaaagagcttgtcctcaagctcctgcgcggtgacgtcgatgtcaacatattgcttcaaccagctgaatggtactttcatactctgtactcctcccctgtcaatcctcgaactgcttcaagaagcgcagatcgttttcaaacatcagaccgatgttgttgatgccgtacttcagcatggcgatacgctcaatgccaatgccgaatgcgaagccggagtagacgttggggtcaatgctgcagttttccagtacgctgtggtggacgacaccggcgccgagaacctcgatccagccggtgtgcttgcacagcgggcagcccttgccgccgcactcgaagcaggaaacgtcgacctcgacgctcggctcagtgaacgggaagtaggacggacgcaggcgggtcttgacgtctgcaccgaacagcgcctggacgaatttgtcgagcattccctgcaggtcgcagagcgtgatgcccttgtcaacgacgaggccttccatctggtggaacatcggagagtgggtcgcgtcggagtcggaacggaacacgcggcccggggccagcaccttgatggggggcttttccatgtccatgacgcggatctggccgccgctggtctgggtgcgcagcacaatgtcgtctgcgacgtagaacgtatcctgcatgtcgcgggcgggatggttcttcggcacgttcaggcgggtaaagttgtggtcgtcgtcctcgatctcggggccctcgtaaatctcaaagcccatacctgcgaacacatcgatgatctcattcttgacgagggtgatcgggtgcaggctgccggtttggcgaatcttggcgggcatcgtgatgtcgacggtctcggcggcgttgcgggcctcgagcgcggccttttcgacctgctcggacagggcttgatactgtgcctcggcccactgcttgaactcattgatggtcttgccgacggcgggacggtcttccttggggacatcgcgcagactcttggtcaggcccgcgacctcgccgttcttgctcaggtatttctgccagaagtcagaaagccgggctttgtcggtgacgtctgcgctggcctgctcaatggcggcgcgcagctccttgattttttcttccatagtacacctctgcttgaagtagggccggagcaaacaaaaaggctccgtccctgtgttgaatcagggacgaagccttgcaaaatacaattctccgcggtaccacccgtgttccgcgctgtaaagtgcggcactctttgctgccggtaacggtgcagagccgttgcgcactactcggccttggcctttcccgcgcaccactcgggagcgaacttccgcataagcgctttacaggcggcttgcagccggtgaccgccctctcttgcctaaagcagcttgtgcgtactttctccgtcgctgtgtttttgcgaatacttatttagtatagcgcggtttgcgccggctgtcaagcctgcggcagcggatacttctgcttatcctccacgctgatggccggaccgagctgaacctcgatgattttcagctcgctgtcggcaaagactgtgtggcggcagccggcgggcatcgtcaggatatcccctgccttcacatcgcggcgcacgccgtccagaatcgcatggccgataccggagatgacggtccagacctcgtcgcggttctcatggctgtggtagttcatgccgtggccgggggtgagcgtgatcttgatggtcatgctcgcgtcctcgacgtcgagcacgcggaaggaaccccaggacttttcggcaaacatgatctgctgatggatgctgtccacatacggcttgatgtagctggactgctccttgtcagagaccaaaatgccctccgggctggccgagacgacgacgtccttcagccccatgcagagcacgggcacgtccagctcgttcagtacatggacgttctggcaggtgtcgttcagcatggccttgccgatgctcggctcctccatggcctcggtcagggtgttccaggtgcccatatccttccactggcccgcaaagcgcatcacctgaatttggaactcattctcgacaacggcgtagtcgaagctgatttttttcagcgtctcgtacttatcgaacaggtccttgtaatcggtgaaatcgatcagttcgtgggccttgtccagcatgtagcgcagtctgtaggcaaacacaccgccgttccagagcgcaccctgggcaatgtacttttcggcggtggcggcgtcgggtttctctttaaacgttttgaccgggctgacggcatcggcactctgcgggataatgtagccgtacttttcgctcgggtaggtcggctcaatgcccatcagggagaggttcgcgttcccctgcccggccagctcggacagcgttttcagcgcggcgaaatagtcattgttgacataggggtctaccgggcagacgacgacagcctcatcaaggccgacgtccttgacgtcgtgcaggtaggctgtcgccagtgcgatggccgggaaggtatcacggcggcacggctcgacgcagacgcccaccgaattgcccagctggttgtgaatggacgatacctgcgtcttgctggtggcaatcgtcacgctggcgtcggcgtcgacctccttgatctggcggtagacgcgctggaccatcgactcgtacccgtcggcggtcttgaagattttgatgaactgcttggaacgaatgtcgttcgacagcggccacaggcgcttgccggagccgccggacagcaggatgatattcatagcgtttcctttcagcgctcggcgcgcatcgggttgttcagaaagtcctcataggacaggcgcaggccgtcctccagctcggtcttgtaggtccagccgaggttcgtcgccttggagacgtccagcagcttgcggggcgtgccgttgggtttggaggcgtcccactcgatcttgccggtgtagccgacgaccttggcaacgagttcggtcaattctttgatggtcagctccttgccggtacccgcgttgaccgtctcgttgccggagtagtggttcatcaggaacacgcagaggttcgcgagatcatccacatacaaaaactcgcgcagcgggctgccgtcgccccagcaggtgacgctctcgacgccgttgaccttcgcctcatggaagcggcggatcagtgcgggaaccacatggctgtgggtcgggtggtagttatcgttggggccgtacaggttcgtgggcatgaccgagatatagtccgtgccgtactggcggttcaggaactcgcagtatttgaggccgctgattttggcgagggcgtaagcctcgttcgtcttttccagttcggaagtcagcaggcagctttccttcatcggctgcggagccatgcgcggatagatgcaggacgagccgaggaactccagcttcttgcagccgttctgccaggcagagtggatgacgttcatctcgagcgtcatgttgaaccacatgaaatcggccagcgcctcctgattggcgacgatgccgccgaccttggccgcggcaaggaatacatactcgggcttttcctcggcaaagaatttttcgacattttcctgacggcagaggtcaagctccttgtgggtgcgggtgatgatattgttgtagccctggcgctgcagctcacgcacgatggcgctgcccaccatgccgcggtgcccggcaacgtagatttttgcatttttgtccatcataataagttaccctcttttgaataaattatttgataacgcccttttcgagatactcagccaggttcgttttgatgtgctcctcagcgcgctcgacggcaaccttcttcatgtcgtggtcgaccatgatcttgacgagctgctcaaacgtggtcttagtcgggttccagcccagctcgcactttgctttggacgggtcgccccagaggttgacgacgtccgtcgggcggtagaagtcggggctgacctcgatgaccgtcttgcccgtggccttgtcgatgcccttctcgttcatgccctcgccgacaaattccagttcgatgcccacatcgtggaaggccagctggcagaactcgcggacggagtgctgctcaccggtggcgatgacgaagtcctcgggcttgtcgttctgcaaaatcagccacatgcactcgacgtagtccctggcatagccccagtcgcgcaggctggacaggttgcccagatacagcttatcctgcttgccctgcgcaatgcgggcggcagccagcgtgatcttgcgggtgacgaaggtctcgccgcggcgctcggactcgtggttgaacaggatgcccgagcagcagaacatgttgtacgcctcgcggtactccttcacgatccagaagccgtactgcttggcgacggcgtaggggctgtaggggtggaacggtgtgttctcgttctggggaacctcctcgaccttgccgtacagctcggatgtagatgcctgatagatgcggcaggtgtccttgagaccggacaggcgcacagcctccagcacgcgcagcacgccggtggcatcgacgtcggcggtgaactccggcacatcaaagctgacctgcacatggctctgggcggcgaggttgtagatctcgtcgggccgcacggtgctgacgacggagaggatgctcatggagtcgctcagatcgccgtagtgcaggtggaagtgcgggtgaccctccagatgggcgatgcgctcgcggtaatcgacggaggagcggcggatgacgccgtggacgtcgtagcccttttccagcaggaactcagccagatagctgccgtcctggccggtgatgccggtgatgagtgcttttttcataggttactaccctttcatctgtatcttgcgcagcgtactgcgcggattttcgtatcttgtttgttattgtaccgcattattttgcgcttgggcagtgggaatcttgcaaaagactagcattatattgacttttttggtatactgatttccgggaggtgacgcggatggataccccgctgtttgacggtgagcttgtgcacgcccggcgcatgatctacacgccgtcggcgtttgcaaaatcgaaccttgtgcatctgcaggaggtcgggcagctgcaggcacgcagcccccatgccagcacccggcaggggctggcctcctacctgttttttgtggtcgaaagcggcagcggcacgctggaatatgagggcgagacccgcgtgctaagcgccggggactgtgtgtttctcgactgccgccgcccctatcgccattatacgggcgatgacctgtggcagctgcggtgggcgcacttttacggcccgaatatggcagccatctacaaaaaatatcgtgagcgcggcggccagccgagctttcacccggaaaataccgccccctatacccgccgtcttgaagcactgtatacgctggcggcctctgacaattacgtgcgggatatgcagatctgcgagggactgtttgccctgctgacccttctgatgcaggagagctggcaccccgaaattgtgcgcactgcgggcacgaaacgacagaatgtgcaggaaatcaaggactatcttgacctgcattttgccgagaagatcacgctggacgcgctggccgagcggttttacatcaacaagttttacctgacgcgggtgtttaaggagcagttcgggctttcggtgacgagctacctgacgcagctgcgcattacgcaggccaagcgccttttgcgattcagcgataaaaatattgagactattgcgcaggaatgcggcatgagcgatgccaattacttttcgcgcatcttcaaaaaggtggagggcacaacaccgggccagtaccggcggcaatggtaagcaaagcgcaggagccatgcttgggcggcatggctcctgtgttgtttcattgtgttattttttcaagatgatccatgctgacccagccgtgccacctgccgtagagagtcagcatccagcaaccatcctcgctgcggcccagctcctgcagggcggtgtattccggcacaaggctgattttttcgtagcttgtgtccggccctacacgcagccgcaggcctccggctgcggtgacccgccaaaaggcgtctgttgcctttagctccttcggaccaacctgaaagcgcattttggcatcctgccaatgctccggcacgccgggcagcgttctgctctgccagtgtccgtcccgctgcagccagaggatatggccattccaagcggcccctgcataatcgcaggggatgtactccttcccggcggcgtccagcacaccccatttcccgtcacggcagatggcagcatacccattcagcaggggcgaggcatactttggcgtgtaatcctcataaaaatccaggccgccgtagactgcgtcatacacggcttgtgttacctgatttcccttccggtcaaggtaggcccatttatcaccgatcttgactggggccaggggctggtcataaaagcagcctgcggacgcataggtaatgccgttcagaaggtctccgtcagaattggcaaaaacaattccgccgccctcggctgtcgtataatagttcgggtcaccgtttccggatgtccacacactccgcacacagggcagataatccccatacagagcatcgccatcgttcagttcggcagcaccgcccatcatgccggcgcttttgcatacgcggccggtgttgatgtcataggtccatgtatagctctgcccgtcatgctcaccggtgcagagcgtgccggcattttcggcggcgagcgccgcctcatagctgctgcgctccgcatcatccatcggggccgaggtgctgagaaaatgccagcgcagacagccgttggggcagcgttcgatcggccggtcggagatacagggcagcaggacggtgccgtcacttttcatcaggccccattttccgtccatgtacatcgtataatagccgtctgtggcaagcccgtcctgcgccagcagctggccgcttcgggtatcctgctgctgcagctggatggccgtatattcactggctgcggtttcatctgtttggtcgggctggctggtcggggcagtttccggtgtcttggcgggcgttgtcgtcggcgcaggtgtgccgatcacatcagccggccgtgacgcgcagcctgccagcagcagtattgcaagggcgcaaaggatccgtttcataggtaccccctgtgtatagcagccaaatcattcccgggcgtttttcagctcctcctcgatgcggtcaaaccgctccaggaacgaatgctccacaccctcggacttgtagccgggcattgtgtcgagcgatacagcgtggatgctgcggaagatgctgttttcgatgttcgggttgtcgcgcatcaggcggcgcagcaggaccttgacctcctgacgcttggagccgcctccgccgttgtcgcagatcgtgcaggcctcggtaaaacggcaggcacactggataaattccagctcattgtagcggcgccacgcgatgatgtcatcctcgcggatgcagtacatcgggcggatcagtgtcatgcccgggaagttcgtgctgtgcagcttcggcggcatggcctgcagctgggagccgtagaacatgctcatgactgtcgtctcgatgacatcattaaaatgatgtcccagcgcgattttgttgcagccaagctcctgcgctttcttgtacaggtggccgcggcgcatgcgggcgcagaggtagcagggcgacttatcactgttgttggcaacatcaaagatgttcgtctcaaatactgtgatgggaatgtgcagcagcgcggcgttgctctcgatcttctggcggttgatttcattatagccggggtccatgacgaggtagacgagctcaaacggaacctcgctgtggcgctgcaattcctgcaggagcttggccataagcatcgaatccttgccgccggagatgcagacggcgatcttgtccccggcctggataagctcataccgcttgacggccacgatgaagggcgtccaaagctgcttgcggaattttttgataatgctgcgctcgattttttgataggtctctaattggcgttccaagggttaattctccttattcgtcagggttttgtagcaggtgtcaaaggcttgcaggaagccgtcaatctccgcgtcggtggtcaggtggctgatgctgatgcgccagctggacagcgcgttgcggcgatcccggctgacggcgaacacggccttggacggcagaccgtccgacgagcaggccgatttgaccgacacgcagacgccctgttcgctcagcgcctgctgaaaccgcgtgcccttgacgccggtcacgctgacattgacgatatgcggcacagcatgcgaggggctgttgacgcgcacaaggctgtattgctgcaagcccgacagcaggcggtcatgcagcctttgtacatgggcgttgcgggcgtcctgcccggccagtgctttggtcagtgcggcgtccaggctgacggcaagacccagcgtcggcgtgccgctgcggtagatcgtggtgctggcaccgccggaaatctgcggctcaatgacgaggccgcggcgcttgtacagcgcgccgatgccgttggggccgtagaacttgtgggcagtgaagctcatcgtatcgacgccgtcaagccagaggtcggtcttgccgacggcttgggtggcgtccacgtgcaggcgacagccggggtacggcttgacgattccggcaatctcccggatgggctggatcgtgccaagctcactgtccacagcgcagacggcgaccaggatcgtatcgtcgcgcatcaactcccgcagctggtccaggtctaccctgccgtcgcggccaatgtccagcaggtcgatctcgtacccctgctgctgcaaagccgacagcgacgcgcccaccgaggagtgctccagctgggtggagatgatgtgcttgccgatgtgccgcgacgcatgggcaatgcccttgagggcgaggttgttcgcctcgctcgcgcccgaggtgtagatgatctcggcgggctgcacgccaaggtgctgcgcaatggattgggtcacccgctccatctcggcgcgggcctcctgcccggcaatgtgggtagagttggggttagcgatataacggcgctccgccgcaaggtatgcgtccagaacctcggggtctgccggggtgttggcggtatagtcaaggtaaatcatgcggaagcctctttatagaatcagtatggcaggtgcggtttcctacccgctcaataggaattgcattcatgcaaaacccctgcggcacggcaggggtttgtgtcattcaaaatccgaaattgtgacagactgcttgccaaagtacggcgtcagcccccacatatcggggccgggcgcgacatcggtataaaacagcagccacgggcgttcgtcatcgttcagcgggcggatagaaacatccggctgggcggcgtcgttcagcagtgcctcccgcgcgtcgagggcgtcagcgtagcgcctggcgctgccattggccaactcataagcggcctcgagactggtggcgaagtagctgtcctggccctcctttacggtgtggctgccgatgcaggccatgcagaggagcatagcggcggcaagcagcggcagacggcgggcctggcggcggcagaactgctctgcaccatgcagagaaacgccgcgcacgcgctcgagccagccgagcagcaaaaactcggtggcagtcagacccagcacaaaggtcatccagacaacgttcaaaagccgcccggcaccgatgccgcccattgtgtaggatggcagaaagatcatggcccacatcagcacaaaggtgaccgccgcgccgagccacggatggcggaacacccggtccgaaagcacagcgctgcgggtcagatgcaaaagcggcagtacaagcagtgccagcagacagagcagcggcacatccagccagcggatccactccatggcggcgaggataaagctcttgacgacagcctccgcaaagcccgcaccggcaaagcctgcagtacgcacctgcgttccgggggccaacacattcaaaagcagccccgccatggccgcggccagcgcggggacctgccagaaattacggcggcgcacagcgcagagcgccgcggccaacagcaggatcagcacgttcagcagcccggccacctgatgcccgccgccgatgacaagactgcacacacagcccgttgccgcatagaaaaatttgcagcgggtcggcagcttatcggcaaagcagagcgcaaacgccagcccggcgttcagcacggccagcgaaaaatacggcaggtagttcatggcaccgttgaaccagtacaatccctccacgggggcgggcatgccttcgataaaggcgaaggtcagcagcagcgccagtgcccagggcagacgcctttgcgctgggtccagacgcagcaccacgcaccgtgccagcccatacaggcagaaaaacagtggcagcagcacgcagaccagcgtggcaccataatatttgttgccgaagatggcgggctgaaacgccagcgtaaagccggaaacgtagagcccctgccagttttcatagtagtagacgttggtgtcccacgcggcccgcagcagacgcgccaggtcaaggccgtactgctgcaccacggcatgggtgcgggcggcgtagatgaagtcatctgccgaggggcgcgcaaagaccgccagcaccagcacgggcagcagcagcacgcccgtcagcagcgcaaagcggcgcagccagcgcttttgcgccgctgcatcgtgccaaaaatccatagaatcgtgttccttactgtattcgttatgcgtcgcccagggtcatctgcaggaagtagacccactgcttctcccaccagtaccagtcgtgggagacatcctggccccagatgtccacgatgggatggatgcccttgctctcgagaatggcctgcagctccttcgtggaggccagcaggtcagcttcccacgcgccctggccgcagcacataatgaacttgtcggccttctcaaacagcttcatgtaggggtgagtcgtcgggaagttgcgcatgtaatcgcagggagaattgcggtagacaaggtcgtccatgtagctgccgaagaacatgccggaggagtacaggccgctcagggcaatcgtgccgttgaagatgtcggggcggcgcaggtagaagttgacggcgtggccgccgcccatgctggcaccgccggtcaggatgcagcctgtgtggtcctcgccctgctcgcggttgatctccagcagacgggggacgaactcctcacagatataattgtaccagcgctcctgcatctcgatgcgcgggcgctcagggccgttattgtcccagctctcggggtcgatgctgtcgacggtgaatatctgcagcttgccgctgtcgatccaaggggccgccgcgttgcacatattacggtcctcccagtcgaagaagcggccgctctggcacgggaaaatgacgatggggcgtccggcatggccgtagaccttaaactccataaaacggttcagaaaccggctgtactccttgtaatagcggatctgcatggcagtcccctcctatttataaaagaaatttttattcagttccagcaagccgaccatcgcatgcatcggtccgctggcggacgttttgaatacccagtagtagagcagtgccagtgcctcccgcagatagcatggcagcacactgcgcagcggcgttgcagcgggcagtgcagtggctttggtgaagcccgccagggcggcgtatttcccggcgcggtagcagtggaacgcattggaaacgtagacgatgggcgttgtcttatcaaagccatgctcccgcaggatggtcagtgagaaggcaaagttttcctcggtggaggtcgagccggattcggcaagcacgcggtccgcaggcagtcctttggcaatcaggtagtcccgcatggcgtcgccctcgggccgccattcgtcgcggccctgcccgccgctggtgatgaccagtatgtccgggtgggctgcggcgtagtcatacgccttattcaggcggcattgcaggagcttgctgggcttatccttatgcagcccggcccccagcacgataatgaccctttcgtcccccgtgggcgggttcatatagccgctgaccgacacaaaggcgatcagcgccagatacaccccggccagaacggccagcacccagaaaacgacccgtcctgcgcccgcggaaaaccacaggttgagcgggcggcggaacacggcgtacccggccacgcaggccgtcagcagccagaccatcaggttgcccatgttgaagttggacagaaaaaccagcgaaaccgaatagaggaccagcactgcggccagcaggtccagcacaagcacgcccaccttagcgggcaatttcatcataaacaccgcagcccgccgggcagtagtcaacgcccagcgccttgcagacagtgtcggcaatcgtggcgaagctgtagcgggtgtgcaggttgacgccgggcttgacctcgtcgccgtaaatcaggaacggcacgtgctcacgggtgtggtcggtggtcttggtgtagctggggtcgcagccgtgatccgccgtgaccatcaggatgtcacccgggcgcatttttgccataaagccgggcagccagtcgttgaactcggcagcggcggcggcgtagcccgcaatgttgcggcggtggccgtagagcatatcaaagtcgacgaggttgacgaaggccagaccctcaaaatcgcggtccgccagatccagcgtgacctgcaaaccctcggtgttgccggaggtgcggatagtctcgccgatgcccttgcccgcaaagatgtcgtggatcttgccgacaccgatggtctgcttgcctgcggccaggatggcgtcgagcatcgtgtcgtgcggcgggaccagactgtagtcatggcggcgcggcgtgcgggtgaagttggcggcgcagtcgcccacgaacgggcgggcaatgacgcggcccacgccgtatttgccggtcagcagctcccgcgcctgtgcgcagatctcgtacagcttttccacagggacgatggcctcgttcgcagcgatctggaacacactgtcggcggaggtgtaaacgatgagtgcgccggttttcatgtgctcctcgccgtagtcgcggatgacgtcggtgccggaatagggcttgttgcacagaaccttatagccggttttggcggtgaacgcatccagcagctcctgcgggaaaccgtccgggaaggtgggcagcggttcggcactcagcaaacccgcgatttcccagtggccgatggtcgtatccttgccggcactggcttcacgcaggcgggcatagctgccgatgggggcggctgcgggggtgccgcaggtcacgccgtccagattgaacatgccgagcctggcaaggttatcacccctgaaattgggatgccctgcaatggcccccagtgtgttggtgccgacatcgccgaaaaggggcgcgtccggctctgctccgacgccgaagctgtcgagcacaatcagaaatacacgttttgccatgatgcttctcctgtatagtaagtggtaaaggactattcatggctttattataccgtaaacaccgcaaaaagtaaacatgcaatccatgcttgcaaatcggacccgccgggcacagaagaacgccggtggcctgtaagtcgggctgtacccgggctgtggcagaatttgcacggaacgagctgaaattgtgtaaaaattaacgggcagaaaggaaacaatttttgtgcgttttttttcagacgaaagccgttttcctcttgtctcccacggcggacttgtagtataataccgctgaggtttgctaaagtatataaataggtagaaatgtaaaacggaggataagctttatgcgtaaaaccaagatcgtctgtactatgggtccgtccaccgataagccgggcattctgcgccagctgatggagaacggcatgaacgtcgcgcgtttcaacttttctcatggcgactacgaggagcacaagggccgctatgacaaggtacgcgcactgtccaaggagctggacctgcccattgcctgtatgctggacaccaagggtcccgagattcgtctgggtgagttcaagaacggtgtggagaagctgaccaccggccagaagttcaccctgacctcccgcagcgtagagggcacgaacgaaatctgctccgtcacttacaaggagctgccccacgacgtcaagcccggtggccggatcatgctggacgacggtctgatcgagctgcgcattgacgaggtcggcgacaccgacattgcctgcacggtctgcaatgacggcatcatcaagaccaagaagggcgtcaacgtccccggcgtgcatctgtccatgccgtatatgagccagcgcgacacgagcgatattctgtttggtgtcgagcagggctttgacctgatctccgccagctttgcccgcaacgcgcaggacattatggatatccgccacatcctggacgagcacaactccaagatccgcatcatcgcgaagatcgagaaccaggagggcatcgacaacatcgacgagattctgaccgtggccgacggcatcatggttgcccgcggcgatatgggcgttgagatcgactttgccgagatcccggccatccagaagcacctgatcgaccgcgccatgagcgccggtaagatctgcattaccgctacccagatgctggattccatgatcgtcaacccccgcccgacccgtgccgagatcaccgacgtggccaacgccatctacgacggcaccggcgcggtcatgctctccggtgaaaccgccgcgggcaagtaccccgtcgaggcgctgaaggccatggctacgattgccgagaccaccgaggcagactccagctttgacagtctggtccaccactccggtacggacaacagccgcctgaacatcagcgctgccgtcggccatgccgcctgcactaccgctacagacatcggcgcttccgccatcatcacggcttccaagagcggtgagaccgcccgcctgttgagccgcttccgtcctgacacccaaattatcgcctgtgtgctggatgaaactacccgctgccagctgaacgtctaccgcggcgttaccccgttgctgatggactacgcgacctccacggatgagctcatcagtatgtcggttgcgaaggccaagagcgcgggccttgtgcaggacggcgacctcgtcgtcgtcaccgccggtgttcccgtcggcatctccggcaccaccaacatgattaaggtccacatggtcggcgatttcctgctggccggtgtcggcatcggcagccacaacgccaagggtgaggtctgcgtatgccgcaacgccgccgaggctgccaagaagttcaaacccggccagattttggtcgtacccttcaccaccaacgacacgctgcctttcatgcgtgaggctgccggtatcatcaccgaggaggccggtacgaacagccattccgccattgtcggtctgacgctggataaggccgttatcgttggtgctaccaatgccacccgcacgctgaaggacggcatgacgatttccatggactgcgcccgcggtgttgtgcaggcgatggcgaagtgaggcggaccacgatggaacgtatcgcgagcttctgtgttgaccacactaggctgctgccgggtatgtacctgtcccgccaggacggtgctgacggcgagattttgacctgggacatccgcatgaagcagcccaacaagggcagctatctttcccccgccgcggctcacacgctggagcatctgttcgcaacctatgcgcgcaacagcaagtacagcaggggcgttgtctatgtcggccccatgggctgtttgaccggcttttacctgctgaccaccggcctgacgcccgccgaggcgcttgacctgacccgcagcgcctttgcctggatggcggagtacgatggagagattcccggcgcatccgccgtcgagtgcggcaactacctgatgatggaccccattgccgcccgcgccgaggccgccgccatgctgcccgtgctggaggggctggatgcggaaaagctgcactattgattggtagttcataaaaaatgtccgctgcggtaagaattgcagcggacattttttgtaggggcggatgcaggcatcgaaccctacacgcagaaaatttagtctatatcacaagaatattgcaatttccgcagggggtgcattctatatgcaccccctgccacacaaaaaactgccgcccgttttgtatatcgcgggcggcagttgctttttatgtagggattttaactcagatcagcgcggcggtgatcagggccatcttgtagacctcctcggcattgcagccgcgggacaggtcgttgatgggggcgttcaggccctggagaatggggccgtaggcttcaaagccgcccaagcgctgggcaatcttgtagccgatgttgccggcgttgatgttggggaagatgaaggtgttggcatagccggcgaccttggagccgagagccttcagctggccgacctcgggagcaacggcagcgtcaaactgcagctcaccgtcgaccttcagttcggggtgagcctcctgaacgcgggcggtagcgttgcgcatcttgtcgacggtctcgcccttgccggaacccttggtggagtaggacagcagtgcaacacgggggtcgatgccgaaaatctctgcggtgtgagcggtctcgacggtggactcgacgatttcgtcctcggagggatcgatattgatggcacagtcgcccatggcgatgctctcctcgccgcgggtcaggatgaagcaggagctgacagacttgatgccgggcttgcacttgatcagctgcagagccgggcggacggtgtcagcggtggagtaggttgcgccgcccagcagacagtcagccttgccctgcttgaccagcatagtgccgaagtaattgcccttggacagagcggcacggcactgctcatcggtcatcttgcccttgcgcagctcgaccatcttggcgaccatctcatcaaagccctcgtagttggcagggtcgatgatctcggcaccggtgatgtcaaagctgccgtcagcagcggccttcttgacggcttcgacctcgcccagcaggatgaccttcagggtcttgcctgccagcagacggcttgcagcggacagaatacgggcgtcggtaccctcggtaaagacgatggacttcggctcagcctgcagcttcttctcaaaattttcgaaaatggacattgtctgacactcctccagtatttatgcagcacatagctgcttagcacttacactgctattatagcacccattttgcgctttgcaaagaaaacgtgcgaaatggcagaaatctgtgcaatatatgtgcgaaaagagagagcaaggcaatataattcataaagttaataaaatatcaagagtggtttgtggattatttatcaaatttgcctgtgtacacaaagccgtagcttttgtaaaatgtctcaatatccgcacggctgcgcacgacaacggcgttcagcagatgaccgtccgctttggtgcgaaagccgatgaccgtctctccggtgcaggtactgctttccagcgcaatatccgtctcccgcatgccgtcaggcggcgtcagcagagcggcagactttttgtgcccggagaacagtgcggtaaaaaatgacacggcgagacacctcccctgcctggttcagcgcgtaaaataaacagccagcgccagctgggctgcaaggatcagcggtatgcccactacaaaataccagtggcgcgtcttgtgatggaacacgtacataccggcccatgcaccggcactgccgcccagcagggccgcgccaaacaggatcttctccggcatgcgccattgccgtgtgcgggcgcggtgcttgtccagccccatcaggcagaagccgatgacattcataataaggatgtaaatcattgcagtattcatatctgtattataccgtgtgcgggcgcaaaaggcaagcgcggcggggcgtatgagacactgacaacagtgctttgcggcgagttcgaaaaataaaacgcccccgccaaacggcgagggcagtcggattcaaatatccttgcgggcggccacgctgctgcgcaccaaggcacgccttaagcgggcctcggcaagctgcatgtcgcgcttgtccagattcttctgggccagcagtgcttcggcacgggccttgctgcgggcggcgcgctcggcatcaatggcatcggcccattcaaaggtcgttgccagcagatggcactcgccgccaagcatgctcagcataccgcccatacaggctgcacggcggaccgtgccgtcctccagcttaatatgagcctcgcccatgcccagagccgtgcagatgtcgatatgccgcgccagcagctgaagctggccgttgatggtgcggcaggataccgacgtgaccgcgccatcaaacgcaacgccgtccggcgtcatgattttgagcgggaaagttgccatacttccaccgccttactgctgcttggccttggccaggacatcatcaatcgtaccggcgaacaggaaacagctctcggggatgctgtcgcactcgccgttcaaaatcatcttgaagccacgcagggtctccttcagcggtacatactgaccgggcataccggtgaactgctccgcaacatggaaggactgggacaggaagcgctgcaccttgcgggcacgggccaccgtgatcttgtcctcctcggacagctcgtccatacccatgatggcaataatgtcctgcagctccttgtagcgctgcagcacctgctgcacggcgcgggcaacctcgtagtgctcctggccgacaacttcgggcgagaggatacgggaggtggagtccagcgggtcgacagccggataaatgccctgggaggcgatgtcacggctcagaaccgtggtggcgtccaggtgggtgaaggtcgtggcgggcgcggggtcggtcaggtcgtccgcgggcacatagacggcctgcaccgacgtgatcgagcccttgcgggtggaggtaatacgctcctgcagggcgcccatctcggtggccagcgtgggctggtagccgacggcagagggcatacggcccagcagcgccgaaacctcggaaccggcctgggtgaagcggaagatattgtcgatgaagagcagcacgtcctggtgcttgacgtcgcggaagtattctgccatcgtcaagccggacagggcgacgcgcatacgagctcccggcggctcgttcatctggccgtagaccaacgctgtcttgttcagaacgccgctctcgcgcatttcaccgtacaggtcgttgccctcgcgggtgcgctcaccgacgccggtaaagacggaatagccgttgtgggccgtggcgatgttataaatcagttcctgaatcagaacggtcttgccgacaccggcaccgccgaacagaccgatcttgccgcccttagcgtaggggcagattaggtcaacgaccttgatgccggtctcgagaatttccgtggcggactcctgctcgtcaaaggcaggagccggacggtggatgggccagcgctcgatgttctccggcgcgggctgctcgtcgacgggttcgcccagcaggttgaacacgcggcccaggcactcgtcaccaacgggcaccttgatcggttcgccggtatccacggcatccgtaccgcggacaaggccgtcggtggccgccatggcaatgcagcgcacgacgttatcgccaatgtgctgggcaacctcaacgatcagctttttgccgttgttttccagttcaacggcgttcagaagggcgggcagttcaccgtccctgaatcggatgtccagtacaggtcccatgacctgtacgacctttccgatgtgtttttctggcatagcacacactcctttagtgggctttttctttaagactccgcatcggcaccggccacaatctcggtaatttcctgggtgatagcggcctgacgcgcacggttgtagtacaggttcagatggtcaatcatgtcgcctgcgttcttggtggcggcatccatcgccatacggcgcgcgccctgctcactggcaacgctctcgcacagggcaccgtagacgacgcccgcgagatactcggggataatggcgtcaaagacggtctttccgtccggctcatacatcatcaggctttcgcgctcgtggcccggctcggggcgctgagcgtcaaagggcaggaccggcagcacggtggccgtctgggtcagcatagagacaaattgcgtaaaaccaaggcggatctcgtcaaactcccctgccaggaatttctggcagacgaggcgggaaatctcaaagcaatcgctgacagacaaatcccctgcctccgcgaaagcggtggtcaggatggctgccttgcggcgctcaaagtgctcgacggcctttttgccgatgggcagtacgcaatagtccgcgccctcggcgtccgcctcaatggccttgaggatattggagttgtagccgcccgccagaccgcggtcacccgcgataacgatatacaggcggcggttcgtatcccgcctggcaagatacgggctgtcgaaccccgagtccgcgctgacaatgtcatacagcgtgctgtagagcgtctcaaaatatgggcggctgccctcgacgcgctccttggcacggcgcagcttgctggatgccacaagctccatggccttggtgatctgcatggtgctttcgacgcttcggatacgcagcttaatttccttcatggaaccggccatcggcggcacctcctttgcagtttatttttctttgaggaattgggctgtgaagtcagccagcacctgcttgagctgctcctcggtttcgggcttcagatcgcccgtcgtgcggatggtctccatcacgcccgcggcggtgacgttctcgtccaggtactcatacaggcggcgctcatactctgcaatatcggaaacggccacatccttcaggtagctgtgaatggtcgcgtacaggatggcaacctgcttttcgacagcgacggggctgttgcggtcctgcttgagcacctcgacgatgcgctcaccctgggccagacgggccttggtgtcggcatccagatcagagccgaactgggcgaagccctgcagctcacgatactgagagtaaatcagcttcagcgtaccggcaacctttttcatggccttgatctgggcgttgccgccgacacgggaaaccgagatgccggggttgacggcggggcggatgcccgcgtggaacaactctgtctcaaggaagatctgaccgtcggtaatggaaatgacgttcgtcgggatataggcggaaacgtcgcccgcctgcgtctcgatgatgggcagtgcggtcagcgagccgccacccttggcgtcactcagcttggctgcgcgttccagcaggcggctgtgcaggtagaaaacgtcgccggggtaagcctcgcgtcccgggggacggcgaatcagcagcgagagcgcacggtacgcgacagcgtgcttggacaggtcgtcgtagatgatcaggacgtgcttgcccttgttcatgaagtattcacccatggcgcagcctgcgtagggggcgatatactgcaaaggcgacagctcggacgcggtggcacagacaacggttgtgtacgccatagcgccgtttttctcgagattctcgaccagcgttgccacggtagagcgcttctgaccgatggcaacatagatgcacagaacgtccttgcccttctggttgatgatggtatcggtggcaatgacggtcttgccggtctggcggtcaccgatgataagctcacgctggccgcggccaatcggaatcatcgagtcgatggccttaatgccggtctgcaaaggctgcttgacgggctgacggtccaggatgccgggtgccggggactcaatggcgcggtagtcggcagcctcgatggggcccttgccgtcgatgggctggcccagcgcgttgaccacgcggccaatcataccctcgcctaccggtacggaaacgaccttgccggtgcgcttgatggtactgccctccttgatgccttcatcatcaccaagcaggacgatggagacactgttttcttccaggttctgcgccatgccgtaggtgccgctctcaaactggaccagctcaccggccatacagttgtcaagccccgcggcgcgcgcaataccgtcgcccaccatcgttaccgttccggtctcggtctgctcaatggcattctcgtagtacttgatttgggaacggatgatgcgggaaatctgttcgggtttcagttgcactgtttggttcaccacacaatctatagaatgggtgcgattttacttaaaggactgcaccgtcgatttctgtacgcaggcgctccagatggcgctgcacggtgccgtccaggcgtgtgccgtccatgtcaagccgcagaccacctaaaacggcggggtccacagtctcggtcaggacgatgtttttgcctgtcattttctgcaattttgccagtagcttttcgcggctgggcgcggtcagcgcaatggccgatactgccgtgacctcaaggatattgtggtcaacattgtagcggtcctgatacgcgcgcagacagcccggcagctcacccagcagatcctcctcgcacagcagcttgagaaagctgacgaggtaggggtgggctccctcgaacgccttgtccagcagggcgcagcgctcctttttgggaacactgggcgtcgagagcagacgcaggtactgcggctcggcttcgatgctgtttaccgcggtgcgcagctgctgcaaaagctcgtctgtcagattttcctctgccgccagctcatacaggctgccgccgtagcgctttgctagctcggtcatgaggcatcccccacattcctgataaactcatcgatcagggcctgatggtcagactcgttgatctcacgctccacaaccttaccggcaatttcgacagccatgccgccgatctcgtttttcaggtcgttgacagccttcttgcgttcctgggcaatgtctgcctccgctgcagcgcggatggacgccgcctcagccctggcctcgccgacgatctcctcctcgcgcttctgggcgcgggcggttgcctcgcgcagcatggcgtcgcgttcatccttgatgctctgcaggtggtcggcgtactccttttcgagatccgcagccttctgtttggcggcatccgcgtcggcatacatcgtatcgatctcctgctggcggtcatcgatcatcttcttcacaggcttgaaaaggaactttttcagcactgcaaaggtgatgagcatattgcagaaggtaaacagcgcagtccacgggttgacgcctacaaaactttcaaagcccgtcatgagctattcctccaattcagcagtttaatcagaacacaaagagcagcagcagcgcgatgaccagcgagtaaataccggtggactcggtgatggcgcagcccagaatcatgttggtacgcaggtcgttggccatctccggctggcgggccatgccctccagtgccttgccgacggcgttaccttcaccgacagccgggccgatggcgccaaagcccattgcgataccagcgccgattgcgcaggcagcttttacgattgcagcttccatagaaatatcctcctaaataataaatacggattcaggcttcctccgggggcgggcaggcattgcccacgtacaccattgtcaacaggctgaaaacaagggcttgtacgccgccggagaaaatatcgaaatacaggctcaggattccggggacaccgacctccagatacggtacgcctgtcagcctcaaaagggagagtgcgccggtcacggcgaaaacgatgccgaagatcttgcgcgccagctttttcgtcttgacgccgctgtacaacagcgccgcgccgactgtcagaacgagaactcccacaatgacgctcttgccgaccagacccagcaccgccgcagaaacggtagccagtgccgagtagacaaggcttgtcaggacgcttccgcctgcaatgttgccgaagtgacggaacgccatcgagatcggctgtgcaatctcggaaacaaggttcattggggtcatgacgacgattggctcggtgaagcccttcagccaaccgccgacaccgttgcgcttgatggagcagccccagcagataaagcttgtcatcagcgcccaagtcaccgtcgtggacagatcagccgtcgacgagcggaagatgcccgtcatgccgatgaacgaaccgcagatggaactgaggaacagcgcgccgatgtagggtgtccaataactgttgtgcttgcccatcgtgctttcgaccatgtcatagagcatcgtcacgcctttttcgacgagcacctgacggcggcttggccgcttttgcaggttactgcccagcacgaccgccgctaggcaaagcagcagcatgacaacaaacgacgagaccgtcgtctgtgtgatgccgatgccgccgaacaacgggatggtaaagtagattttcggaccattcatggggtggaatcaccgtcctttgtcttttgtgccgcctggggatccgggcggaaaaagtcgatgagcttgatgcagatctgcgcaaagagcagcggcaggatggccgccagcgggtcacacagctctgcacgaaacagcaggatataaatgatgaccagaatgaccgggcggacgacgctcgacgtctgaatttccagctgcgccttctgcgggctgccgccgttggcggcacgattcatggcgttggagactgtgatgctcagcgagaggaagttccccatcgccatcacaaagccaattagagcgccgagaagcacagcgttggtaaagtgcccggtcagcgcatagaccgccagcatagcggcaatgcagagcgccacggccacagccaggcggcttgcctgctgcaatacatcacgatgcttttgcaagggtggactcccctttctaatgtcggtcaaaggatataggagatgttctttcgccgtcttttttggcagggcggccctgccggtccagcgcctgcagcgagcagcgcaggcagcttaccgcgaccagcaccccgaccacaacgccgacagctacgacccagccgcccaatgtgaaccgatgccgcagccagaccgaaccggcaatgcagagcgtcggcggtacgaccaccgacaggccaaactgcgtcagccatacaagatgacgtgccacatcgtaaagacccttcatcggtgcctgacctccattatctgccttaatgctaccagtatacaacagtttgcagagtatttcaacagttatttttcacgtatggggtgcattttgtacagatttcatatctcgttcacaattgcggcatcggtaaattcttcctgccccggcagggctggtctttccagaacgtccagcgccaacagcaccgggtaaaggtagctggccccgtagcagccgattttcttgggactggtgatgacctcccctgcggcctcgagctgtgtaattttttccagcgcacgtcgaaccgtggagacggtgatcgacttccggcggcggttcacgaaaagttcgccgccgcggatcgaataggtgaacggcagacccttggcggtgtggaagatctcgccctggtgctgctgcaaaagctgccagatggcttctatggtttttgtcatgtcacatcacgccttcagtataacagattttcattattgcacaccatgtacaaaaaacaccgcatgaccaaaatcatgcggtgccattaggacagtttatttcttttgcccaaagcggtactcggtgccgtttttcaggcgctcaatgttggagcggtgcagccagatgaccatagcggccatgatcacgcagcaaatcgtgctgaaaagaatggtaggcaggttcgcaccgcgggcaatcaggttgatgagagtgcccaccgggtacagtgcagcaatgatgatgctgcccagagagacaatgcgtgtgacagcgacctcaatcaggaagatgcccagcaacacggcgcagacgaggggctcggtggcgagagccgcgcccgcgccgaccaacacacccttgccgcccttaaagccgaagaaaatcgggcggctgtggccgatcatgcagaagatggcggccagatacgcgccgcagacgggatccagcgggttctgccaggccgcacctgtgccggagagcagtgcgccaaagatgaagcggcccaggttgacagccgcaacgctcttgcccacgtcaccgagggtcgtaaacacagcgggcagcttgccgtaggtgcgcagaacgttggtcatgcccgcgttgccgctgccatggttgcgcacatcgtcattgtacatgactttagaaatcagcacgccgaacaggatgctgcccagcaggtaaccgcctgctgcggtcagcacgcaggccagaaggatatttttcaccatgggttacaccttccctgccttgaccgcgccgtcgccgtgctcgcgggtaatcatcttgatgggggtgccggtcaggccgaacgtctcgcggatctggttttccaaatagcgctggtacgagaaatggaacagcgctttctggttgacgaagcagacgaacgtcggcgggcgggtcgaaatctgggtgatatagaataccttcaggcgcttgcccttgtcagacggcggctggaccttggcggtggcacgggcaagcatctcgttcagtgcgccggtgggcacgcgggtaccattctggacatccacaaagtggatggtctcaaacagtttgtcgacgcgctgaccggtcttggcgctgataaagacgatgggggcataggacatgaagctgaagtcctcctccagctttttgcgcatggcgtccatcgtgtagctgtccttctcgacggcgtcccacttgttgacggcgatgatgcaggccttgccctgttcatgcgcgtagccggcgaccttggagtcctgttcggtgaagcctaccgtcgcgtcaatcataatgacgcagacacggctgcgctcgacagcggccagactgcgcaggacgctgtagcgctcaacgccgctctcgaccttgccgcgcttgcgcaggccggcggtgtcggtaaaaatgaacttgccgtacttgttctccaccatcgtgtcgatggcatcgcgggtcgtaccggcttcgttggcgacgatcagacggttctcgcccagaatatggttgatgaggctggatttgccgacgttggggcggccgatgacggcaaccgtgatgcggtcatccgtgtcttcctcgtcctcctcaaagttgaggtgggcgcagaccgcgtccagcaggtcgccggtgccgtggccgtgcacgccggaaaccggaatcagctcgccgaggccgaggctgtagaagtcgtacagctccatcgggggttcaccgaccttatcgcacttgttgacagccagcacaacgggcttgccgctgcgcataagcattccggcaacgtcctgatcctgcggtgtgacgcccgcggacagctcggtcaccatgacgatgcagtctgcggaatcaatggccagctgtgcctgttcgcgcatgtgggccagcaggccgtcgtcaatgcgcggctcgatgccgccggtgtccaccagcaggaacttgtggccggaccactcgcagtcgcagaagatgcggtcacgggtgacgccgggggtgtcctcgacaatggcgaggcgctgaccggtcagcttattaaaaatggtggacttgcccacgttggggcggcccacaatggctacaatcggttttgccatgtctgccttcctccctctctactctcttatcgtttgaattttatcgttttgcgcttgtgggtgctcagcattgccttgcagcatccgccgccgtcggtggggatgctgacggcgcggcagcccagcgccctgccaagctcctccagcgtgatgtcgtcaaggaactggcccttctcgtcgcggatcatgacctcgggcacggccagcaggtcactgtgcagtttgccgctgcactgcttgatgatgtcggtgcccgtgacaaggcccgccacgctgacgttgccgccgaaatactcatttttgatttcgtgcacgttgatctttacctgcggatacttctgcatcagcgtatcggcgcattcccggatcagcggcccggccagtgtgccagtaaccacatccatactgtggggcagcaccagacccgtgtaattttccagttcttccaaaaaggtgtcgtggtagagccgccacatgccgacgccgtcctccaactgcgcgaacgcatcgtagaactctgccggaggcagcgggcgctcggcggtcagataccactcatcgctggggtagatgacgctgcggccatactcggcgcggcatttctgtgcaaattcttccagaatatccagcgtggcggcggcggtttccttatcgtagggtgtcagcttgtacagacccttgcggtaatcggtcacaccggctggcacggcggcgatgctgccgacctgcgggcgcagggccaacaggtcggtcagggtgcggcgcagctcgtcgccgtcgttgacgccgcggcagagcacgagctgacagttcaactcgatgccgcccgccgccagcctgggcagatagtcgagcacctcgccgccgcgcttgttggccagcatccgtacccgcagtgcggggtttgtcgtgtggaccgagacgaagattgggctgatatgcatctggatgatacggtcaatttcgtggtcggtcaggtttgtcagcgtgatatagttgccgaacaggaaggagagccgctcgtcgtcatccttaaagtagagcggctcccgcataccgggcggcagctggtcaataaagcagaacatgcagtgattggcgcagctgtgcttttcgtcgcccagataggtcttgaagttgcagcccagcggctcatactccgccttggtgatttgcacggtgcggtgctgctcgttctcacacacttccagggagaacgaggtgggcgttgtataaaactggtagtccagtgcatcgttcaggggatgaccgtcgatggccagcagcgcacagcctacggtaaggccgaagcgctccgcgggggaattttcatctaccgctgtcacatacagggccatggtgtcacactcctttgcgatggtagttcaataaaaaatggggaaggcatcgccctccccacgcaagagacttacgcctctttcttgatgacttcctggcctttgtagtagccacacttgccgcaaaccttatggggaaccttcagttcgccacactgcgggcacttcaccagcgtaggcgcctccagtttccagacattagagcgacgtttatcgcggcgggcttgagaatgctttctcttgggtacgatagccataatcggacacctccttggtgaaattcaacttaatagttgttttaatatgctaagccttgcatctgcaggggcagcattgtctgccggttggcaggaacaccctgccgccttctttttgccgcagatggggcatagaccttgacaatcagcactgcacagcagcactgcgggcacctcaaaaatcagctcttgataggcgagctcctcgaggtcgagacaaccgttctcattgcacggcagttcaaaatccggatcctccaaatcacgatcccgcacgaagtattcgcgtgtaaaatcgtaatcccgggtcagcggttccaggcaacgcgcgcactcggcatcaatatgagcccttacacacaaaagcatcgctgcgccgtcttcggtcagcgtcgccgtaaagtcacatactgccggggtgtttacgctgtaacccccgaaatccgccttggagaaatcagcctcaaaatgcgcctcaaacggcttgcggccactctccagaaaagaacgaatatcaaattgcatagtacacctcaaaaggttgcttaaatagtatacacaagcgaaagggtcttgtcaacctgtaaaacacaaaaagttgagatttttttgaattttccgcagaaaatcggggcgggaagcactttcccgccccgaaatctcaatttttgcggttcagaaggttcagatgacgaacttcttcaggtcctccggcaggtcagccgcattggcagaaaccgtgacgacgacctcgatgttggaggtgatcttgtcgatggcgttcaggaccttggcggcagcggccatatcgtggtcggtgatgcgcaggatgccgtcgaggaacagctcggtaatatcgtagttgcctgccagcacgcctgccacaaagccgtacagcatatcagcaccggcaacgccgtactcgtcaacgtctaccagacgggcggagtggttgatctcggtggtgagcttcatgcacttttcaatgacaacaatgttgccggaggtggtcttgacggccttgtcgatcatatcgatcatggtcttggtcttaccggagcctttggttccaacaatcagtttcagcatagggggttacctccttatattcgtcagcgcgcagtgcgcgtagttcctttagtctttcagcgcggcctccagctcagccttgcggtcctcatagccgggcttgcccagcagcgcgaacatattcttcttgtagctctcaacaccgggctggtcgaacggattgacactcagcaggtagccggagacggcgcaggcacgccagaagaagtagatcagctcaccgacatcgtgggcggacaggctgtcgacctcgatcaggcccagcggcacgccgccgtcggtgtgggcgagaatcgtgccctccattgccttgcggttgacaacgctcatattctggttggccaggaagttcagaccgtcaaagttgccctcaagctcctcaatatagaagtcgttgcgggtgtgcttgacgtcgacgtaggtctcgaacatgatgcgtgcgccgtcctgcaggaactggcccatggagtgcaggtcggtggagaagatgcaggaggtcggcatcaggcccttctggtccttgccctcgctctcgccgaacagctgcttgtaccactcgttcatcatcgtgaagtcgggctcgaagcaggccagcgtctcaacgctcttgcccttgcggtacaggatgttgcgggtcatggcatagcggtaggcgtcgttgtccggggacagcttgccgaacttctcgcggccatcggcagcgccctgcatgagctcgtcgatgtcgataccggcgcaggcaatgggcagcaggccgacagcagtcaggacggagtagcgtccgccgacgtcgtcgggaacgacgaaggtcggccagccctgctcggttgccagccgcttcagcgtgcctttggcgcggtccgtcgtggcgtagatgcgcttgttggcctcctcggcaccgacagaatcctccagcagcttgcgcagcacgcggaacgcgagcgcggtctcggtggtggtgccggacttggagatgacgttgatcgagaagcgcttgcccttcgtcagcttgatgatgtcgttcagggccgtggggctgatggtgttgccgcagaaataaatcttcaggccgtcgtcagcctcattgtggtaaaggcccttgacggcctcgaccacagcgcgtgcgcccagataagaaccgccgataccggcgacgagcagcacatcggaatccgagcggatcttctgcgcagcctccttgatgcgggcaaactcttccttgtcataagtaacaggcaggtccagccagcccagaaaatcattgccggcacccgttttggattccagctgattgtgggccaactcgacctgcggatagattgcctcatattcttcaggacggatgaattttgcaagatgcttgccgttaaaagaaacagccatctttagctcctcctttatgatttttatatccccatgataccgttttacgtcggtattgtcaagcaaaagtaggggtcttttttcgactttttcatgaaatttgcacaaattcaattccggagcagcaggctttgggcaagaaggcggaggcagtagcggaaacttaacgcatcaacgttctgtgctgctgtgatgggatagctgcacatttccgtgccctgatgcagtatcttaatgcggcccacctgctcccctgccgcgacgggcgcagacagcgacgcgggcagctcgacgacggcttccaaggtgccgccctcgcccttgggcatcaggcagtgtccggggctttcgtagtgcagcgggactgttgccgccgtgccgtgctccacgggcagcgtctgcggtgcgtcgccgggcagcgcggcaactgcgctctcatagtgggcaaagccgtaatccaacagagtactggctgcctggaagcgttccttgcccgacgcagagcccagcacaacagcgatcagccgcaggccgtctcgctcggcgctggcggagatacagacgcccgccttgccagtggtgccggttttcagccccgtgatgccgcggtagcttttgagcagcttgttggtgttgacgagctgggtcgcgccgccgcgcagcgtgtccatccagatcgagcagtagtcccgcacctcggtgtggtgcagaagcatttcgcggctcatcagggcgacatcccgcgcggtggaaaggtgccctgcctcgtccagcccgcaggcgttgacaaagtgggtattcgtcataccgagctcatacgcgcggacgttcatcatctccgcaaaagcggtttcgctgccgccgacatactcagccacggccactgcggcgtcgttggcgctggaaatgcagatggccttgagcatgtcgtccagcgtcatctgttcgccgggctcgagccagatctgactgccgcccatgtggtaagcgtgctcactgaccgggacaaaatcgtcaaggtgtatcttgcccgcctcgagggcctcaaacgccagcagcagtgtcatgaccttggtgatggaggcaatcgggcgccgggcatcggcgtttttctcatagagcaccgtgccggagtcctcgtcgatcaggatggccgccgcgcagggcacgtcaaagtcggcgttggtcgccgggatgatgcccgcagcggacgcggcaaacccgcgcagcagcgaaagcaccaccagcaccaggcagagcaacagggtcacggcacgttttttcatggcagcacacctccggcggaaatcgctttggtactacgatatgctgctctgtgcggaattagtattgcgcttttggtcggattctattataataaatcatgtatatctactatttataaaagcaaaggaatcgtacaccatgcgggtaactttttacaccttgggctgcaaggtaaaccagaatgaaacgggcgcgctggcccagctgtttgaggaaaacggctacaccgttgtctccaatgaagaaggtgcggatgtctacatcgtcaacagctgcaccgtgacgaacttcggcgaccagaagagccgcaaatggctgcgccgtgccaagcgcgagaaccccggcgcggtgaccgtgctgacagggtgctacccgcaggcgttcccggacgaggccgctgagatcgccgaggcggacgttgtgaccggctccggcaatcgtcacgcgattctgaccgacgtgcagaaggtgctgaacggtgaggaggagcgcgtcgtcgacatccgcccccacgagaagggcgagcgctttgaagagctgcccatggataagtttgccgagcacacccgcgcctttgtcaaggtcgaggacggctgcaaccgccgctgcgcctactgcgttattccgcgcgcccgcggtccggtgcgcagccgcgatgaggcgagcgtgctggaggaactgcgccgcctggccgacgccgggtataaggaggtcgtgctgacggccatcagcctgccgagctacggcaccgacagcggtacgagcctggtggagctgatcgaaaaagccgccgaggtgcccggcattgagcgcatccggctgggcagccttgaccccgacatgctgcacgatgacgacattcgccgcatggcagccgtaaagaagctctgcccgcagttccatttaagcctgcagagcggctgcgacaagacgctgcgcgccatgcgccgcccctacacgacggcccagtacgccgatattgcagccaagctgcgcgcggcattcggtgcggacaacgtcagctttaccaccgatgtcatcgtcggtttccccggcgagacggaggatgactttgaagccagcatggcctttgtgacgggaatgaggtttttgaaggtgcatgtgttcccctactcccgccgcgaaggaacggcagcctacgactttgccgaccagctgcccgagcacgagaaggaggcacgcagccgccgcatgaccgccgctgtggaggaggtacgcgctgccgaagcagccgctatgcagggccgcaaagccagcgtgctgctggaaacgccgctgtccgccacaatgttcaccggctacacgaagcagtacctgcctgtgctggtcagcgcacccgggcacaagaccggcgacattgtggaggtcacgctgggtgcctgggacgggaaacggtgcagggcggagctcgtttgatttatattgattgttgcaacgccgctattcatgctcgatgtcgggggcaatgcttgcatcgacccgcgggcggatgcaggcatccgtccctgcaagccggagacgtcgccgcgccgcaagagatattgcatccattctgcagggaaatctctggattttacagagattttcctgttttttgttgcctgccctcttgcaaaaagtatggatttttggtaaaattttaacaggagcgggtgtacccgctgatacgtcacttttggagcaaacagagcaaaacaaaggagcaattacaatgagaggcatttacacccccgtaacggatatccgtcgcaaggtgttcactgaggttgcccgcatggcctatgaggtcaacgagctttccgactacgaaaagctgatgcgtgagctgcccttcaagatcattcccggtgaggaaaaatctctgcgcagcagcatcttcctggagagagccatcatctccgagcgcgtccgtctggccatgggcatgtccctgcgtccgctggatgagagcgtgcccgccagcgagggtctggagcacagcgtcattgcagacaagtactacgagccgccgctgatcaatgtcatcaagtttgcctgcaacgcctgcccggagaaggtcatcaaggtcacggccatgtgccagggttgcctggcgcacccctgccaggaggtctgcccgaagcacgccatcagcttccgcaacggcaagagccacattgaccagagcctctgcgtcaagtgcggccgctgcgtcaacagctgcccttacagcgccatcgtcaagaccgagcgcccctgcgccgcggcctgcggcatgggtgccatccactccgacgagcatggccgtgccgagatcgattacgataagtgcgtttcctgcggcatgtgcctggtcaactgcccgttcggcgctatcgttgacaagggccagatcttccagctgatccagtccatcaagcgcggtgatgaggtcgttgccatcgtggcccccgccttcatcaaccagttccccggcatgaccccctccaagctgaaggaggccatgcgtcagctgggctttgccgatgtggacgaggtcgccatcggtgccgacctgtgcaccatcgacgaggcgaaggacttcatggaagaggttcccgccaagatcccgttcatgggtacgtcctgctgccccgcgtggagcgtgatggctaagaagctgttcccccagcaggccgagtgcatcagcatggccatgacccccatggtcctgaccgcccgcctcatcaagaaggaaaagcccaacgcccgtatctgctttatcggaccctgcgccgccaagaagctggaggccagccgccgttccgtccgcagtgaggtcgacttcgttctgaccttcgaggagctgatgggtctgtttgaggccaaggctgtcaactttgccgacctgccggacaacccggaggatgccttcaacagcgccagtgccgacgcccgcggctttgctgcctccggtggtgtcgcacaggcggttgtcaacgccatcaagaagatggacccggaccgcgaggtcaaggtcatgagcgcccagggtctggccgactgcaagaagatgatgatgatggccaaggccggcaagtacaacggctacctgctggaaggcatggcctgcccgggcggctgcattgccggtgccggtacgctggctgaccccgccaagagcgttgctatgctgaacaagtacaagaacgaggccgccatgaaggtcgccaccgagaccccgtatcaggattctctggatctgctgcactattgatatgtaactgaacagccccgcatggagatgaaaactccatgcggggcatttttttggcggtgatttgcgggctgatgcgagcatcggcccctacagggagcaaactttccgcttgcagcggcgaaaacgcctgcgggcggatatgggatccgcccctaccgattcggcaaagcgtttcttacttgtggtacttcattcccgcgttgatcgtgcaggcgcggtagagctgttcggtcaaaacaagacgcgccagctggtgcggcagcgtgatgcgtcccaggctgatgcgggcctgtgcggtgcgcttgacgctgtcgtccagcccgtgggaggagccgatgacaaacgccatatcccctgcgccgctcatggcgcggtctgcaatcatagccgccagatcctcactggatacctgcttgccctcgacacagagcgcaacgagatacgcccccctgcgcacgctggccaggatagcctccccctccttttgcagcgctttggcaatctgcctgtcgctggcgttcttgtcggcaatctgcacctcgggcaattcgataatacggaaattgcagaagccgccgaggcgcttctggtattcggccacgccctgcgcaaagtaggcggcgttcatcttgccaatggcaatcaaatcaatattctgcataggctcccccactcaaaattcaatgtacgggctgacctcactgcgggactgggtctggatcagcacgtcccgtccgggctggatgcccgcggccagcagcacattatagacggtggtcatgaccagctccggcgagttgtttgtctggctcaaatggcagagcgcaaactttttgcagccgtcctggatcaggtccagaatctccgccgcgcaggccttgttgtccagatggccgcggtcactggcaatgcgcaccttcaaataatacgggtacggcccgccgtgcaggctgaatgcgtcatagttggcctccagcgcgacgagatcgcagcccatcaggttgtcctgtacgacgggcgtcaggtagccgaggtcggtggcgaacgccatgacgcggccttccggtgtgcggatgcggtagccgcagcagggcacatcatggctggtgggaaagctcgtcaccgtgaagctgccgatttccagcgtctgaccgtctacagggattgcctccaccgcgggcggaatcgtgccgcgggaggccagcgtatccagcgtatcggcacatccgtacagcgggacggggtgctttttcaaaaaggtatccagtcccgagacgtggtcggagtgctcgtgcgtgacgaggatgccgacgcagtcgctgaccgccagacccagggatttcagcgcagtcagagtcgtgcggcagctcttgcccatgtcgatcagcagatacttgtcctcgctgcggatcagcgcgcagttgccggaggagccggaatacagggtggtaaaatatgccattcgtttgtcctaacgctttccataaaaattgggccgcccggtcagcggcccaagagtccttttagattgcccggctcactgcattggccggaatctcgacgcggcggatgtccgcgcccagagcctgtagcttttctacgatgttctcgtagccgcgctcaatgtggatggtctcgtcgacctcgctcacgccgttggcggccagagcagccatgaccatggcggcaccggcgcgcaggtcggtagcgcgcagcggcgcgggatgcagctccttcacgccttcaatgacagcgacctggccgtcgacctggatgtttgcacccatgtggatcagctcatccacatagcggaagcggttctcccagatgccctccgtcacgatggaggttcccttcgccagcgtcagcagtgcagtcatcagcggctgcatatccgtggggaagccggggtgcggcatagtcttgagcttgagcggcttaagctcgccggtgcgcgtgatacgcagcgcgtcgtcgaattcctccacctcgcagccggccgcgcgcagcttggcggtgatgggctccatgtgcttcgggataacgttgtgcagcgtgatgtcccccttcgtgatagcggcggccaccatatagctgccggcctcgatctggtcgggaatgatggagtagttgcagccgtgcatctccttgacgccgtggatcttgatgacgtcggtaccggcgccgtgtacgtctgcacccatcatattcaggaaattggccaaatcgacaatgtgcggctcacgggccacgttttcaagaatcgtcgtgccttcggccaggacagcggccagcatggcgttcatcgtggcaccgacggagaccgtgtcaaaaaagacgtgtccgctgaccagatgctccgacctgacgtggatctggccgtactccacggaatcctctgcaccaaaggcggtgaaggctttcaggtgttggtcaatcgggcgcgggcccagattgcagccgcccggcatggcgacctgaccggaaccaaagcggcccagcaatgcgccgagaaagtagtagcttgctcgcatctggcgtgacagctcattggatacctcggtgctgtccaaatgcgacgtgtcaatttcataggtgctgcggctgaccatgcggatgctcgcacccagctcgctcaaaatctgcagcgacgccatgacatcactgatacagggcaggttttcaatcaggcacttcccgccggccaggatcgtggccggaagtatggcaaccgcggcgttctttgcaccgccaatgttgacatcgccaacaagcggcttacctccgcgaataacgtatttttccaagtgtagctctcctttgtgcggtaatcggctcgtataccctctgtacagggccgacctatagtacacactttctaagattatacaacattttgcgctaattgaaaaggcctgtcccctgcaattgcaaaatttttgtgaaacagcacaagatatgttgaccatgcaccgtaatttcgccggaaatcacatacccgagaacagcgtataggcgctgaacagcgcaccgttataggacatctcaaaatggcagtggttaccggtggagttgcccgtggagccgacatagccgatgacctgcccctgcgtgacggcctgtccctgagaaacagcgatgctggacatgtgaccgtacagcgtcttgtagccgttgccgtggtcgatctccacatagtttccgtaggaataatgccaccctgcagcaatgattgtgccggagtcggaggccaaaatcggcgtgccgtaggcagcacagatgtccgcgccgcggtggccgttgcccatccagcggctgacgtacttataattcggcacaggccagatgaaggagccggagccgaccttggcaatcataccgttcttcagcttcgtgccggtgacggtgatttccggggtcggggcctgcagcacattgtaggccacggcctgacggtctgtgaccgcgccgtcgatcatcgttgtctcgtaggtgatctcctcggagccgtctgcaccctcctgcagtgtcacgaccttgccgaaatcatactggtcggactcggtgttctgggtgtcgaacgggatggcgacagtttcggtgtcgcggcggacgaccttgaccttgatgagctctgccgaggacgcaccggtggtgatgaccgtgcccgcaggaatctcctggtcgagcgtcagcagttcggggttcatctgtgccagagagtcaaacgaaacgccggtagcgttgacgacgctctcgacggtgtcgccgtcgacggctgtataggtgtggatgccgccgccctcggtcagggcgttgatgacgtccgcgtaggagctgacagactcctgcagataaacaccgtccacgaggcggatgttgtgggaaaacgccgtgtagacgctgctgtccatcgcattttcaaacggtgccttgatgttttccagatagctgcgcaggtggtcgccctcggtggtgacgtagagcagctgatcgtcgacgtagacagccgtgccgttgatgatctcatcactggccgtgcgcaggatggcgttggcgatctcgctctcggtcatcgtctggttgccgatggaaagcgagtaggtcgggtagacatcccagcttgtgtcctccaccgcagagccggaggcctgcagcatacgcttggccgtgttgatacgggactgcacgtcctcacgggcattttcaaacacctgctcgctctccacgtaaccgacgttctcgccgttcacctgcacattcagcacaaagcgcaaccccagcccgctgcgcaccaggaccacaagccccgctgcggcaactgccgggagtatgtaagtgatggcgttccagacaacgatggagtattttcggatgccgctggcaaggtattttttcttggcacgacgcacatcgccatcctcgctctccacgagggtatcggggatgtcgcggatatggcggatgccagaggccatccgcacgaacgggctggtcaggtcctcaatcagcgtgataataccgatcagaatcgggcgcaggacaatgagcagcagattcagcacggtatcaccgatgccgcgcacaacagcccccactctgcggcctatgcagacaaaaacatactcgacccagaagccgaccatgtacagcatatcgccgacagtgttgcggcggtgcaggtcctgcatgtaacgggctgccttgcggcggttatcgctgcgctttttttcctgcgatgagtgagaaaagcgcgttacaggggtcatctccgggggttcggtgatgctatcgtttttcggattgggatcagtttggatgggattcaaaatacggaagctcctttccgtgtgaagcaaatttacgtggggtctgcaccgcagggcagactgtgcagctgccagcccgtcagcagcttttcctgccgggccaaggcggccatatcctcgggcagcggacactccacacggaggggctcccctgtcagcgggtgcgcaaacgcaaggatgccgcagtgcagtgcgtgacgtcgcagaaggatgtccgacccgccgtacagcgtatcccccgccagcggatggccgatataggacatgtgtacgcgaatctgatgggtgcgcccggtgcgcggccagcaggccagcagactgtggcccggccccgcggccagcaccgcgtactcggtcaggctgtacttgccgtccgcggacacgcagcggccaatgatggagtcaccgcgccgcgcgataggcgcttcgacccggcccggccccagcggcattgtaccctgcacaatcgcaaggtagcacttgtgggcagacccggccagcagcggtgcggcaaaggcgtttttcgcgcacagcaccaggccgcttgtgtttttgtcaatgcggtttaccggacggaagatgccgctctccccctgccgctgcaggtggtacagccagccgttggccagtgtgccgtcagggtagttcagcgtggggtgcacggcaatgcccgcgggcttgttgagcaccgcggcaaaatcgtcctcataggcgatggaaaacggcacgggctgcggggtgacactcgtctcctgctcgggcgggagcgcaaagcggatgcactgcccggcgtgtacaggctcattcgtgcggatgggctgatcgtcggcgtaaaagccgtcaccgtcatatttgacggacttgatcagtcctgccgtaacaccctgcaggcgcaggaacagccccagcttgcaaccctcgttttccggcggcacggtataacgcaaaacggtcacagtaccgccctccttaaagcctatatgagggtattataccacaaaatgccctgtgatgcaaaccccaatgtctggcagaaaggtacgctgcaacagcaaacggccctcccggaggagagccgtttgtgttatttctgtgattgcagctccgcggcgcgctccagcacaggccggagatactgccccgtgaaggagtgcgggttctgcgcgacctcctccggggtgccggtggcgacgatggtgccgccgccgctgccgccctcggggccgaggtcgatgatatagtcggcgcgtttgatgacgtcgagattgtgctcaatgacgatgaccgtattgcccgcatcaacgagcttatccagcaccttgaccagacggtggacatcggccacatgcaagccggtggtaggctcgtcgaggatatagacggtctgcccggtatcgcggcgggccaactcattggccagcttgacgcgctgcgcctcaccgcccgaaagcgtcgtggctgcctgacccagctggatgtagccaaggccgacctcctgcagcgtttgcagcttgcgcgcgatcttcggaatgttggcgaaaaatacgcaggcctcctctaccgtcatgtccagcacgtcggagatggtcttgtccttgtacttgacctcgagcgtttcacggttgtagcgcttgcctttgcagacgtcacagggcacgtaaatatccggcagaaagtgcatttcaatcgtcaggatgccgccgccttcgcaggcttcgcagcgtccgcccttgacattgaagctgaaccgcccggggccgtagccgcgcattttggcatcctgcgtgttggaaaacagcgtgcggatgtcgccaaacacgcctgtgtaggtggccgggttggagcgcggcgtgcggccaatcggcgactggtcgatgccgatgaccttatcgacccactccatgccctcgaccgcctcacactggccggggcggctgcgcgcaccgttcagggcggcagccagcgttttgtacagaatttcgttgacaagcgtcgacttgccggagccggacacgccggtaacgcagatcagcttgccgagcgggaagtctacggtaatgtcctgcagattgttctcatgggccttgacgacgcgcagcgccttgccgtttccctcgcggcgtgtctcgggaacctctacgaatttgcggccagacagatacgcgccagtgatgctgcgcttgaccttgcagatgtccgcgacgctgcctgcggcgacgatctcgccgccgtggacgcccgcaccggggccgacatcgacaatatagtcggcctgccgcatcgtgtcttcatcgtgctcaacgacgatcagcgtgttgccaaggtcgcgcagccgcttcatcgttgcaatcagcttatcgttgtcacgctggtgcaggccgatgctcggctcgtcgagcacgtagagcacgccggtcagcgcactgccgatctgggtcgccagacggatgcgctggctctcgccgccggacagcgaagccgcaccgcgggagagcgtcagatagccaaggccgacgctctttaaaaagcccagacgttcttttacctctttaaaaataggcgcaccgatcatttcgtcccgggtgctgaccttggcggtgttgataaagtccagctcctcgttgacgctcttgtcacagaaatcggcaatgttgatgccgcctacagtcacggccaggcttgtcggctttaagcggcggccatggcaggcggggcattcctcgctggacatgacaagggcgatttcctccttgacccactcgctgctcgtctcgcggaaacggcgctccagattcgggatgatgccttcgaactggttaaagtaggtgccggagccaaacatgctctcgcgctgcatctcaatacgctcgtcacccgtgccgtacagcagggcgtgcagggcctccttgctgaagtccttaaccggggtatcgagtgtaaagccgtagcgcttgcccagcgccttataggtcatttcggagatggagccctcggcgtaataccagccgctggccttgatggcactttcccggatggacttgcgcttgtcggggatgacgcgcgccgggtcgaccttcatgaaggtaccgagacccgtacacttctcgcaggcaccgaagggattgttgaagctgaacatccgcggggtcagctcctcgacggagatgccgtgctcggggcaggcgtagctctggctgaacatcatcggttcaccgccaatgacgtcgatgacgacaaggccgtttgcctgcgccagcgcggtttctatggaatcggccagacgcccgcggaccgtgtcgttgatgaccaggcggtccacgacgatctcaacggtgtgcttgatgttcttttcgaggttgatctcctcgctcaggtcgtacatattgccgtcgacgcgcacgcgggcaaagccggctcggcgggcggcatccagctccttggcttgggtgcccttgcgggcacgcacaacgggggccagcacctgaaagcgggtgcgctccggcagcttcatgacttcgtcgaccatctcgtccacggtctgctgggtaatctcccgcccgcagatcgggcagtggggcacgccgatgcgggcgtacatcagacgcagatagtcgtaaatctccgttaccgttcccaccgtggaacgcgggttgtggcttgttgttttctggtcgatggaaatggccggggacaggccggtgatctcgtcgacatcgggcttttccatctggcccaggaactggcgggcatagctggaaaggctttccatatagcggcgctggccgtcggcgtagatcgtgtcaaacgccaggctcgacttgccggagccggacaggccggtcatgacgatcagcttatctctgggcagctccaaatcgacgtttttcaggttatgctcccgcgcacccttgatgacaatgcggttgttcgggtcgattttgattttggagctgcgctttgcaggctttttttcgggtgttgtactcaatttttatatttcctcctgcccttgcgtgttttggcagcggccttgcgttcactggtgtcagcggcggtgggatcctctccgcgttccagccgctgaatttcgtcgcgcagctgcgcggccagctcaaattgcagcagccgcgcggcctccttcatctccttggtcaggcgttcaattgtctgctggcgctcggcgcggctcatgcggtgctggcgcatccgcttgttttcctcgctcatgctgatttcgagcccttcgccgatggccttgacgatggttttgggcgtgatgccgtgttctttattgtaggcgtcctgaatggagcggcggcgctccgtctccatgatggcgcgctccatgctgggcgtgacctcatctgcgtacatgagtacaacgccgttggcgttgcgggccgcgcggccgatcgtctgaatcaggcttgtctcactgcgcaggaagccttccttatcggcatccagaatcgcaatcagcgacacctccggcaggtccagaccctcgcgcagcaggttgatgccaacaataacatcaattgcgccaacgcgcaggtccttgatgatctccatgcgctcaaacgtgtcgacctcgtggtgcatatacttcgtcttgacgccgtgttcctccagataatccgtcaggtcctcggccatcttgacggtcagcgttgtgacgagtgcgcgctcgccacggtcaatgcgggtgcggatctcgcccagcaggtcctcgatctggccctccaccgggcgcaccatgataagcgggtccagcaggccggtggggcggatgacctgctccgctacgcggctggaatgctggcgttcatattcaccgggggttgcagaaacaaaaattttctgatggattttggcttcaaattcctcaaatttcaacgggcggttgtcaaacgccgacggcagacggaagccgtattcgaccagcgttttcttgcggctgtagtcgccgccgaacataccgcgcacctgcggcagcatgacgtggctctcgtcgaccatcagcaggaaatcatccgggaaataatccagcagcgttgtgggcgtggagccgggcgcacggcctgacaggacagcggagtagttctcgatgcccttgcacatgccgacctcctgcagcatctccatatcgtagttggtgcgctgctggatgcgctgggcctccaagagcttgcccgcctctgtgaattttttgacctgctcctccatctcggcctgaatctttttcaggccctcctgcatcttttcggggccgacgatatagtggctggccgggaagatggcaacatgacgcaccacgttcttgtgctcgcctgtcagcgggtcaaactccacaatgcggtcaatctcgtcgccgaagaactcgacccgaatcgcaaattcgtcgttgtaggccaggtggatgtccaccgtgtccccttttacgcggaacttgttgcggatgaagttcatgtcgttgcgctcatattgcagcttgaccaggcggctgcaaagctcgtcgcgttccatctgcataccggggcgcaggctgatgaccatgctgcggtagtcgatggggtcgcccagcgagtagatgcaggacaccgacgccacaatgatgacgttgcgccgctctgacagcgccgccgtggccgagtggcgcagacggtcaatctcgtcgttgatggcactgtccttctcaatataggtgtctgtggacgggatatacgcctcgggctggtaatagtcgtagtaggagacgaaatattctaccgcatcatcggggaaaaagccgcgcatctcggtacaaatctgactggccagcgttttattcggctccaagatcagcgtcgggcgattgcaccgggcgatgatgttcgccatcgtaaacgtcttgccagagccggtgacgcccagcagcgtctgggcgtcgtcaccctcatggatgccctgcatcagcgcttctatcgcctgcggctggtcgccggtgggctgaaacggtgcctttaagtgaaagacttcgtccatagtcgttcctttcgtgtacaacgattagttgtataatgattatagcacgacaaatttttaatgtaaataggtttgccgatattttgtacccaaacctcagaaaaatgcgccctgccgggacacggcaaggcgcatgggcggtgttcaacggctggcggcctgcagcacgccgctgtttgcgcggtattccggcaggctgccgcggttcagcatcgaacagccatcctcccccgctatgatgatatgatccatgatcgtaaagccgagctggccggtgacctccataatatggtaggtcgtcaggcggtccgcctcggacggaatggccagcccggtgggatggttgtgtgccagaatgccgcaggtcgagttggtgcgggccacggtgcgcagcagcttgcgggtgtctacggccacgcggttgggaacgccctcggcaatgcgcaggtcctgcacagggcggcaggcgtcgtccaataaaatcaggtagagctgctcattctgcacaccgcggaacagcggctttacgtaggcgatggccgtctctgccgagttcagcgacaggcgggtcttgcgctttttcagctcataatagcggctgcacgccatgacggtagaaatcagccgcgcacttttggggccaacgccctcgacctgcatcagttcctctggctcggcctccagcactttgcagaaatcaccgaagtgctgaatgagcctgtgcgccagcgcgtttgtgtctgcccgcgggatggagagaaacagcagatattccagtgcctcgtgttcggccaggctgtccagtccgtctcgctcgacgcgctcctgcatgcgggcgcggtgcttcgcgtggagattttcgtctgccattttttcacatcccatctttacgttctgctggttttattatatactgtaaaaagacttttgccaaccgtttttactgatgaatttttaaagaggacacgatgaaaagttttaccgcaggacccaatgaaaacggcgtgcgcctgagccgctttgtggagggcgtaaccaaggatatgccccgcagcatgatgtacaaggcgttccgcaacaagcgcatcaaggtcaacggcaagcgcgccgagccggatacccgcctgagcgcaggcgatttgatcgaactgtacatcaacgacgagttcttccccgtgggcaagcccgctgccaagactgccaagccgccgcgcaggcaaccgcctgtgaccgtggtgtatgaggatgaaaattttgcggtgctctacaagcccgcgcacctgctctgccacagtgaccgcactggcgacgccaatctggtggatgcctttgcggcctatctggaggccaagggcgagtatgatccccacgcagaaaagcgatttgccccggcgctgtgcaaccggctggatcgcggcaccgaaggtctggtgctggccgccaagagctacgccgcgctgcgcgacctgaacgccatcatccgcgacgacatgatgaaaaaggagtatctgaccatcacggtgggtgcaccgccgcaggggcggttcgtcgcatggctgcagcacagcgagaaaaataacaaggtgcgcatccacgcccgtgagagcgagggttacaagcagatcatcaccgaggtgacggtcatccggcaggcagggccgtttgcgctctgccgcattgggctgatcacgggccgtacccaccagatccgtgcgcatctggcgtatctgggccatccggtactgggcgacatcaagtacggcaaccacaagatgaacgagcgcaccgggctgaaaacacaggctctctgcgcccagcgactgacgtttggccgaatccccgaggaaaacacgctgcagtatctttccggcagggtcatcaagctgaatgacccggaaatcgtaaagacgtacgaacgactgacggcagaaaagtaagggcaacaccgcataattcccgccttacggcttaagcaccgctccggcggctgcggcacggcatctgcgttgccaaaatgctcgataatacacaaagtattatctgcgcttttggcttagcagctgccgcacctcgctcgccgtatcggcacttagaattatgcggtgttgtctaagctctgccgcggttggcggccggaagcatccgtccctgcaagcaacgatattgttatccgtaggggcgcattccatatctgcccgcgggatattgccgaaaaatcaaaaataccgggccgctccccacattcgggaaacggcccggcaattttttacgccagaacgaagtgatagaccagagacagtgccacgatcaaggcgcaggcaatggccgtgatgggcggggccaagcggatgatgcgctcggccatgacgtcgtcctcactggtttcgtcgtcatcggcgtagcggccgcgttttttggacttcttgtcgtgaccgtcgtcctcgtcatcgtagtcgaggtcatcggtatcgtacatctgggtgccctcatcgtcgtcctcatcatcgtcgaacaggcggcccttgggagcgtagcggcggacgcgctcggcctcggcatcctcgtcgtcatcggcgtagctgctgccttggggctcaaacgcggcggttgcctgctcgggctcataggcgctctgcggcgggatgtcctgctgaccggtgatggctgcctgcacggcgttggccatggcgcgcgggtcgctggcagccggggcaggctgtgcctgcggctgcggtgcgggagcaggcgcaggggccacactgctggcgacggcgttgacctcctgctgctggcgctcggcggcctggcgggcctcctccagaatagcggtcagcgttgccttgataccggcgcggtcaccgccgcactcggagcagacggtggtgttttcctcattgggatggaacgcaccgcaggcgcagaaccagccgtactcggtgtcctggggcacgcaggtcagttggacattgccggtgcgctgctgcagcgtcttggcgatggagccgggcagtacgcggggcatgttcaagcgaacacgcttgtaattgcgcaggtcgacgccgcgaccattgaggaacgcgcgatcctgctcgacctccacgctggaaaccggcgtgtcgctgacatagacagcgtcatcgctgccgaacacggcaccgggctgggcgttgagctgctcataatagaagtcatcctcgcacaggacctgacctgcggcatccttacatttgaagtggacgaccaggccggtcagcggctcggtgccgacattcttgaaggtcaggcagacggcgacctcaccggtcgtgtcacccttcagcagttcgacacgcacaaactgcaccgggcttccggcggtatagtagttggcgcgggactgcgccatcagggaaaaattctgatccatagttacacctactctttactcttgcgtgtcgggctgggggttggccggctcggcagggtgctgggtttcgggctgttcggcaggctgcacaggtgcggcagaatccggcgcaggtgctacaggctgggcggtctcgcccctgcccagatcataaggcggcagggtcccgccttccatcaatgttttgaattcctcaccgctgatcttttcgcgctccataagaacgcctgctaccttgtgcagctcgttcatgtgctcggtcagggtgcggcgggcggtctcataggcctcatccacaatgtcgcggatctcgttgtcgatctcggatgcgatagcctccgagtagcccttgccctggccgaagtcacgtcccaggaaggtctcgccggggtcgctgccgtagacgacaggccccatccgctcggagaagccgtagcgggtgaccatggcgcgggccgtatcggtggcgcgctgcaggtcgctggatgcaccggtggagatgtcctccagcacaagctgctcggctacacggccgcccagcagggtgacaatgttttcaaacatcgcggtcttggtgacgtagctggggtccttctcgggcagatacattgtgtagccgcccgcaccgccgcgggagataatgctgatctggtgcacgggatcgtggtgcttgctgaagtagcccgtgatagcgtggcctgtctcatggtaggcagtcaggcggcgctcctcgtcggtgacgacgtggctcttcttctcagggcccatcatgaccttgacggaggcttcctcgatttccttttcggtgatagccttcttgccctgacgggcggccagcagcgcagcctcgttcacgaggttctccagatcagcgccggagaagcctgccgtggagcgggcaatcgttttcaggctcacatcggggccgagaggcttattctttgtatggacgcgcagaatctcctcgcggcccttgacgtcgggcagaccgacgtagacctgacggtcaaagcggcccgggcgcagcagcgccttgtccagaatgtccgcgcggttcgtggcagccatgacgatgacgccgtcgttggcgtcgaagccgtccatctcgaccagcagctggttcagggtctgctcgcgctcatcgtgaccgccgccgagacctgcgccgcgctgacggcccaccgcgtcgatctcatcgatgaaaatgatggaaggcatcgtctttttggctttttcaaacaggtcgcgcacacgggaggcaccgacaccgacgtacatctcgacgaaatcggaaccggaaatcgcgtagaacggcacaccggcctcaccggcacaggcacgggccagcagcgttttgccggtacccggagggccgacaagcagtacgccgtgcggaatgcgtgcgccgagggagttgaacttgttcggggccttcaggaactcaacgacctcctgcagctcggccttttcctcatcggcaccggccacatcggcaaaggttgccttgcgctggttctcctgctgatctttgaccttggcgcggcctacattcatgatgccgccgcccgcgccgccgcggtacatcgacatgaacaacataccgatgctgccgagcattgcgacgtagaagatgatctccagccagggaatgctcgtcttggcggcgacgtagtcaaacaccatcggcgcatccgggttggccgcgttgtactcgtcaacaaaatcggagatcttgccggtgttgaagtcgccgccgtagggcagcttataggtcatatagacggtgccgccgttggcgggcagggcgttatcgcccgagctgtacacgccggtcagcagaccgccggtgggcaggctggctgcggcgttggactccggcagagcagccttaccctccttgagccacaactccaggctgccggtgccaaggtccagacggaacgatgtcacctgctgattttcaaagtaatagtaaatctcggagtaggtcgtgtccttgctgccggacgctgccagcagcggcgaaaggctgacgatgaacaggaccaacaccatcaggacggctaccacgaggatgccgctgaatttcggttgtttttgcttcaagaaatcaactcctatccggtgtgcacaccgggcattttatcattcgccggaatatacttccggcttaagaacacccacatagggcaggttgcggtacttttcgtcgtagtccagaccatagccgaccacgaactcatccggcacttcaaagccgcagtagtccggctcgatgtcggccatgcggcggctgggcttgctgaggatggtgcagatcttcacgctgccggggttgcgcattttcagcaccggaaccagcttggacagcgtgatgccggtgtccagaatatcctcaacgatcagcacgtccctgccggtcaggtcggcatccaagtccttgatgatcttgacaaggcccgtggaagacgtgttggcaccgccgtagctggaaacgaccataaagtcgatggcgcagggaatctgaaccgcgcgcatcaggtccgccataaagacgacggaacccttcaggatcgagaccagaagcaggtctttgcccgcgtaatcgcggctgatctgtgcgcctagctcgttgaccttggctttcagcgcatcttccgatacaagaatgtggtcaatatcattgtccatgctgtacatcagagttatgcctcccctgttttttctgtccgcaccgtcagtacctcgtgggtgtactcatcgggggcacatccatcggcaaagccgcagccccacagccacagcacctcactgccgtcagccagcagcggcagcagcggcctttcggcctgcggtatgccaagttcattgtaatattttttgagtgtttttcgcagatggcgtcctgccgggcggaagaagtcccccggctgccgtgtgcgtaaaatagcattcccctgtattttagcacaatctgcgcaacagtttaagtcttttttgaaaattggttgattttttagaaaatcttcatactttacgacctgaaatttcacaaaataaccacccggaaggtaaaaatcacccggttcaaagggctgcggcggcgcgggaagggtctgagagccctcccgcgtcaggcagacgagcaggccatcctgtattttatagtttacgtccggggtcagctgaacagcaccctccccctttaaaacaaggaagtgcagcagactgatatatttttcctcggcgtcgcgcacggggctgaccagcgcgtgcagcgcggcgtccagcacaggtccctcggcgcggcgcaggaccgtgacatcatagccgcccggcacagtggccgcctgcagaagggcggcggcctcgccggtcagccagtcgtccagcgcgcgcatctggcggcagagccgcgcaatgctgcgctcggcggcggggttggcgtattgcagcgccgggatggcatcatgccggatgcggttgcgcgcatagacgtcctggtcgttcgtctcatcccggatatagtgttgccccagcgcggcacagtatgcctcggtgtcggcgcgggtcaggcagaggcagggccgcacatagcagccgcggcgcggcgggatgccggtcagcccgtgcagacccgtgccgcgcgccatgcggaaaagcaccgtctcagcctggtcggacatcgtgtgggccgtggcaatgacggcctcctcccgcgcggccagctcatcgaaccagccgtagcgcagaccacgggcccaatcctcgctcgggcggggcggcacctctatgccttcctgcacggcgtcatacaggaacagctccacgccgttccggcggcagaagtccgccacaaagtcggcatcgcggcgggcggtctcgccccggatgccgtggttgacgtgggtcgccagcacctcgatctccagtgtgcggcgatggcgcagtaaaaaaagcaacaaagccatcgagtctgccccaccggagcaggccgcaatgactctgtcgccagacttgaacagaccctgtcggcggcagttgtccaacagagcctcatccatacgctgtacggttttttccgcgtcagaactcatgggtcacatccagattgctgaagcgcgtgtgcgcgccgtcccagcccagacggacgacgctcgtctcgccgtggcggtttttggcaacgatgcactcggcctcattctcattggcctggttttcctcgccgttctgggcattgtagtaggccgcgcggtagaggaacagcacgatgtcggcatcctgctcgatagagccggagtcgcgcaggtcggaaagctggggccggtgatccgagcggcccgtcgtcttttccgctgcacgggacagctgggaaagcgcgatgaccggtacgttcagctctttggccatgatcttgaggttccgggtaatgtcactgatctcctgcacgcggctctcggtgcgcttggcactctgcatcagctgaaggtagtcgataataacgagcccgattttttccttcttgggatcctggttgatcgtgcgaatttttgccttgatctccggcaccgagatgccggaggaatcgtccatgtaaatcggagcgttgtagagcagcgacgtggcctgggcaaaatcgttccagtcggagttgttcagacggcccgtgcggaatgcctggctgtcgatgttcgccgtgctggaaagaatgcggtccgtcagctgctcgcaggtcatttccagactgaaaatgatcgtcggcaccttctgctggcgggcaacgtttgttgcaatgttcagcgcaaacgatgtcttgcccataccggggcgggcggccagaataatcaggtccgagcggcccagcccggtcaggaccgtgtccagatagttgaagcccgtggggataccggcgaacttgtcgcggtccgcgccgctcagcttctgcatcgtgtcgatgacctcgagaatggactcgcggatcgtcttgacgcccgacttgtcgcgcccggaacggatgtcgtagatcttctgctccgcgctttcgagcagaagatcggcgtcctcgccggaggcggtctcgttcaggatggaccgggcggcgtcgatcaggcggcggccctggtacttctccttgacgattttaaaataggaatcaacgttcgagaccgagggcagcgtctcggcgatgcgggccagatagaccttggcgtcgtcggcgctggcaaacgtcttgttgctggcaagcgcattgacaagcgtgacaatgtcaacggcctcgctctcggtgtagagcgagcgcatcgtctcatagatggcgcggttctggtccgagtagaacatctcgggctccatgtcggtgataaggcggttcagcaccgtttcatccaccagcgccgcgcccagcacgctctgctcggcctgcatgctgtagggcatctggatgcccagactggcaaggcttacttcttcatttttcggcatagcggacatcctccttccctgccagacggcaaattacagctcctcgaccttcagcttgaagggtgcgacgacaccggcgtacaggcgcacggaggcgtcatagctgccaaactccttgatggcggaaggaagctcgaccttctttttgtcgatttcggtgccggtcagggcggtcagcagctcggcgacctccttgccggtgaccttgccgtacagcttgccggatgcaccgcccttgaccttggcggtcacgacctggcccttgatcttggcggccaactcctctgcggcgccgcgtgcctcggcctcgtggtgggccttggcctcgctcttggtgcgggcctggttcagtgctgcggcatccgcgggggctgccaggttgcgcgggaacaggaagttgcgggcgtagccgtccgaaacctcgtggatctcgtcttttttgccgatggtcttgacgtcctgtttgagaatgatcttcataagggtttccctcccaaaatttttatcacaattaccgcgcagtattttccttttgcgccgcgcggtaaaggtcgatttgttcacggatgcggtgctccgcatcctgcagcgtgcagttctggagctgagcacccgccatcatcagatggccgccgccgcccagcggctccagaatgacctgcacgttcagcgcgcccatgctgcgtgccgagatattgacgccgtcgtttttggcgactgccacaaagctggcgtcgacgccgttgatggtcagcagatcgttggctgccatcggcagcacaacgttcataccggcctcaagctcgtccgacagggcaatggcacagcccttgtatatgtaggccgcctccacaatgtgggcgcgggcctcgtactcctcttttgaggtgttgaacagcagcttggtgtcagccgtctgggcaccgcggctgcgcagccaagcggcagcctcaaaggttcgcacgccgacatgcagtgcaaagctgcgggtgtccagcatgatgccggccaaaagtgcctgggcctccagcggggtgatgttgttttctttcggcataaactgcagaagctcacacaccagctcgctggcgctggacgcatagggctcatggtagatcagcgtcgggttgtcgatgtggcccaccgccatgcggtgatggtcgatgacgacgacgcgcttgcacttttcgtagatctgctggctttccagtaggcgcttctggtaggtatcgacgacgatcagcagcgtattcggcgtgatgacgtcgagcgtctgatcgggtgcgataaagtcgtggccctcgcctgcatcaagaaaagtcttgagcagcggcccggcgagcgtagcctcgctgttgatggcgatgaccgcgggcacatcgcacattttgcagatgcgcagcacgccgatggcggagccgacagcgtcgaggtcactcatgcggtgccccatgatgataacgctgtcgctgcgcttgatgaggtcgcacagcgcgttggcaataatgcggctgcggacgtggctgcgcttctcgacgccgtgggagataccgccgtagaactcaaagccgtcaacggtcttaacggcggcctggtcgccgccgcggcccagagcaatgtcgatgctttcgcgtgccatctggtggcattcctgcagggtctttccgccgtggccgacaccgatggacagcgtagtcagcccgccgggatgcagcgcacggaccttatcgaggatgtcaaagcgctccgccagcatccagcggacgtcacgctcctccaccactgcgatgtagcggctgttcgtgaccttgcgcaaaaagccggtgctgcgcccgatgtatttctccagcaggctgttgatagcctccagctccttggcctgctcactgtccttcatatcgtcaaacagctcgtcatagctgtcgatgacgatgatgagacaggccgggcggctctcgttgtactcgtcgagcgtttctttataaagcgtatcattgatgagatacacaaggctggccccgcggctgcccttggctgagcctgcataggccgtaaagcggcgctcccccactttcaggtcctgcccgtgcgggcgggagcagacagccagatccagctccggcagaacgcgattcaccgggcgggtcaccgcgtcgtaatcgttcagcacatcctgcctgaaatactggttgtaccacaaaatgcgcccgtcgttgacaagcaccgtggggatgggcagatttgccaggctgtactggatacggctgttctcaaaatcggtgctgcaaagctgcctggccagaaacgcgcgcaggcggcggcgctggtagagcactacacagagcgcgatcagtaccagcaccgcaggcacggccagcagggcaggctgcgtcagggccaccggcacgaccatcgcggcgatggcgaccagcaacaacagcagcagagcggcaatatccaatccatccttgtgtttcatcgtacactcccctgttcaggaaaacaattacacttccagcagaattggcaggatcatggggctgcgcttggtgcggcggtagatatagctcgacagtgcctcgcgcacgcgggctttgacgctggcccagtcgtgcaggttgtcggccaggctgcggtccagggccatctccacctgggtgcgggctccctccatcagctcctcgctctcacgcacgtagacaaagccgcggctgacgagatcgggaccggagagaacctgtccgttgctgccgtcgatggcggcggtcacaatgatgatgccgtcctccgacaggtggtggcggtcccgcaggaccacattgcctacatcgccgacgccgtagccatcgaccatcacagcgcccgccgtaacagtgttctcaacggtcatgccatccgcggaaaggcggatgttctggccgttctcggcgatataaatattctgcttcgggatatagcccagatgctccgcagtctcggcgtggcgcttgagctgcttgaactcaccgtgcacgggcaggaagaactgcgggtgggccagcgtcagcatgagcttctgctcctcctggcaggcatggccggacacgtgggtgtcgtacatattttcgtagatgacctcggccccgagcgtcagcaggccgttgacgaccttggtgacggtcttttcattgccggggatcgggcgggccgagatgatgatgaagtcattggggccgacgcgcacctgacggtggctggcctgcgccatgcgggacagcgcgctcagcggctcgccctggctgccggtggtgatgagcacgaccttctccggcgggtatttgttgatttcgtcaatcgtgataagcacattatccggcgcgtgcaggtagcccagctcgcgggccatctcggtgttggagaccatgctgcgcccactgacggcgaccttgcggcccgactcaatcgccaagtcgatgatctgctgcacgcggtagatgttggaggcgaacgttgccacgatgatgcggcgcttgccggccttggcaaacaggcggcgcacgccttcggcgacggtctgttcagtggcggtgaagcccgggcgctctgcgttggtggaatctgccagcagcgccagcacacccttgcggccatactcggcaatcgtgggcaggtcggtcacagcgtcgccggacagcggcgtgtagtcgaccttgaagtcaccggtgtggatgaccacgcccgccgggcagtcgatggcgaaggccagcgagtccgggatggagtggttgacgtggatcggctcaacggtgaagcagccgagcgtgaccttctggcgcgggcggatctcatggaagattgcgctggacgcaaggccgtgctcctcaagcttgttcttgataagaccaatcgtcagcttggcggcgtagatcggcacattgaattttttgagcaggtacggcagactgccgatgtggtcctcatgaccgtgggtgatgaacaggcccttgatgcggtccctgttctcgagcacgtaggtgaagtccgggatgaccagatcgacgccaaacatatcggcatccgggaacacaaggccgcagtcaacgaggatcatgtcgccctggcactcatacagcgtaatgttcttgccgacctcgccgaggccgcccagcgggcagatgtgcatcgggatggccggggtcatctcaagatgctccgggttcttaggacggcgtccgcggcgctggccctgggggcgcggtgcggcagcctgaccgttctggggtgcagcgctgttctgattctggcgcgggcggcgcggacgcggagccgggatgttctgcgcggcggcgttctgctcggcagtggccggggccgcggggcgcgggcggcgggggcggggcttgtgctgcgcgttggcagcgttctcaccctggggcttgggtgtgcgcggcttgcgggtatggggcgtactctggccgttctgggcaggctgtgcggtatttttacgttttggcttgaactcttccatcgaaaacctccgaatcgtcgtatttccgggctggtgcctgccatctgcaggtaccggatcccctcaaaagcggttgcgatctatgtattttaagagcggatgctcctatgcctaatggaatgggcgcggaaagcccgcctgaaaagacgcggccaggcccgataaaacacacaatgcaattacactctattataatcggaaatggcgtctatgtcaaatatcttgccttatgaagcccggcttgctataatagtagtattatagaccagaatacggagtacaacgcatgaagcatattgaaatttataccgatggtgcctgcagtggcaaccccggcccgggcggctggggcgcgatcctgcggttccgcacggcgcagaaggtgtacgagaaggagctttccggcggcgaggccaacacgaccaacaaccgcatggagatgaccgccctgctggaggcgctgcgccagctcaaggagccctgcgccattgacctgtacagcgacagcaagtacgtcatcgacagcctgcaaaagggctgggccagggggtggcgcgcccgcggctggaagaaagcagacaaatctcccgccctgaacccggatctgtgggccccgctgctggccgagagcgagaagcatgaaattacctaccactggctgaagggccacgccggccatcccgaaaacgaacgctgtgaccgcatggctgtggagcaaagcaagaaatacggcgggcgtcaggcctgaccttggcattaggagagaaacatggacggttttaacacatttgaaaagcaggataaggtcctgctgggactgaacagcggcagtgacgccgccgcagccatgcgcattttgcggcagcagggctttgcggtgcagacattcacggctgaacacgaagtcacgccagccgggcttttgcagctgctggccgacaaagccgccgagttggactgcgcgttcattgccaccgggcactatgcccgcatcgaggtggacagcgaggggctttctcatctgctgcctgctgcggacgccgaggcagaccagagtgccgcgctggcaggtctgccgcaggaagtgctggctaagctggtgctgccgctgggcgagtttaccaaggcagaagtggcggagatgctggcggatacggcggaataaatcttacgacagcaaaaatgcctgtgcaggtttgaagcctgcacaggcatttttgtttgcgttggcttcccccacgggggaagctgtcagtggctccgaccactgactgatgagggcaaagcttgtggcaatgacccgtttttgagtagtcagatacaccttgccctcatccggccctgcggggccaccttcccccgaggggggaaggcttttgagagtttcactttttctttttatgcttcggccagggccaccatttaccctctttttcgtgcatccaatgggcgagcggatagaagatcatggccagaccgcccagcaggatcaggatatacagccagcccgcaaagtcaaaaatcacatccagtgcggccagcgcagccagaaagaacccggcgtacatcatgaactggccgttgtgcaccacatagccgttccagttttctggttcgatctcatcgcggccctggtcgccccagacatttgggttcttcattgcggagtagccgtaaaacgccagcacgataccgataacaaaaaggaattcaaacaatggggtatcctcccggaattattttttgaagaaggggctgaaatcaaacgttgcaaagtagtcctccggcgtctcggcgcggcggatgagctggtgggagccgtcctccttcagcaggacctcggcactgcgcagtttgccgttgtagttgtagcccatcgagaagccgtgtgcgccggtgtcatggatgtagacaatgtcgccgatgtcgatttccggcagcatacggtcaatggcgaacttgtcattgttctcacacagaccgccggtgacgtcgtacttgtggtcgcggggggtgtcctccttgcccagcaccgtgatgtgatggtaggagccgtacatggcagggcgcatcaggttggccgcgcaggcgtcaacgccgatgtactccttgtaaatatgcttctggtgcagcacggtggtgacaagtgcgccgtagggtgccagcatgaaacggcccatctcggtgaagatggcgacatcacccatgccggcgggcaccagaatctcctcaaacttcttgcgcacgccctcgccgatggcggcaatgtcgttgctgcgctggtcgggacggtaggcaatgccgacgccgcccgaaaggttgatgaacttgatttttgcgccggtgcgcttgtgcaggcggacggccagctcaaacaggataccggccagcttcgggtaatagtcgtcagtcacggtgttgctggccaggaaggagtggatgccgaactgctcggcaccggcagccatcagcctggtgtaagcctcggccatctgatcctcgctcataccgtacttggcgtcgccggggttgtccatgataccgttgcccagctcgaacacaccgcccgggttgaagcggcagcagacggttttgggcacgcccgcgaccttttcaaggaacgcaacgtgggtcaggtcgtccagattgatgtacgcgccgaggtcgtaggctttcttcatgtcctgcgcgggcgtgtcgttggaggaaaacataatgtcgctgcccttgaagccgcaggcctcactcatgagcagctcagtatagctggagcagtcaacgccgcagccctcctcctgcagaatcttcagcaggtaggggttgggcgtggccttgacggcaaagtattccttgaagcccttgttccagctgaacgcagcgttgaccctgcgggcattttcccggatacccttttcgtcatagaggtggaacggggtgggaatatcggcggcgatctccttcgcctgggcaagggtaataaacggctttttctgcggcatgattgtctttcctttccctttatatacttcgtataggcttattatatacggtttgtaaggcgacggcaagagactttgggaaaaatagcgctgtagaggccggacatgtccggcccgcggctgtatggcaagcatatgctactgggaaggctgcgggcggggcatgccccgcccctactgcgcagccacaatgaaaaagaccgttccagcaccggaacggtcttttatcctatttacagcacagtctccgcgtggtcgccccgaatgtggagcctggcggccagcaggcggttgtccagttggcggcaggtccagcggtatgcagggtacaggaacaggcaggccgcgatccatgcggcgggattggacagctccgcgccgaagtatcccagaaccgggaccagtacaattgccaccgccgtgcgggcgaccatctcggccacaccggccagcatagcgagtgacgagaagccgagtccctggatggagtagcgccagacgatcagcgcacccagcggcacaaaaaacacactgttccagaacagatactcgcggcccatggcaacgatatcgacctccttggctgtgtcaagaaacagcgacatgatctgcacgtcggtaaagtgcaggatcagcgccgagccgacgccgtagaccaaaatgatcagcatggcgctgttcacaccctggcggacgcggtccatgcgagacgcgccgagattctgacctgcataagtcgccatggccgtgccgacgctctccatcggaacggtcagcagactctgggtcttgcctgctgcggtgacggcggcaacggcggtgctgcccagcacattgacggcccactgcatgataacactgccgatggctgtgatgctgcactgcagacccatcggcacaccgatgcccagcagacgtatgctggcctttttcgagaaggccagatcgtccttctccattttcagcacgtcgaacttgcggcggagatatataaagctcaacacgccggagatgacctgcgaaatgtcggttgccagcgctgcgccgaacacgccgaaatggaacggcacgataaacagaaggtcaaggccgatgttcagtgcgctggtcaaaatcagaaagtaaagcggcgtcttgctgtcgcccagtgcgcgcatgatggccgccaccatattgtacagaaagatgaacgggatgcctgcaaagatccagccaatgtagatgaccgcgccgtcaatgatgtcgtcgggcgtctgcatcagctgcatcatcgggcgggtcagcgcaacggtgctgatggtcagcaccacactggccgccatgcagagccaggcggcgttggcgacatggcggcgcagatccttatagtcccgcgcgccgaacagctgtgcaatgggaattgcaaagccgttgcagacgccgatgacgaaacccaaaatcagatagttgaccgagccggtagcgccgacagaggccagcgcactgacaccgcagaagcggccgacgatgatggtgtccgccagcgcatagaactgctggaacaggttgcccagcaccagcggcaagctgaacaggagaataactttgagcggactgccgctcgtaaggtcttttgtcatgatttttcataccctattatatacgtgcataatttcgtgcggattgtattatagcacgcacagatacaaatgcaagagggttgaccacacaaattttgcgttcttttcggcaaaacagcaccggatggcaaaagcgtattttcttgcgcagcggcggcagatttcaggcgcctgacaggtgttatttccagaatgcggccagctccgctgtcagcgcctgcgccgagtccacggttttcagctgctcccagtgcggcggcatcaggcggcgggtgtcgggggccagaaatcggtcatcaatgagcaggacaacgccgcggtcctccggcgtgcgaatgacccggcctgccgcctgcaaaaccttgttcatgccgggaaagcggtaggcatagtcaaagccggagccgcgcgtctgctcaaagtaatcgcgcagctgctcctgccgcgggccgacctgcggcaggcccgggctgacgatagctgcaccgatgaggctctcccccgttagatcgacgccctcgccaaaaacgccgcccagcaccgcaaagcccaacagcggtctgccgtcggatttctgaaactgtgccagaaactccgcgcgttttccctcgtccatggcgctttcctgacagagggtcggctggtccgggtagcgggcggtgaaatcctcccacacctgctgtaaatagctgtagctcgggaaaaacgccagatagtgcccggccctcgccccggacatcacggccagcaggtcggcgaccttggcaatgctgtccgcgcggtccttgtagcgggtgctgacgtggcgggcgcaccacagacccagatgctccgtatcaaacgggctgcgcagcgctacagcgcgggcatcgggcagaccgcacagatctctgtaatagcctgccggagccagcgtcgcgctgaacagcaccgccgcgcggcccttggcaaagtccgccgccagaaagtcactcgggtccaggcagagcattgcggcacggacctcactgccgtgggcagagatttgcagtacaaagtgatcgtcgaacgtgtccgccacgcgcagccaggcgcggatgtcaaagtataattgcagcagtgcctcgtgggtctcgtcggggtcgcggtgctcgtcaagccagatctccagcggctcacagagccttgtcagcgcgcggtcaagcgcatcggcgcgggacttttcaaagaacgtgcggccaaagcggctgtcgccgggcgcttcctcgcagcggtgccgccactcgatgaagatgtcgttgacctttgtcagtgcgtttttcaggctgcttttgcccttgcccagccgctttttggcgtcgtagaaggcgcttttggcaaggacggcactgtgcatgccccgggcgcggtccggaagattatgtgcctcatcgagcagaaacagatagtcccccgctgtgtcaaaaaagcgttccaagtgcacgactgggtcaaacaggtagttgtagtccccgatgactacatcacaccacaggcttagatccagccccagctcaaacggacagaccttatgtctgcgagctagcatctgcagggcgtcagcggtcagagcgtgggtgtccagcgcatcccacagcgccgtcctgacgcgatcatagtagcctttggcataggggcatgcctcgggcgtacactcgcgccgatcctgcatacagattttgtccttggccgtcagcgttacgctgcgcagctttaaatcggcgtcggacgcccgcagcagcgccagcgcgttctccgctgccgcacgggtcgtgccgcgggctgtcaggtaaaagacggggccgccctgcttcacagcctttaacgccgggaacagcacgctcatcgtcttgccgatgccggtgggtgcctggcagagcagctgcccgccctcggtgcaaatcttgtacaccgcgccgatcatggcccgctggcccggacgatagccgggaaacggaaattgcagcgccgccagtgacgcacggctgatgcgctgccactcggcggcacgcttggcccacggcgcgtactgcgtcagcaggtcggtcacaacggcgtccagcgcgtcggcggtgtagtcatgactgaaacgaaattccagttcctcatcgacctgaaagtaggtcagccgcacccgcatagcgggcaggccgttctgccgcgcgtagatggccgcatagatctgcgcctgtgcccagtgctccggactttgctcaccggtgatgagctcgggcggcagggttgtagttttgatctcatcaatggtcggcatgccgtcagtatcggtaaaaataccgtcggcacggccctccagcgtgtaggtgatttgggcacaggcgtagtcctgcttcaacgtcgcctcggcctggtagtccgggtactcttttacggcggcacgctgcaatttgcggtgcaggcgtgcgccctccagcgcgcggtcaaagccggtaaagcggctgtcaatgctgccggtgcgcaataaaaactccaccagacgccgtatgggcagcgtcagtgccaacgcttcaggctccatgccgctttcctccttgcatccggtggtatctttttaataggtatggtcgcagacctctgttattttctgccgcagggccacaaagtcgccaaagacagcgggcttgttgtctgggtagcgcagcagcgctgcggggtggtaggtcgccatgaacagtgtgccctgcttgtcgaaaaatttaccgtggtcgcgggaaatcgagaagcccgggtcgagcatccgctgcgcggccacgcggcccagacagacaacgattttgggacggatcagctgaaattgctggcgcagccaaggcatgcacgcggcggattcttccggcagcgggtcgcggttctgcggcgggcggcatttgacgatattggcaatatagacgtttttgtcacggctcaagtcgacggcctccagatagtggtccagcagctggccgctcttgcccacaaagggaagcccctgctcgtcctcgttggcaccggggccctcgcctacgagcatgacctcggcgtgtgcggcaccctggccaaagacgacgctgtggcgcgtctcgcacaggccgcagcggcggcaggccaggcattcctgttgcaatgcttgcagttccataatatacttcctctgacatggttaaatcgggcgtggcgcacccatactgtaaggaaaaggaggggcaggcgtatggcactatttttgcggggactttgcctgctggcggggtatctgttcggcggttttttgacagcggaggtcgtggcgcggtgcacggcgggcgtcagtgcgcgggatattggcaccggcaaccccggcatggcgaatatcgcgacacatcttggtaaaaaggccgggctgctggttctgtcgggcgacgtcatcaagactgcggcggcctgctggttctgccaccagcttgcgccggagctggggcttaccgctctgctgtacggcggtcttggcgcggttctcgggcacaactggccgatttggtacaagggccggggcggcaagggcgtggccgtcacctgcgcgtggctcatgctgtacctgcccgtcaccggtgtgctgtgttgtctggcgggcggcgtggctgtgctgctgaccggctatctgccggtaggcgcggtgctgattgccgcgctggctgtgccggtgggctggctgcaatacggcaccgaggctggtgctgtactggccctgaatgccgttatcatggtcacgcggcactgggccggtctgcagcggatacatcgcggcgaggagctgcagttcttccgcccgaaactctgatataatctatcataccacgccttgccccggaatgcaatgttctttaggtttttacgcaactgcgctgtattttaccgaagctgaaaaaatcggtaaaaaatatcaaaaaaagtgttgacattttgcgtgtcagccgctataattaacaacgttgcagctgccacggcagcgcacaaagctgggtatggcccggtagttcagttggttagaacgctagcctgtcacgctagaggtcgtcagttcgagcctgattcgggtcgccatacgctgctatagctcagttggtagagcgcatccttggtaaggatgaggtcagcagttcaaatctgcttagcagctccagcgctgatgcccacagtgcaagatacgcattgtgggcatcattagtataggggcatagctcagttggtagagcagcggtctccaaaaccgcgtgccgagggttcgaatccttctacccctgccaaa

SEQ ID NO: 30 - DNA, 263438 bp, Gemmiger formicilis
  source 1..263438: mol_type = genomic DNA
gcgggggagggggcggcgggcggcgcgggcgccgggacgcacggcccatgctgtaccagaacatattgttgccgaagctgctgccgccgccaccgccgcgcggggggcgcgggccgcgggggcgcatcaggtaggtgatgagccagatgaccagcagcaccgccacaaccagcagaacaaagcccataacattgggccctcctctatcgggggcgctggtatcggtatagctgctgttcagcgttacgccgtagatgctgcacagccggttggccagcgcctgcacggtcttttgggtgccggtgtcgtaatcaccgttgacccaatagggttccatgtactcgtccagcagcgaccccagcgtgctgaacgacagctggctttccagcccgtcgccgcgcatgatgtagtagtcgccgccgtcggcctcgttgggggccagcaacagcagcacgccgttgtccaggtcgtctgagcccagcccccaggcgttaaaaacgtcgtaggcaaagccctccatcgtcgtgctgcccagcagttcatccagcgtgtagacgccgatctgcgcaccgcaggcatcggacaacttgattgaaacgtcattgacatactgttctgtctcgtcggacaggatgtccgcatggtcggccacggcgtttgtcgtgctgacctgcaccttgggcgcggccagcgcgggtagcgccgccagcgtcagtgcggccagcactgcaccggcagccgccgcgcgtctggcaaatgttttcagtttcataatttccccttgttatcgtggtttatttggtagcaaagcgttccggtgcctgcgcaccccacaaaccggagattagattggccgggaactgcgagacagttttctcgtagtcctccaccgagagattgtattcattggcggcgcgttctatcgtcgcctgcgccgaaacaaacgcattgtactggtcatccagcgcccgctgggtgctgtcatcgaccttgttgttcagcgacgcatacagcgtatccaccgcattgtacagccgacggttggccgcgtactgcaccgcaggggaatcgtccgtatcattccacgtggccagcgcgtcctcggcttcctgtaaagcagccgccggggtgctgtccacatagcccgcctgtttgatgaggttcgccgccgcgtcagcctgcgcctcaaaatctccctgaatgctgtggccgtactcgtcctgcgcggaggtgtaaatttccgccgtttccctgtacacgcccttcagctttgccccgccgatgcccagcaccgacaccagcgccagtgtggcgagtacaatcgacgctgtgccgcgctttttggcaggtgcaggcagctttgtctcgacctcgccgaggatttccagctgcgggccatgaatggtaaagttttcctgttgttcaagctgcatagcaaatacctatattgtgctgtaggggcggatgcaagcatcgccccctacaacggcaatcagttgttgatctccagcatcttctggcggagctcgccctcgatgcggcccagctcctgctcggcgttggcgcgcttggccttgccgtcggcgcggatcttattcagctcatccagcgtctcgatcagctgcttgttcgtctgctgcagcgtctcgatgtccacaatgccgcgctcggactcctttgcaatttcaatcgtgccctgttttagcgtagcagcgttctttttcagcagctcgttcgtggcgtcggtcacggcgcgttcggcctgcatagcctgctggctgtgggcgatgcccagcgccagcaccatctggttcttccacagcgggatcgtgttcacgatggtcgtctggatcttctcggccatcatcgtgtcgttggactggatcaggcggatctgcgggcccatctggatggacacattgcgggtcagctccagatcgtagagcttcttctcaaagcggtcacacaggtcggccaggtcgcgggcggcctgggcatcctcgggcagctgggtgcgctgggccttctcctgcgcggccttcagatcgttggcgcggacctcggccagcttcttcttgccggccaggatgtacatcgtcagctccttaaagtagacaaggttcagctcatacatcttatccagcatcgtgatgtccttcatcagggtgacctggtggtcctccagctgggccttgatgcgctcgacgttcttgtcggcgctgtcgtagcgggtcttgagctgctcaatgctgttggacgtctttttgaagaagccgaagatgcccttgggctgctcggtggtggcgtcaaagccctgcaattcagaaatcaggctcgtgatgagctcgccggtctcgcccatgtccttggtcttgacgcgggagagcgcggtctcggagaagtcgctcagcttcttctggctggcagcgccgtactgcaagaccatctgggagttcgtgatgtcgattttctcggcaaagtcgttgaccatcttctgctcctcgggggagaggggcgtgtcctcgacctgcacgggggtcgcttttttgctttccgcgatgactttctcatcggcggcggggtccagggtcagcgtcggggccgcgggggcggcatccagcgtcagagagggtgcggcgggtacgttcaggtccagttcgttgctcaggtcagccatagtgatcttcctttcttgtatcctctatttacttggcaaggttctggcttttcaggatactgtccagcacctcaatatcggtagaaatatccattgcctcgacgctgtagagcgcatccagctggttttcaaaggctgtcgccgtcgtctcggcgttgcggcgcagctcggcctcgatctgggcggcgttctcgcccctgacgccgttctgctccagcgccgcgtaggtgcccatcagcttgacgacctcgggcaggtagtagcgggcaaagcggtccacgctgcgcgccttgtcgggggttttctccacaacggcggcaatgctgcggcctgccttctccatgcggtccatggcctgggagagctgcgggtcggggattgcctcgttcagtttatgcagtgcatcgaggtttgcggcaatgccgttcagcatagcgtccacgtcctcactgcctgtggcatagggcacgtaggtgcgcacaacgcgggtagggcagagctttgtgcccgcaaagtaggcacccgcgctgaccgcggcggtcagcaccagcccgcccagcgtgtagatgggcaccagcagggccataataggccacacaagcgccgccatatagaccggcagcaccgggcgtttggttttttcctgccatttgctcatgcaggcacctccctgtttttcttgctctgtaggggccggacatgtccggcccgcggccttacggtcaaccgccttccatgggaaggctgcgggcggggcatgccccgcccctaccggcagacagtattagaattatacctttttattatagaacaaaatccgttcacttgcaaccatccgcgcgcaaaaacggtgctaaagcagcgccccatgccgcctgcagccgcgcgggggaccaggcggcgttggcggggctggtgctgggcagcacggcggcgggcaggtgggtcaagggttctgcatatttcgcgtagatacgccccgacgccgtgccgttgcagaacacggcccgcacgcccagcttttgtatcagcgcggccacatcgttcggcacggcgttgcggatcgacgcatccgacgcgcctttgatgtcgcacgcgccgatcgtgtcccacacggccagcccgtgctttaaaattatggcctttttcgcctcgatgtcggcccaatcgggtaccggctcaccggtcacggcggcgatcatcggccagaagcggttctgcttgtggccgtagaaaaagccctgctcccggctcttggggctgggaaagctgcctaagatcagcgcgttggcccgcgcaccgtgcagcggcggcagaccggggccgacatgggtgtactcggccatttaaaacgcctccggccagagcgcacggcagagctcggcaatgccgtggggctcggcgtcggggccgatgcggtccgcggcagccttggcggcagcgctgccgctgctcatggcaatgccgagacctgccgctttcagcatcgcaacgtcgttatcgccgtcgcccacggccacgcagtccgccgggtcgatgcccgccagcttcgccagctcccgcagacctgcgcccttgtcaatgccctgctgcaaaatatcgcagccgtcgctgccggggtaggagaacaggaaattcagccccagatagccgtatttttcctgaaatctgtcggccatctcctgcgagagaaagccgaacgcgccgaagggcatctcctccagatgcttgtcctgatcctcgccgtccacgatgttcagcgccaaatttttctcccgctcgcggcgggcgaactcctcatagccgaggtaggcgtagttcgcgtcgtggtaggtaaagcgcagcggcaggtcgtaatcctcaaaaaagtccaccagcgcgtacatttcctcggtggtcaggcggtgcagggccaggtctgcgcccttgtagtccaccagctgcgcaccgcccgcgcagacccagtagtcgggccggatgctgcgcagcaggcccttgcccacgccgatgcgcccgcggcccgtggcaatcgcgatcttgacgccggccttctgcacggcgcagacggcctcagcgttttccttcggcacacgctcacagctgccgggccgcagcgtgccgtctatatcgagtaacaggagcttgtatttcataaaagttgacctttcttaatttgtaggggcgaacatggttcgcccgcggtcgtgtgcggcagcggaaaatatccgggcggataggggatccgcccctacgctgtaggggtcgatgctcgtcatcggcccgggaactttgcggctgccactgcgttccgcgggcgagcattgctcgcccctacatgcgctgtattctttctgtattataccaaagtctaaccccgtcccgcaaggcatattctgccttggggtgatgtttgtgcagctggatctttcttgccgccgcaggcggcgttggcgctgggccgtgccgctggtgctggccgcgcttttgctggccctgccgcagctggcggcactccggcccgccgcgctggctcgggtagaccgcattgtcggcgggcactacatgacccggctggacgccctgcagcaggaaaatttcacgctgcatcaacagctggcacagtctgccgacgcgctggccgagaacgccgccctgcggcagcttgtcggctgcgggcggggcatcaccggcgtcaccccggcgcgggtcgtggcccggggcgtcggcggtttcacgctggcctgcccggacactgcgccggggaatgccgtactcgacgcgggcgggcggtacgcgggggtcgtcacccgcacggacggcgacacctgcactgtggaattttccgccgctgccgggctttgcggcagctatgccgggttagtcacgccggggctgtgggtcctgaccggcctgcccgccgactgcgcactgacggcaggggacatcgtgaccaccgcgggcggggactggctgggcacactggccgccgcgcccgcccccgacgccgacggcctgaccgcgcaggtcccgctgaccgacaccgccgatttgtggggcacggtctatttcgtgaaaaagtaattgctttttcgtcgaattttgggtacaataaataggcagcgcggtttgtaggggtcgatgcccgccatcggcccgcgcagtgaatggctgccgcaaacccctacatgtcccatttcctgacaaacaaatccattttattttttaccgaggtgatcccatggccaaccgcaaaaactcccaccgccgccgcgtccgcgtggcggtgctgatggtgctgtgcggcgcggtgtttgcggcgttcttcgcgcggctggcctggatgcagttcgtccgcgccgactactacgccgataaggccgccgaggccagctccgccagctacaccgtgacccagcacgccgcgcgcggggccatcgtggacagcgccggggtcgttctggcccgcgacaccaccgtgtatgacgtctacctgcgcatcccggcgccgccgggcaccgacctgcgcgagaccgtaaaagccatagagagcctgacaggcagcaaggatgtggaaacacagcttgctgccttttttgctgccgcgtcggcgggggagctgcccgtgatgcagggcgtcggcagtgacgttctgacgtcgttttacaaggccgatcttgtgcagagcggcgcagtgcgggccgccgcccgtggcgtgcgcacctggccgaacggcacgctgctgccccatgcgctgggcttcaccgggccgatcacggcagagcagtggcccactgcccggcagcgcggccttgcgatggatgctgtcatcgggcagagcgggttggaggccgcctatgacgacctgctccgcgggcaggacgggcgggtgctcgtgaacaccggctttgacggcgctgtgcgccgcaccgtgcccctgcgggaggctgtgcccggggtcacgctggtgctgaccgtggacagcgctctgcaaaaagaactgcaaaacgcgcttttatcccaaatcgaggtcctgcgctccaccaaggctgccggggccgggcgggagtgccgtgccggggcggcggtggtcgtggatgtgcagaccggcggcatcctggccgccgccagcgtaccgggcttcgatctgaaccgctaccgcgcagactatgcggcgctctccgccgatgctgccgcgccgctgctggaccgcgtctgccaggggctgtacgcgccggggtcggccttcaagcccgccgtggccgcggcggcgctgaccgcgggcatcgaccccgccgccacggtcaactgcaccgggcggtacgggttttacagcggctaccagccgggctgcctgcaatacggccacggcgggccggtagacctgcgcacggcgctggagtacagctgcaacatcttcttttacgatgtcgggcggcggctgagcgtggatgtgttttccgcgatggcacgccagttaggactggccacgcccaccggcgttgaaattgccgaggcacagggccgcctgacgtggagcagcgacgaaaactaccaggccgggctgactctgatggccgccatcgggcagggcaacaccgccgtgacgccgctgcagctggcggcctacgcggccacgctggccaactgcgggcagcggcccgccctgcattttgcggaccgcgccgtgaacgccgccaccggcgagaccgtctggcagtacaccccgacattcaccacggttccgggcggcgagggcgtgttcggccccatccgcgacggcatgaagcggatggcccggacgacccgcgtcctgcgcgagggccccgtggcctgcgcagccaagaccggcagtccccagctggcggacaccctgcccggcggcgggcactatgtcaactcggtgctgatcggctatgcgcccgcggacgacccgcaaatcgccatggccgtcgtgctggaatacggcggtggcgggtccaacgccgcgcccatcctgcgtgctgtgctggatgccgtctttgacggatgattgcggagcgctgctcaaccccccatcgggtgcgcttgggcattctgccgatttagtgcatcaaaaagtttcccttatcgtgattttcttcaaaaagaacatgtcacattttgacaaaaagccagttgcagtccagccggaagtgtgatagaatatatgcgagatagtgttaatgcaactgtggagaggagccgacatgaacgcacagtgtatcatggtctgctccggcaagggcggtaccggaaaaagtaccgtctcggtactgctgggggcctgtctggcacggctgggccgcaagaccctgctggtggagctggactccggtctgcgcagcgtggacattatcgcaggcgtctatggccgcactgtttacgacattgaggatgttttgtgcggcagatgcgagggggccaaggccgttgtgcccagcccgctgtaccccgggctgtccgtcatcagcgccccgtatgagggcggcgcggtggaggcggccccgctgggacgtctgctgaccgctatgcggccctattttgattttatcctgctggacaccgctgccggcatgggcgcgccgttcacagcggcctccaccgtggcggacaaggccctgctggtgctgacgcctgaccccgtggccctgcgcgacggcaagatcgtggcggaccggctgctggcgggtggccgcccgcagagcgccgtgcgcctggtgatgaaccgcgtccggcgcgagagcttcggcaaaaacgctgccgtggctgatctggacgagtgcatcgacaccgtcggcgtgcagcttttggcggtcatccccgaaagccgcgttctgcagctggccggggccaacggcacggtaccgcccgctgcggatcccgccgttgtggccggacaggccatggcaaagcgtttgtgcgggcagcgcgtcccgcttaccttttaatatattgtactctgctgcgaaggatggtggcatttacctatgacgattgcattgatagcccatgactccaaaaaggagttgatggtgcagttttgtatggcgtatcgccatattttggagcagcaccgtctgctggcaaccggcacgaccggccgcctggtggaggaaaacgccgggctgaaggtcacaaagttcctgcccggcggccacggcggtgccgagcagatcgtggcgcgcatcgcctgtgaggaagtggacatgctgctcttcttccgcgaccccatcagcgccaagcccagcgagccgaacgagatgaacctgctgcgcatctgtgacgtgcacaatgttcccgttgccacaaacattgccaccgccgaggtcctcatccacggcctggagcacggcgacctcgattggcgcacgatcatcaatccgcagcggtgagaattgtacagtttgtataaatttacagcaaatatataacccccgatttcaggcaatcgggggttgtttttattgcggccagtccgcgctccggctcgtagtctcgtcagggtgcatccagaggacggcatagtggttttgcgcggccagggcctggccggtctcctcgggcagacagaacagcccggtggaaagcgcatcggccagacctccggtgtcggcgcgggccagcacggccacgctgctgacgtagcgggcagggtagcccgtcgtcagatcgatcaggtgggcgtaccgcacgccgtcgtactcaaagtagcgctggtagtcgccgctgatgaccaggctgtcgccgtcggccagctcgacggcctgtatgtacgcggggtcatcgctccagggattctcgacacccgcggtccagagcttgccgccgggctttgtgccgatggcgcgcacgttgccgccgatgttcagcagggcgctggtcagcccgcgggcctgtgcggcccgggcggtctgctccacggcgtagcccttgcccaccgcaccgacgtcgagcgccatctccgggtcagcaaaatagacggtttgtgctgcatcgtccagaaccagatcttctatgtcgatatgcgccagcgccgccgcgatggcgtccgcgtcgggcggggcaggggagtcgctttcccgcgcgtcatgccacaggcgcagcaccgcacctgcggcgatgttcgttgcgccgttggcggcagggtaagcggtatctttgcaccagcgcaaaaatgcgtacagctcgtcgctgacctgcaccggcgcagcggcagcccgggcgttgacatcatacaggttgatgacgccatcatagtggtggtagatgtcaaacaattcgttatatcgttgtaaatcgctgtacacggcctgtgtctgggcgttccagctgtcctggctgtcggcatagccctgcacgatggcgacagtgtcaaacaggtcgaaccaggtggcactgtacaaattttgctgcttttggcaggcggtcagcggcagacaaagcagtaccagcagcagcgcggtcaggcggcgcttcatgcgttgccgccctgcacggtctcgtgctcggtgtttaattccagcagcaggtttgccagcgtccagcccttgctggtgggcgtgaccatgctgcgcaccggaatggacgcgccgcccattttgataaggtcaaggaacgcgcccaactcgccgttgtcatggcgcagtccgctgacgatgatggccgggcggtccggcaccgcgataagcggcgcaaacgccggggccggcctgcccgcgcagaggtccccaacgatgccgccgaggtcgccgtccgcgacggggcggagcttgacgtcatagcgcctggccgcgcgggcgatggcggcatagctggggtagctttcgtcaatgcgccagagtaaggcgcagcggggttcgcggatgattcgggctttcataatgttacctcgttaaaagggaagagggtgaacgggcgggcgaaccatgttcgcctctacagagacgctaccaccgtaggggccgggcatgcccggcccgcggcataaaaataagcggtcgtttgcgggaaagctgcgggccgcacatgtgcggcccctacaactctacccattcaaaaaagcattgtaggggaggggtcttgccccctccgcgagcggatatggaatccgcccctacggagagagcggccatgctgcgaggcgtctaagacgccccctacaacaaaggcgccgccttatcccgggcagcgccttttgtattgcttacaggtcggggtggtactccttgcaggtgcactttttccacttcaggccgctgccgcaggggcagggatcgttgcggccgatcttcgtcacgcggacgggggccggggccttggcaccggtatcaccgggcgcattatcgccggtgggcttggcgatctgctcacgtttcggctcggcgttctgctggcggatctcaatcgtcagcagcatgtggacggcatcctcgcggatcgacgcgatcatctcatcaaacatcgcgaagccctcgatgcggtactcgaccacggggtcatgctggccgtagccgcgcaggcccatgccctgcttgagctggtccatgttgtcgatgtgctccatccacttgctgtcaacattgcgcagcaggcagatgcgctcaagctcgcgcatcgtcttggcaccgtagcgcttttccttggcggccaggatgtccatgccgcgcttgtacagctcgtcggcaatgccctccttcgtcaggtcgcccagctgctcggtggtgtagttgaagtcggtgggcaggcacagccagttcatgaagtggcggcgcagcccggcaaaatcccagtcgtcggcggtctcgccgttcaggtagttcgtgcaggcatcgtcgatggcctggcgcatcatctcgtgcagcttgccggagatgtcctcgccgtccagcaccatctggcgctgcttgtagatgatctcgcgctgctggttcatgacgtcgtcatactgcagcacctgcttacgaattgcaaagttcgacgcttcgagcttcttctgggcgctctcgatggtgttggtgatgagcttgttctcgatgggcacatcctcgtcgaggccaagggaatccatgaggttctggacgcggtcaccgccgaaaatgcgcatcagatcgtcctccaggctcaggaagaagcgggatgcacccgggtcaccctgacggcctgcacggccgcgcagctggttgtcgatacggcggctctcgtggcgctcggtgccgatgatgaacaggccgcccgcgttgcggacaacctccgcctcgcgcttgacctcgggggtaaattcctcgcacagttcctcaaaacgcttgcgggcatggagaatttcggcgtcctcggtctcggcgtggccgtcgcactcggtcatcagcatctcgagtttggcatcaataccggcctccggcggggtaggcagttcggtgccgctggccttggcgcgggccttctcatgctcgtaggcatccttcagctcggccaggttggcggtcagctcctttgacagctcctttttaagggccgccttggccatgtaggtcacgttgccgcccagcataatatcggtaccgcggcccgccatgttggtggcgatggtgaccgcgccctgcttgccggcctgcgcgacgatctcggcctctcgctcatgctgcttcgcgttcaggacgttgtgctcgatgcctttctttttcagcagcttggacagcgcctcgctcttttcgacgctgacggtgccgaccaggacaggctgacccttggcgtggcactcggcgacctgctcaatgacggcgttgtacttgccgttgacggtcttgtagacgctgtcgggcaggtccttgcgggcgcggggcttgttggtggggatgctgacgatgttcaggccgtaaatttcactgaactcgtcggcctcggtggaggctgtaccggtcatgccggacagctttttgtacatacggaagtagttctggaaggtgacggtggccagcgtcttgctctcggcggcaacggtcacgccttctttggcctcgatggcctgatgcagaccgtcgttgaagcggcggccatacatcagacgacccgtgaactcgtcgacgatgatgacctcaccgtctttgacgatatagtcggtgtcgcggtgcataacgccgcgggccttgatcgccccgtcaatgtaatggcgcagcgacatattgtcggcgtcggctaggttctcgacgtggaagaacgcctcggcctttttgacgccggactcggtcagggtagcggtcttgcgcttttcgtccacgacgtaatcgccgtctacctgctcctcggcctcgaccttgtcgtccagctcgacgataacactctttttcagcgtcttggcaaagtcgtccgcgcgcttgtacatcacgctggaatcctcgcccttgccgctgatgatcagcggggtacgggcctcgtcgatcaggatggagtcgacctcgtccacgatggcaaacgcatggccgcgctgcaccatgttggccttgtagacgaccatgttgtcgcgcaggtagtcaaagccgaactcgttgttcgtgccgtaggtgacgtcggcctcgtaggccttcttgcggtccccggcctcgacgccgtggacgaccagaccgacggtcagacccaggaagcggtagaccttgcccatccactcggagtcgcggcgggccaggtaatcgttgacggtgacaacatgcacgccctcgccggtcagggcgttcaggtaggtgggcatggtagcgaccagcgtcttgccttcaccggtctgcatctcggcgatgcaggcgcggtgcagcacgatgccgccgatgatctgcacggggtagggcttcatgcccagcacgcgccagtcggcctcgcggcagacggcgaacgcctccggcagcaggtcgtcgagggtctcgcctttggcgaggcgctctttaaattcggtggttttggccttcagctcgtcgtcggtcagcttggccatctccggctccagggcaaggaccttgtccttgagcgggttgatgcgcttgagttccttgtccgagaaagagccgaacagtttttcaaaaaaagacataacagttcccctgtattttccgccgcgtgtagaggtgcggctaatagtggttttatatagttttacacatgatactataatacacccgcacaggggttcgtgtcaaacctgcgcgggtgtatttcgtaatatatttaatttttctgttttgcgggcaggctcagcagcaccagcatcaaaaagatacagccgaagcccagcgcatcccacagcgtaaagggcgagcccagcaccagcgtgctgatgatggccgccgtgaccggctcggcaaagctgtagaggctcgctttctgcgggccgatgagcggcacgcccgacatgtacagactgaacgccagcacattgcccagcacaaccacgataaagatgccgaacacgcccatcgccgtcggcacatagtcgatctgccacgggcggaagatgagcgaaaacatgatgccgcccatcaaaaacgcccagccctgcagcatcggggtggggtactgctcctgcaattttttcggccacatcgtgtagatggcgatgcagcaggcactgacgatgccggagaccagcgccgccgggctgacggccagcccggtcaggctgccgtgggtcgtgatgaggaaaacgcccaccagcgccagcaagatcgaacagacctcaaacacgcgggggccgcgcttttgctggatgcagacgaccagcaggatgatgacgggggagacgtcctgtaaaatcgtgcccatgcctgcgctggacagctggatcgtcagaaagtaggtgaactggcagcagctgacgcccgccagaccgtagaccagcaggtcaatggcgttgcgcggattttttctgacgttccacgggtcaaaaagcgttttgcggtcctttataagaaagaatccgcacaggatcagccccgccagaaacaaccggatgggcacgagccaggtcgaatccatcccctcgcgggtgaacaggtactgccccatgcagcccgaaacgccccagcacgccgcgccgcccatcgtcaaggcggagccttttatgcggtcagacattgtgttgctcctctgttgtaggggtcgatgctcgcatcgacccgcatcataacggcgggcagctgtttgcagggggcggcgtcctcgacgcccctacagcctcccgtaagctcttattccaaaatcagcgccgcggcttcgcgcaatccctttacaaccggtgcgcccgtttccctcaatttttccggcggctggtggccgccggactgcaaaacacagcgcacgcccagcgcctgtgcaacctcatagtcgtggacggaatcgccgatcatgacggcgcgtgccgggtcaaagccgttttcctttaaataggccagcccaatctcgaccttgctcttggcgtagatgtcgcccagacccagcagacggtcaaaatagcccgtcacgccgcgctcgtcggtctggcgccgcagcgtgtccagattgctggccgacagaatgacctgccgcaaccccgcggccttaaacgcttccagcgcgtcaatggtgccgtctgccagcgggcaggccgcactggcggggacgtagtcctccatgtatttttcggccagctctgcaaagctgtgctttgtaaagtcaaaccccgcgcggacgtaatattcctcgatgggaaagccaaaaatagcccggtaccgctcgtggtcataccgctgcgggtagccgaatcctgccagcagacggttgagcgcgtccacgcagagatcgacatcatcgagcagggtaccgttccaatcccacaaaatcagttccgggcacatagatgttacctcgttattcttctgtaaaaattttgttcagacccgcgttgctttcgatcagcttgacgagcgccacacccagaatcgtgcagctgatgagctcgccaatgccgacagtaacggcattgaacaccgccagcatcgccgtgggtgcgccgtccgagaagaagaaggtgatctcgaacgcgccgacaatgatcatattaaagacaacgggcggcagggatgccggaatggccagccctttcacgcggatgtcgcgcagcttgtaggtcacaaggcaggccagcagggtcgccagcgtgccgaacaccacgtcaacgacggtggagccgagcagatttgccaaaaaacagcccagcgtgacgccgacgatatactcggcgccgaacaccggcagcaggcagagggcctcggccacgcggacctgcaccgcgccgtagctgaacggggccagcacaaggcagacaaccacatagacagctgcaatgacagcgcagcgcacaagacgacggacggacagatttttcatattcatacaatactccggcggatagattttgaccacgcgcaagaccgccagccttgcggggtttgcgctgtcgaccagcagccggcagcggagcctaaaatcctaagttgctcaacaaacctaaattataacaaaacccgcaggccgttgcaagacctgcggggaaaatttgtggtagattctgcgcatattgtgctgatatggtataatgcatcggagtatattatcgattttctgaaaatcatagttccctaatagctcttggtatggtataatggcctggcagacgcgtacacggctttgcatgtcatagttccctaatagctcttggtatggtataatttggctatggggctgtccactaaatcaatcgtcatagttccctaatagctcttggtatggtataatttctaaacaatgtagcagttgctaatacaggtcatagttccctaatagctcttggtatggtataattaacctcatcattttggacgaataccagaagtcatagttccctaatagctcttggtatggtataattcaagacgcgttcatcggcgctgtgatgctggtcatagttccctaatagctcttggtatggtataatgcggttggcctgcacggtgacgacacgcaggtcatagttccctaatagctcttggtatggtataatccgcagggtcttaaaatgtgacaaccgcgcgtcatagttccctaatagctcttggtatggtataatgcgaaggcctaacggtacaactgagtatcagtcatagttccctaatagctcttggtatggtataatggaagataccacccacgatcagggaaaaatgtcatagttccctaatagctcttggtatggtataatatcttgcatctgccattgtatacagcggaggtcatagttccctaatagctcttggtatggtataatcgggcgcagcacgaagaaaagatactggaagtcatagttccctaatagctcttggtatggtataataggctatgcaaaaagcgcatcggattgcggtccgatgcgctttttgttttagaaaaaactcaactgttcacatacaaaaggggcttcttccggctgataatttcccagaagaatctgaatagactggtactgcttttctgtaacgacaagcaggcgaatggagccgtttggcggcaaggatgccctcaaacggctttcgtgtttctgcacggcgtcgttgccgttgcacaccctcgcgtacacagagaattgcagcatgtggtatccgtccttcagcaaaaaattccggaacgccgtcgcatgccgcctttcagtctttgtctgcacaggcaggtcaaaaaagacaatcatccgcataaatttactcatagctatgctgcttgtattcaagcaatttgggtaacagcagggcttgtccacgcagaccttgcaccaggcgttccattgcataggcaacgctgtggtgctgcccgccggaaagaatatccgcattcaacaggtttacaagctttcccttcagtatgggtgtcaatgctgcatcctcggccacatttgctgccacgtacaaatccgccacgggccggaacggctccatcaggtcatccgccagattaaattggttcagctcgctgtcatggtgcagtcccaggcacggctgaaaaccatacaccgtcaggcagcgcgccatatagccccgcaaaatcgcgtaggcataattcagtgctgcatttcgcgtatcttcattgcggcgggtgtagccctcaccaaataaagccgggaagtagtacgctgcggcgcttgcctctacgttatctttgtcgccgctcgtcacagccttggcacgcccgaacaggaacgctgcttcctgcgttttgccgcaaagtgcaagacactccgcttggttttgaatttttgctgtcacgacctgctgccacatccgtttttttgccggcagggtcaattccatctgccaacgcagtactcccagctgacggctgtgctgtgcaaacggcagcgagatgccgcacggcagatgtgtttcatcgcaccagaaagtcaccacaccgttttgtgtcaacgccgccatagccgctgttgtgatcgtgctttggcggctttccagtacaatggcactgatgtcctcgatgggcacagagtgaacttcttccgtttcaatcaacagctgctcatttttgcagcggatgcgcgcagggttcacgatcatcagacagcggtaggacataattcacctccgttgggcagggaaggtttgccgtttttcttttttcaccggggtataattgccaaggacatcgacctgatatttctgaaccttttgcaaggtcttaaagccaagaccatctgcaatatatgcatcatcatgcgtagttaccgtgatggcacccgtcgaaatatttccgccttcaaagtatgccagtattttgttcaccggcatttccttttccagtgtactatctctgttttgcaccttgaatttcataaggcgtttgctttcaatgcgtacaaggtcatgctggcaaagtgagaacaagaagttttcttcgtccatttccttccactctgcatagctttttccctgtacaaccgctttattgggcaattccaatttcaccgtatctgccacatagatcggcacccagtaatagccgtcccccggcacacagtacacatcgatgcgtaccatcgtgtcgttatcagccacaccctttccaccatgaaccggaactgtactggtcactttatcgcaaatcttcactttttgaactcgtgccccgggtgtgccatccgcgcgcggcttgtaaaacggttctgcaaacgctttcttcccatccccgccaaaggcaagcaatctggccttcagtgcattgtacagcaatgtatcgctgctgcggttaaagtagcccgcaatttcaccgtccttatccaatttcagttcggtgatattcctacgctgtacaacgtgagtatcgtccaggcgactttttattgtttccttgtgtgccgcgcctgtcaccttatggcgcggcatccgcgatacaaacacaggctgaatagacgaaatatccaccgtcgcataatagaccgggttgatcttcatcaggtcttcctgcgggcaggccgacaatcgctgcctcagctcatcacggaagtgcggccaaggttcggggaagtgctcattacgcaccgccgtcgtctctgcacgcttgcaaaagtcagatacccgctttatcatcccctgtgtcgtacaggcaatcaccgccgcgtctactgcatggtgcagatcgccgtcggcacgcaccttgctaagaccccagcgcttgcgcaaaaacgccgtaacggcgccatttaccgcaacgacccgccgtttgcctgccccggaacagtctgcaaacgcaagatgattgcggatatagttcagcataaaagccgcaatatactgcgtatcctgcaggttgcgctggatatagcccttgccatcctccccgctcagcctttccttcaataggttctggcgcttgcggaaattctttacgtttgctttggtgtacacaataaagtcgtcccgtcgttttccctgcaggtcttgcagcggcagacggtttcccttctgacggttctccgatgccagcaccagcaccttatttgtgcggcggtcatcaaagcttatgctataggggacaatgtggtctacctcggcatagccggagactgtaataaccttgtccagctccaacggctgtatcgaatacgcacagcgcccgtcctgctctttccacagacgatattttacaaggtcctgcccggtaacggtgcgccccggaaaaagctcattcagctctttcatcaggcgttcattttccgcactgttatcccgcatcgccttgtccaactcgctgcgctgctggaagttcttattcatctctcttgccagctccagatggatactgaccggactttcgccctgctcgcggatgatcgcattgacgaccttgatcgtctgtgccactgcacggcgcaccaccgggcttgtaatatcctccatttcctccgttgaggccggcaggaactgcgctttttcgccgttttgccttccctgaaaatcatatccggctgcctggcaggcatcgttatagttcatgccctgttccagataggggatcagcttgcggcacgccttgaccgaaatgtgtccatatcccgcaaagctgggcagcgtcagcagtgcttctatttccagcggttcaaactccgcctgtttcaatgcctcccgcagcttatcctcgttttccgggttcgtcagcgcagctccggcggcatccagctgctcgcggctgatattgcggatatgatccttccgcagggtattcagcgccttacgcatcttgtggtagcaggggagtgccgttattttttctttcttttcgcaggcttctgccgtctgctccccgcgataccgcaccatgttgaaccgtgcttcttccggcagtgccaacgccttgcggatccgggcaaaatccagcttgtccgtctggcagcacacagaaagcaatacctgtcgctctgccggtgtcagcgtgcggctggttccgttttccgcaatgcggatatgattgattttttgcagcagcgtaaaatattcaaacgagaaggccgccttggctgcccgctgctcgctctttccctccagcgtgcaggtgccgaccctgttgctgccgctatacgggctgcctttgcccggaccttccgcaaaggagcgctggcgtgtcagaatacaaaggtactctgcctccatctccggcgaagcccatgtcgcaccgtattgacgctgtgctgcaaaaaccagtctggcctcgtctatgatttggtcgcgcttgacggtggaaagataattttccgctttgttgcgcttgtgctctgcaaacacagggtcgcggtacatcatctcaccgacagtacggtaccggtttgcctccatacgtcgggtgttcgcgtcaattgcctgcagcagcttaccgtctttttgtgcatcgtctgccttgcggttactgcgaaagcccctgcgctgcatcaggtgcagcagtatacgggcaaaatccagtgctgtcaccgggccatccaacgcctgaacacgcagcgcatagacatccggcagatgtcccgcttgcacagcctgctctatttccgccttaccgggcagaccgtttttctccatcagctcgtacagatccgccttgcgcaggctgcggcggcgcagcctgcggcgggcgctgcgggcctcacggcgcggggcagcaaggctgtcgcctgttttgggctgttcggccttatcaaatatgcgtgagccacatcggatcagaccatagggctccgcgttttcattcagtgccaccaccgcccagccgacggacgcaatgccaatatccagaccaattccatagggatgcttcatttttttgcacatcctttcacttttctactatcatagcgcattatggtattattgggcaactgacaatttaaacgaaatttaggcaaaaaagatgacgccctgccaaacagcagggcgtcagagctttacggtcctatgaccttatcatagcaaccataatagttcttggtatggtataagaactgtctgtattatactacattgtcaggcaaagtgcaagaccttacctatgctgccgaaaaatattacggcagctccggtgcataagcctcgagattgcggggcttgccctcgtagacgatggcgatgccgtcggggccggtgttggcgctgacaacgccgccgagctggaacacgatcagcggtgcatggccaaacgcctttttgcacagcttgaccagctcgtcacgcttggcggtgctggacgtgtaggccaccatgtagggcgtgtccttcatcgaatcgacgcggctctccacccatttgatcatggctgcgggcacggcggcgtcgccgcggaccttgctctcgaccttggagacgcccgcattcaggctgatgatggggcggatgcccagcaggtcgccgaccacagcggcggcggcgctgacgcggcccgacttcttcatctgcttcaggctgtaggcggccagacagatctcaacgcagtccagcttctgcttcagctcggccacacaggcggccagctcaccgccgttgcgcaccttgcgggcgcactcgcagaaataccagccgtagggcatcgagtaggtgtggctgtcgatgacctgaatcttcatcgtgtagccggggcgctcctcctccagcagttccatagccttgacggcgttgttgtaggtgctggagccgcccgcgttgatgctcaggtacaccaggtcggtgtagccctcgtccgcatagcgggcgtaaatatcgcagaattgcagctgggtgatggcggcggtggtgggcacgccctgggcgtcgcgcatcatctggtaaaactggtcgttggtaaagtccttgcgctccatgtactccacaccgtcaaggttgatggggaagcccacgacctcgatgccgtacttatccgcaagctcctgcggaatgtcggaacaggaatctgtcagaaaacctatcttgctcattttacatcctcactccattcgtatcgggtcaactgcccgtgggtctccaaaccggcaaaatcccattgacgcaatgcttcgtacacgcccactgccaccgcgttggacaggttcaggcatcgctcgcccctgcgcatcggcatacgcacgcagtcggcctcatgcgcggccagcagctcctcgggcaggccggcatcctcgcgcccaaagacgagatacgcgccgtcggggtaggtcacatccacatggcggcgcgggcccttggacgtgaagtagaaaaacggaccactgtttttggcgaaaaagtccgcctgatcttgataatatgttatatcaagctggtgccaatagtcaagcccggcgcgctttaattttttgtcgtcgatggtaaagcccatcgggccgactatatgcagccgcgctcccgtcaccgcgcaggtccgcgcgatattgccggagttctgcgggatctgcggctcgaccagtacaatgtttaaggttggcataaatttacaagtcctcgttctataactttagccctcccttgggggagggtggcgccgcagcgccgggtgaggggccgggcggcacgccgttcatgggtcggctcccggccacccctccggccttcggccacctcccctctaggggaggcttttcacggcgttatcaatcacacggcatacgccctcaaaatgctgcatcacatccagattggaaaaccgcagcaccctgattccgaagccctccagatattccgtgcgctgtgcatcgtgcagctgtcccgccgcttcataatgctggctgccgtccagctctatcgccagacctgccgcatcgcaataaaaatccagaatataacgtcctacaaccttctgccgtacaaagcgcggcgaatatccgcgcagaaaatcataccacagatggcgttcctcccgcgtcatgctttttcgcagcgctcgggcgttttcaaggacatccttgtctcgcggcagtctcatggtcttactcctgccgcagtttcggcagggcgttctccagccagacgcccagccgctcgtcggctccctcgggcgtctgcctgatgcactcggctacgaaggctgcagctgcctgtacggcagcctgggggacgttgccccgcaaaatgcgcccgacgagcacggcggcaaaaatatcgcccgtgccgtggaacatccgcggctgcagcggcgtttttacggcatagccctcgccgccgcgggccgcgcccacacagcctatgtagcgtccgccgccgatgcccgtcacgccggtcacaacgacctgcggcgccacacgggtcagccgggccgcctgtgcggcggcctgctcggcactgcccacaccgggcagcgggtcgcccagcagcagcgcggcctcggtcacattggggacgatcagatccgccttgctgcacagactatacatagcgggcaccatgtcggcccccaggccgctgtacagccgccctccgtcgcccagcaccgggtccacgaccttgaacgcgcggggccacagctcaaacgcctgctcgacgagctttgcctgcgcggcgtccgccagatagcccgagtagatgcagtcaaatttcacgcccagccgatgataatgttccagtgccgcggggccgtagccggggttggccagcttagccggggtgcctaagccccccgtgtgggtggacagcaccgccgtaggcagtgccacggtctgcacgcccagcgtcgagagcaccggcacgatgaccgacagcgccgcccggccaaagcccggcaggtcatggatggctaatacggttttcggcgcgttggtcatgctgcggccctccccctgcattttttgagttctcattgattctaccataaaaccccccgcaaaaaaagccgtattcgggcgattgttccgttttgtttggtttttgggcaaagagaacaaaaaccgcccgcgtctccgcgagcgattcattctatttcatggttatcatccacaaaaaagcccctgctgattggttcagcaggggagatttcgcaaagttgatgcttttacagcacgcgcacgcggatggcgggttcaatcgcacccagcttgacggcgaggtcgtcggtgacattgcccgtcacgtccagcagggtataggcgacatcctttttgcccttgttcaccatattttcaatgttcaggtgcgcttcggtcaaaatgcccgtgatggccgagatcgcgcccggagcgttcttgtggatgatgcagatgcggcggcctcccacacgcggctggctgacatccggcaggttgacgctgtgggcgatgttgccgtttttcaggtagtcgctcagctcggcggcggccatcacggcgcagttcgtctcgctttccggcgtgctggcacccagatgcggcgtgcagcagacgcccttgacgcccagcagttcctcggtggggaagtcgcagaaatactgcgcgaccttgccgctgttcagtgcgtcgagcagtgctgcgttgtccaccagctcaccgcgggcaaagttcagcacgcgcacgccgtccttgcacatcgccagcgtctgggcgttgatggtgtggcgggtcgtaggcaggtaggggacatggatggtcaggtagtcgcagcggggcagcatatcgcccagcgtgacacagtgctgcacactgcgggacaggctccacgcagcatcgatggaaatatacgggtcatagcccaaaacctccatgcccagcgcgacggcggcgttggccacgcgcgcaccgatggcacccaacccgatgacgcccagcgtcttaccgcgcagctcgggaccgacgaaggcttttttgcccttctccacgtccttggcaatcgtgtcgcgacccttgagggtctgcgcccagttcacggcgtccaccagattgcggctgcccgcgaccagcgcaccgacgacgagctcggccacggcgttggcgttggcgcccggcgtgttgaacacgacgatgcccttgttcgtgcagtcctccacgggaatgttgttcgtaccggcacctgcacgggcgatggccagcaggctgtcgggcagcggggcatcgtgcatatcggcgctgcgcaccagaatgccctgcggtgcagcggcctcgttgtcgatctcaaactggttggcgggcagcttggccagacccaccggcgaaatggcgttcaatgttttgatggtatacatatatcgttactccctgttccccttattttgcgccgtaggggccgggcatgcccggccctcagccttacgcagtgaccctctcacgggtggctgccacagtgccgtgggccggacacgcccggcccctactgtgcagcagctcaatgctccctgcggaacttctccataaagtcgaccagcttgtcgatgccttcggcaggcatggcgttgtagatggacgcacgcataccgcccaccagacggtgacccttcagattgacgaagcctgcctcggtggccgcggcacagaacgccttgtcggtgtcggcgtcggggctggtgaaggtcacattcatcatgctgcggtactttttctcaacgggattcttgtagaagtcctgcccgtcgaggtaatcgtacagcaccttggccttggcggcgttgcgcttctgcatgttctccaggccgccgatctcgttctcaaggtagttcatgacgaggccggtcatgtagatgcaccagcacggcggggtgttgtacatgctgtcggcattcagcagggtcgtgtagttcatcatcgtggggatcttgtcgggggtcaggcccttggcggccttgcccagcaggtcgtcacgcacgatggccacagccataccggcaggggcaatgttcttctgcacgccgaagtagatgacgccgtacttgctgacgtccaccggctcggagcagatcatcgagctcatatctgccaccagcgggatgccgtccacctgcggaacatcgacatattttgtgccgaaaatcgtgttgttctggcagatgtggatatagctggcgttcgggtcatagtcgatggccgcgacgtcggggatgtaggtaaagttcttgtccttgctgctggcggcaatgcgggccgtgccgaacttggcggcctcctcagctgccttcttgctgaagttgccggtcacaagataatccgccgtgccggtggtcataaagttcagcggcaccatcgcaaactgctgggtcgcgccgccctggaaaaagcccaccttataattgtcgggaatgttcagtacccggcgcatagcggcctcggtgttggtgatgatctcgtcaaaccatttactgcggtggctcatctccatcacgctcatgccggagccgtggtagtccagcagctctgcctgtgcggttttcagaacagcctccggcagcatcgaagggccggcgctgaaattgtaaactctagccatctttatttcctcctacagtaaatcaaatgcgacccgccggcggcggatcgcatctgccgcgccgttgcggtatgccaatattataggagctttgcccccctgcgggcaagcggacaaaataccgaaaaaagccgaaaatcggggatgtgtttttgtaatgtgactaattgtttttgtaccggaaacgctttatgagacatttgtaaaagatatttgccgctattgtcaaattccgggcacaaaatttgtgcaatattttgtcttgcatttatatctaccacagatgtaaaatatattcagttcttattaccacatttgtaaaacatcgaacttattttttcctcgctctgtaggagccgcacatgtgcggcccgcagccttcccacagactaccgtctgtcttgcacctgcgggccgggcatgcccggcccctacaggtactacatattataaaaggagttcatcatggaacagctttcccgcagtgaagaacaggtcatggccgcgctctgggcctgcagccgcgccgccaccaggcgcgagatctcgtcacacctgccgcccgaatgccgctgggcagactcgacgctgctcaatttcctgctgcggctcgagaagaaaaacttcgtccgcaccgagaagcagggcaataaaaatctgtacacgccgctggtccgccgcctgacctactgcggcgcggtcagccaagcgcatctgcagacgctctacggcggtgacatccgcgccatggtgtgcgccctggccgacacaggccgcatgacctatgccgacaccgagcgtctgctccgctggctgaccgagtaccaggccgcgaacccggagtatgactatgagtagctccaagccttccccctcgggggaaggtggccccgcagggccggatgagggccagcccaccgcaattacccgtaaacggtctgcagcgattcactccgccctcatcagtccgctttgcggacagcttccccctcgggggaagccctatagtaaatctgcctgcatctcgcacatatcctgccagaaccgtttgggcacatggttcatctgggccttttcgtcgcggcgctgctcgatggtcaacgccttaaagaaccgtttccacatccgctgccaatcgagctctgtctcgtcggtgccgggaatatagcgctccatcgccagatagcgcacctggccgtcccggtgcagcagggccgtgccgtgggccgcgtcataaatcaggaagctctcatcgggcaggcggctgcaaaaatgtccgcgcagcagcggcaaaatccggtgcttcgggtggatgaccgcgccgagcatcccgtcccgctcctcaaagcggatgaactcgatcagcctgcaggcctcgttgtcgacaacccgctccagggcaaacgccgcggcggcgtccgggtcgcccagcatctgcgcggcgcgcggcccctgcgcaaagcagagccgcacaaaccgcagcagtgtcaggtccttgccggggtcggtgcagagaaagcccgtcgtcacgcggtccttcacctcgcggccaagccggtccagccctgccgcgacccgccgcgcgtgctgctcgtcggtaaaaatctgccgcgtgccgaagaaattcagctgtccctcctcgggcgggcagacctcggcggggatttccttccgggcgtagctctcgaacacgcagcacaaaaagcccgcaaagctgccgtcatagcagtaggctgtgtcggtcacatgcgcttcgtaagacattgcagtgcctcctgccgcaccgtccgggcggccacgtccgccgccatgccgcgctcctccagcctttgcacagccggggcagcgtcgggcagggccttgggtacaaaatcgtccagcgaaagctgctgcatccccacgctgaacgccttgggatcaagcagcgcccccgcgatctccgcgcggctgccgcgggccgctgccttgcccttgcaggtaatgaaatactgtgcccgcttaagcacgactcccatgcgcttgagttctgccatgccgaggctttgcacccggcgcgcctcgacaatgcgcagcgcactcttggggccgatgcccggcacccgcagcaactcggcacggctggccgtgttgacctccacggggaaaaactccgggtggcgcacggcccaggtgcacttggggtccaggtaggggtcaaaattcggctcgtcctcggtcagcagctcccgcgccgaaaaatggtagtaccgcagcagccagtccgcctgatacagacggtgctcccgcagcaggggaggggccgtgtgcagtgcgggcaggcggcgatcctccaccaccggcagataggccgagtaaaacacgcgcttcagcgagtatttcctgtagagtccctcggtcaggtccatgatatggcggtctgtctccggcgtcgccccgatgatcatttgggtgctctgccccgccggcgcaaacggcttggccccgcggtagagcaccatctcctttttgctctgcgcactctgcactgcgatctgccccatggggcgcaggatcgcagttttctttttgtcgggggccagcgtggtcaggctcgtctcgctgggcagctcgatattgaccgacaggcggtccgccagccgcccgatcttttcgaccagcatcgggtccgcgccggggatcgtcttggcgtggatgtagccgttaaaatggtactcctcccgcaggatgcgcagagcctcgatcatcagctccatcgtgcggtccggcgtgcccagcacagcgctggacagaaacagcccttcaatataattgcggcggtaaaagccgatggtcagctccgccagctcccgcggggtgaaggtcgcgcggggtctgtcgttggagcggcggttgacgcagtagctgcaatcgtagctgcacacgttggagtagagcaccttcaggagggagacgcaccgcccgtccgccgtgaaggcgtggcagatgcccgccgccgcactgctgcccagtgcaccgtgccgtccggggcgatccaccccgctggaggtacaggctacatcatatttggcgctgtccgccaggatttccagtttttccgcaaggtccatcgcacctgcctcctgaaaaaagggtataaaaaatacagcccgccgcatatccttgttctgcaaggtgtgccgcgggcagcatttttgtaaatttcttctgttttagggttgaaagtccaaattatgggacttacagtatgctataattgaacttgtaaggcagccttaccacttggccttggtctccacgaccttgccggcaatatacaggtggtcgagctcctcgcccttgatgaccatctcctcataggccgggttgaaggggtgcaggatgaccgagttgccgcgctggatgtactttttcagcgtgccctcgccgtctgccccatagaccagaacgccgagatcgccgttgtctagcgtgttctggcggtgtacaagcgccaggtcaccgtcagagatgcgcggttccatgctgtcgcccttgacgacgaggaagaagtagttttccgggtccttgacacaggcatactccttgccgtagtcctcctcaaacgcgagggccccgtatccggcgcgcaccgtgcccacgacggggatctgggactccgtatagcggctgaaggcgttgcggcccacagcggacgccgcgcccgactccttgcgcagacccagcagaacgtcggtgggggtatccagtatctccgccagacgcgccacggtctgcggatccggggtggaacgcccggtctcccacttgccaacagcctgctgcgttacccccagcatcctggacacctcggcctggctgtatcgtttggccttgcgggcctctttcaagcgctctgcaaacatcgggaaaactcctttatataaagtagggtaaaaccacatcttgtagacgatcccatttctttagcttcattatacaaccgtctgtggtttttgtaaagagttttttgcaattattttcaaaaataagttgtaaaaacatattgacaacaacctacagatgtattatagttaaagcaacaaacggaacgctgttatccgttgttgaatttgcggcagtcggccattgcggggtcggctcctttggaggtaacggtatgaactgggaactcatcaagcacaaattttgcaggctcgtggtaacggcgttcctcctgctgggcggcgttatggtgagcgccgcggcctccggcaccatgccgctgtgggctgctctgctgggactttttgctgcggttgtcatgctcaacgcagcctgcggcatcctgctgggcaccccggcagcggagccgcgcagggccgtacctgcccgcaccagccgccccgccgtacaactgtgcgttgtgcgcggcgggcacgctgcctgaatctgcctacccctatttgttgtgaaccttataactgcggcaagccccgcgcagccttggccgcgcggggcttgccgtatcccaaagcctatgttacaatggggaaaaagcaaaaggatgtgacctgacatgaagctgttggaagtctgcgttgacagccttgcctccgcccgcgccgcaaagcaggggggagcggaccgtctggaattttgcagcgcactggccgtgggcggcctgacgccctacgccgacctgttgcggcagatcaaggccgagttggacctgcccgtgcgctgcctgatgcgcccgcgggcgggggatttcctgtacacccgcgacgagctcgagctgctctgccgccagatcgagacgctgcgcagtgccggggcggatggcttcgtcatcggcgcactgacgccggagggtgcgcttgatctgcccgccatgcgcacgctgctggacgcctgcggcggtgcgcccgtcacgctgcatcgctgcatcgacgtttcccgcgatctgtgcgctacctaccgcgacgcggcggcactcggcatcgacacggtgctgacgagcggcggtgccgggagctgccgcaagggcatttcccagctggccgcgctgctgcgcctgcgggacgagctggacggccccgaggtgctgatcggtgccggtgtgaacgccgctgtcatcgacgagctgcgcgcggccctgcccggggcgcgggcgttccatgccagctgcaaaacgctgctggaaagcggtatgaccttccgccgcgagggcgtccccatgggtctgcccgggttggacgaatggcatatccagcagaccgacgccgacgccgtgcgcgccgccaaggccgccgtaatgcggtaagcacgggcagacagcatatctgccctgcacctctgtacaacagcaaaacaaaagtgcctgccgttttttgaaccggcaggcactttttcatttgtcgtcataggggtcatcaaacagaccaaacatcgatgttttttccaaatccgattccgggtaggcacgcaccgggcggatgggccggaattcgtcggttgtctccggccgttctcgcccgtggcggctgcgggggcggctttctgcggccaccgcggtctgtagttcctcgtaaggcagctcatcttcttccggttccagtccgggcgtcagctccatctcctccagcaggctctggatggccgcgcagtcctcgggtacgtccgtcaggctcgcgccgtaatggcaaaacagcaccgtgccgtcccggtccaggatcagcgtcagcggcagctgctgctcggcccccttgacgggctggtagccctgctttttggcctcgcgcaggatgcgccagccctcgagcgagtagctcatcaacgtgcttttgctcgtggggatgctcaagtgctcatacagaacgcccgccgcgtcgcacagcaggggatagggcagcgtgtccgggccaatgctgcgggccagcttgtccgcgcgggagcgcacgaccagcgcaaagccgccgtcgtgcagcgacgtgtatgtatcggcgtagcggctggcaaacgtgcgggtgatgggatggccgaagttcgccatgaacaccagcaccagcggggcctgcgcgtccagcaggtcgcggaagcggttgcccgcgctgtagggcgtatcatacaaaaagaaggggagcctgtccccgacgcggatcctttccgccattgaacaaacacccctttccccgcaaagtataacccaaaaacccggacaggtaaagccctgcccgggatgtgtgctgtaaaaaccccgcacagccgtctgcaaccaatcaaaacctaccggtacaggcaggtgggtaccctacgaggatgttcatgctcccctcttcagccaaacggcgggagggcctgcaatccggtccccgacccggattcccaatatttgattagtaggattctataaggccgcaacaaatcgaaccgcgcagggtgatgaagcctcgcggcctcttactgcaattcagaatcgtcgatgtcgtacatcgcgcgcaggcgctcctcgaacaccttgccgacggtgatgagttcctcatcgtcgtccacgatgtccatatactcgccttcgtcgtcggtgccaatgcgcatcaggatcagctcggcgtcctcctgcaggctctccgggtcctcctgataggggatgacagccagatagcgggtgccgttgacttccgtagcgtcgattacctcaaaggtgacctccttgccgtcctcatcctccagcgtcagcaggtcaggggcagcctcttccagcatttccgggctcagttcgtcagacataagtgacctcctgtggtcgttcgtatttgatagctatagtgtacccttttttttcgcaaacgtcaagggtgttcaagcgggaagttctgtggtataatgaatttaattggatttttcacggaggacccgttatgcgtaaacgattctgtctgctgcccgtgctggcgctggccctgctgtgcgcctgcagcaagggcgcggcaaagaccccgcccacccggcctgcggacttcaccagcaccgagcggcagttcaacccccctgcggacggcgacacgattgcgatctttgacacctccttaggcgaggtgcgcgccgtactctacccggatgccgcgccgatggccgtctacaactttgtaggcctggcccgcagcggttattacgataatacgacgatctggcgcagcgagtacggctttgccgtgcagggcggcgatgccaccggcacaggcacaggcggttcgacgatctggagcaacaacccgtatccgccggaggcgagcgcggatctgaagcattacgccggggcgctctgcgccgcgtttgccgcgggcggcgacgtgaccggcggcaacagtcagttttactttgtgacggccctgccggacagcgtgagcagcagtgaccggcaggctgaactgaccgccaacgactacaccgacgcgcagatcgcggcctacgccgctgtgggcgggctgccgtatcttgacaacaccgacacagtgttcgggcaggtctatcagggcatggacgttgtggacgccatggcctgcgtggacacggtgaaggacgatgacggcaacgacacctaccgccccaccgaggaggccgccatcacgatcaacagcgtaacgatcacgacctacagcagtgccgaggacaacggcctggacactgtgggctgatataagacagtatatgcagacccgcccccgcaaatttttggccgatatgccaaagtttgcgggggcgggttgtctattatgctattttcaaaggcttccccctcgggggaagctgtcaccgaaggtgactgatgagggcaaagtttcctagagccacccgctgacgggctgccgcggcaggctcgcccctcatccggcctcgggcggggcctcggccaccttcccccaagggggaaggctttggggggtcacttcttcgtattcccgcccatacgtctgtcgcggcgggcgtacacggacagggcctcgtcaaaacagtccttcgtgaagtcggggaaaagcgtcggcgtgaagtagaactccgcgtaggcgcactgccacagcaggaagttggagagccgctcctcgccgctggtgcggatcatcaagtccacgggcggcaggtcgcggtagaggtgcttctcaatgaccttctcgtcgatggcctcgggctcgagcgtaccggccttgacctcggcggcaatggcgcgggtcgcatcggtcagctctgcgtggctgccgtagttcaggcagaagttgacaatgcccttttcgttgtcctttgtcaggtccatcatgtagtccatggcgtccagcacgcgctgctgcagaccctcgcggcggccgctgaacaggaccttgcagccgcgctcgttcatctcgtcggcaatcgtgcggaagttattggcaaagaggtccatcaggtagccgacctccttggcgtcgcggctgaaattctcggtggagaaaacatagagcgacagcacaaagacgccgcggtcaccgacggcatagcgggtgatctcgcgcaggcggtcaaagccggccttgtggcccacgctgacgggcagcatgcgctgcttggcccagcggcggttgccgtccacgatgatggcgacatgggtagggaagcggggttcatttgcgttcggcatgttcgtactcctttttatgcttcggggcgaaccagctcgggcggctcctcgtccgggtggtgggcgcgccagttcagaaagctctccagaatgacggcagcggacaccgagtccagccgctccttgcgcttggcaccaaacgtatcgttgtcggccaggatagcggcggcggacacggtggtgcggcgctcatcccacagcacaacaggcacacccgcggtgttggccaggcgctgggcaaagcggcggctcttgttggcacggctgccctcggtgccgtccatgtttttgggcaaaccgcagacgaggccctcggctccgcgggcggcaaagacctcggtcacggcggcggcgaccttgttcatgcttttttcttcgatctgcggcgtgatgggggaggtaatggtctccccggcgtcgcacccggcaagcccggtgcgggaatcgccatagtcaacggcaagccatttcatgggcaggctcctttactttgttatatacaggtattatagcataaaaaacccgccctgaccagcagggcgggagattttgtttgccttggctttgccttcccccgaggggggaaggtggccccgctgggccggatgaggggcgggcttgctacgattgcccgtaaacgggtcagcctggtcagctctgccctcatcagtcaccttcggtgacagcttcccccgagggggaagcccttggggtactgtaacccgcggggcgccgaggacgccgccccctacagcctcagacgagcgagcccttcagccgcttgtccagctgcatggtcagcacggcggcaaggacgatcttgacggcgtcgccgggcaggtagggcaggacgcaccagccaagggcgctgacgaggtcagccccggtcaggatcatgaaccagatcgtgcccagcacgtagcaggcggcacagcccacgaccatcgccacgcagagcgaccagaacttgcggcccagcgccttcgtcagcagggccgtcagcagcgcggtcagaatgtagccgatggcgtagccgccggtcttgccgaagatggcggacgggccgccctggaagttggccagcaccggcacaccgatggccgccagcgcaatgaacacgacctgactggccgtgccccagacagggccaagcatcgtgcccgccatgtagacggcgaacagcgccagattgatcggcacaccccacggcatcgggacggcgatctggctgcacacggcgaccagcgcggtgaacatggcgcacagcaccatgcggcggacgttttcagaagattttgtcatacggataacccctcttttttataataatcgcacacttacctcgccgctgttcaacgcagcgggacggctctcgccgtcaaagcgcacgaccagtttacattcgtcgtcgatgccctgcacctgcgcggcgcgtggcgtgccccggcgcggcgtgaccagcacccgctggccggtcagggcctggcggcggcggtattcgtccagatagccgctgcgcggccctgcgcggtagagcggccagaaggcgttcaggaacgccgccgccagcgcggcccgcgcgcccggggcaggggaaccgtcgtacagcgcccccgccacatcccgcaggtcctccggccagccgtccgccggggctgcgacgttgaagcccagccccagcacggcgtaatccagcataccggattccaggtccagcgcggcctcggtcaggatgccgcagacctttttgccgttcttccacaggtcgttgacccatttgatcgtgatcggcacgccgcacagcctttccgccgcgcgggcggcggccacagcggccatggcggtcaggcccacagcctgccgcgcgccgatctcgggccgcagcaggatgctcatgtacagcccgccgggcggggagtaaaagctgtgcccgccgcgcccgcggcccgctgactgtgcctgcgcgatcagcacaagcccctcccgtgccccggcgtcggccctgctgcgcagggcggcgttggtgccgggcagacggtccacgacctcgatttgcagggctttcaccgtggcctcatccagctgagcggccacggcggcagcattcagaacatcgacactctgcgccagcgtatagccgcggtttgtgacggccttgatcgggataccgtcccggcgcagggcagccacagacttccatacggcggtgcggctcacgccgagctgagcggccagctcctgcccggagatataccgcccgcgcgcagcatccagcgccgccagcacctcctgcttgaccatttttgccgccccctataaacccgactgtaggccagtataccgcaccgccagccggaatgtcaacgttttccccgcgtcagggttgacaatcagggcaaaaaatgtcccgccgggcagacgggaacaacaaaagccccgcaggctctcgcctgcggggcttttgttatgatgcaaacagatttagtaggaaaagtctaaacttagcgctggatacggccggaaccgtcgccgccggccagcttctcgacctcggagacagtgaccatgttgtagtcgccctcgatggagtgcttcagagcggaagcagcaacagcgaactcaacagcgtcctgggtgctcttgccgttcagcagggcgtagatcaggccgccgccgaaggagtcaccgccgccgacgcggtcaatgatgtgcaggtcgtacttcttggagaagcagtactcgttggaggcaacgtcgtacagcatggcgctccagccgttgtcgaaggcagagtggctctcacgcagggtgatggcgaccttctcaaagccgaacttgtcagccagctgcttggcaacgctcttgtagccctcgcggttgatctcgccggcgtagatgtcggtagcctcagcctcgatgccaaagacgtccttcgcatcctcctcgttggagatgcagacgtcaacgtactggcacaggtcggtcatggcagcgcgggcctgctcacgggtccacagcttgccgcggtagttcaggtcgcagctgatcttgacgccatgagccttggcagccttgcaggcctcgcggcagatctcgacaacgttctcgcccagggccggggtgatgccggtgaagtggaaccagtccacgccctcgaagatggcatcccagtcgaagtcggcggtggaggccagctggatggcggagttggcgcggtcatagatgcagacagagccacgctgagaagcgcccttctcgttgaagtagatgccgacacggtcaccgccgcgggtgatcttgctggtgtcaacgccgtagcggcgcaggctgttcacagcggcctgaccgatggcatgagcgggcagcttggtaacgaaggctgcatcgatgccgtagttggccagagaaacagcaacgttggcctcgccgccgccgaagctgaactccaggttgttggcctgaacgaagcgctcatagttgaacggctgcagacggatcatcaattcgccaaaagtaacgactttcatggtgaactccttttactttaataattttataaaataggggagcggggcgtccgggacgccgccccctacagatttacgggtggttttacgccaaaatcagcgctggaccagatggaaggcaaagccggcgatctcgtcagcaaagtagatggcgacggtcttgccgtccttgacattcttgctgtccatgtcaaacttgacgccgcgctggcccaggtggtagatggcgcggtcaacgttgttggtcaggatggcgatgtggccgttggtgccgcggcccggcttcttcatgatctcgaattccttcttgcccacgaagatgctgctgttgccgaccttgacggccatgctcagcaggttggcgatggtctcggcagtcttggcagcctcggcctcgtcagcgcagttgatgccgatgtggcccagctccaggcccagcataacgtcaacggcctcacggctcatagcggtgatctcgtcccaggcaccggccttgatcttgtcgctcttgcacatccaggtgccgccgacggcgacgatctggttgtagcccaggtagttgttgacgttcttggcgttgacgccgccggtgcacatccacttgcaggtcttgagggcagcgccgatgttcttcagcttgtccacgccgccgttggcctcggcagggaagaacttgacgacctcgcagcccatgttcatggcctgctgcatctcgcctgcggtggcggtgccgggcatcatgatgccgcccttgtcgatgacgtgctggcagacctcggggtcaaagccgggggcaacgatgaaggaagcaccggcagccatagcgcggtcagcctgatccttggtcaggacagtgccggcgcccagcagcatatcgggcagctcctcatggatcttcttgatgcaatcctcggcgcaggcggtgcggaaggtgacctccgcagccggcaggccgccggccatcagggccttgcacaggggcagggcctcatccacgctgttgaaagcaatgaccggaataatgccgatctcgtaaacacgctgcaaaacagaattcatagcaattctccttcactgattgtgtgcggcagtccggcgcagtatgcgcagtgatgcccgcacttggttacttttattataaacgcagcggcggcgggcgtcaatcgggcaaaaatgtgaaagaaatcgcacgatttttgtcgcatccgcctaggattccgctattcggaaaagagcttgaaaaatcgggcaaactctgctataatcgttccataatgcggaacggcaggcacagtttgtctgccatgcaaaattgtgaaatttttgttaaatttcatcgggaggccgggatcatggcagaaaaaagcggcgtacaaagcgtggagcgcatctttcagctcattgagcatctggcggcgcaccctacgggggtcagtctgcaaaggctggcagaggagaccgggctggccaaaagcacggtccaccgtctgctggccagtctggtcgggcttggctacgtcgtgcaggacgaggaaaacggccattaccggctgaccttaaaaatgtttgagctgtccagcggcattgtggacagcatggacatcatgggcgtggcgaaggcgcacttagagcggctgtcccagcgcaccggtgaggccgtgcatctcgtcatccgcgacgggcgggacatcgtctacatttataagaccgagagcggcccgatgcggatgtcgagccgtgtcggcctgcgcagtccgctgtactgcacgggcgtcggcaaggcgattctggcgacgctgcccggcgacgagctcgaggacatctggacgcacagcaatgtgcagaaactgacggacaagaccatcactgatctggaggagctgcgcagccagctggtggaggtccgcgcgaacggctacgccatcgacgacgaggagaacgagctgggcgtgcgctgtgtggcggtggcgattcccggggcggacgggcgcgcggaaagtgcgttttccatcagcggtctggcaccctatatgacgcccgagcgaattcgccgcatcgccacgctggcgctggatgcacgaacggatattctggcggatttaggtttgaggtgaaccggggacggctgcctcccggaaggttgttctttcttttgccaacaaaagaaagaaccaaagaaaattgccgctgtttcgacgcagcggacccgcgacttgggggctgcacgcccccaagacccccaaagcggaagtcggaaggcccgacggctaaacggacgcagtattactgtccgttcttaacgccgtcgggccttcctccacttttgagtcgggtgttcccccgaacccccttgggcgcaacggtttctattcccgggttgtttgtaggggccgggcatgcccggcccgcgacttgacgggccttgcattttccggtttgctactccccttttcaaatcgctctgcaggtaggtatcctgccccctccgcggcggccagagggctggccgccctacatagttctcttcactcttcgctgcgatctattccccgcaacagctcctccgccgctaccccgtacagcttcgccagagccagcagattcgttgtgctggggtcggcgctgccgttttcccatttggatacggtctggcggctcacgcccaaagcctcggccacaaagtcctgcgtcatgtggcgttgggtgcggtgctcctttaagctctcacccagcgtgcgcttggcggcctgcttttcctcccgcatctccttgctgccgatgtacttcttcagcgcccgcacgatcagcacaaacagataaatcaccgcggccaccagcgccgcaaaaaccaaaatattgagtgccgtcccccatgttgctaacagcatttttctttcctccttcacggatttttctgttcccagtataccaaatcccgctgctttacgccatcaactatcgcgtacattttcgcttacatcacaaaaaacggcctgtctgtgtcattcccgcagacaggccgtctcctttaaatccgcttaaaactgctccagtattgccagcagcttgtcaaggctgcgctcgttgaactccaaaatcagaatatcgcaccccgggtgcccggccacatccatcgtaaaggtgtcgatatgctcgcgccagctgttcgtgaagcgcgcctgcaggtacggcatgtagtactcgctgaacgaatccccgatgacccgcacggcgcggctgtccttctcaaacatccggtcatagcccggcactacgtaggtctcctcggcgggcagactggcgtagagcgccgccacgtttgccatgtcaccggtggtcgtgccgccggcctcgacggggtagctgtccgccgggcgcgtcggcatatccagcgcctcaaaaatgccgtccagcccgatgagcgcgccgacggcgttccagtgggtgtccgttttgtagtacagcagccggtcggcgttctgccgcgcctggctgcgcagcatgtcataccgccagaccaccggcactgtcgtgtggctctgcagataggccgccagcaggtcggtgcggttttcctcgttcacaatggggtagccgtcaggcatgtactcgcggtagatgcggtccttgctgggcgtcagatccagcaccagcgtgcagccgttttcggccagcttatcactcaagatctgcaagcccgcgctggcctcggccagtgtgtcggcgctgtcgttcagctcggccagcccctgatagtttgccatcggctgcgcggcgttgggtccgtccttgtagaacagccagccgtccttgccgggcagcacctggtcgctctggctcgtgccgaacagcgcgtagtccagcccggcgttcaccagcacaaactgatagcggaacggcgagttatcgaccagaaagttgtcgagattgcgcggcagctcccgcagcgggctttgcagcacctgcggcaggccggtcatcaggcggttttcgtgactgtccatcgacagctgtttggaaaaaatgttgaacaccgggaacgccagcccgatgacggcgcagaacacgccgataaagccaattttgaccgctttacgcatagctctgcacctcccttaaaattgaaaataaataaacgcgctgtaagtgcctgccgtgacgcgcataagtcccagaaacagcagcacgagcagccccgccatcccggcagaggacggcgcctttttcgcgtacaaagccgccttcagcttggggcacagcgcctgcacggggccgcacagcaggaaggacgccgctaaaatcagcagcagcttggtgtccgcaaaggccgccagcgtatagcccttggccccgctctgccatgtaaaaatgcccttgagcacggccagcccctcggacaggcccggcgcaccgaagatcaccagcgtcagccagagcagcaccaccgtgtacaggtgccggagcagtcgcggcagctgctccagcgcccggcgcaggcccaggcgctccatgcacaaaattatgccgtgcagcagaccaaacaccacatactgccacgccgcgccgtgccacagaccggtcagcgcaaagacgatgagcaggttcaggcaggtgcggcgcaggcggcagcggctgccgcccagcggaatgtagacatagtcgcggaaccagctcgacagcgagatatgccagcgccgccagtattcgccgacggagcaggcaagatacggatactcaaagttttccggcagcgtgatgccgaagaactcaccgatgccgatggccatatcgctgtagccggaaaagtcaaaatacagctgcatcatgtaggccgtgtagcccagcacgaggatcggcgtgggcagcgtggccgccgggaccgacgcgactttggcgtaaatcaaagcgagctggtcggcgatgatggccttttttgccaggcccagcacgagccgcttgatgccgtagcagaagcggtccgccgagacgcggcgcgtctcgctgccggggtccaactgcggggcctgctggccgtaccgcacgatgggcccggacggcccgtggccgaagaacgcgaggaacaccgcaaaacggatagggttcttttccgattccaccttgcccgcggccacatcggcacagtagccgatggccgtgaacacgtaaaagctcagccccagcggcagggcgggggagagcaccggcagcagacccggcacaagggcgttgaccgtctccgccgcaaagcccgcatatttaaagccgcccagcaccgccagatccagcaagatcaacaaaatcagcagcggccttttgtgggccagcctccccagcgaaagcccgcccagccagttgataccggccagcagcaccaggatggccgcgccctttaagcccgcccacgcaaaaaacagcagactgaacgcagccagcacggcattgcgcagccacttggggcacagccagtagaccgccagcgacagcggcagaaaaacgaacagaaattgcaccgaagaaaacgccataaaaaacactgctccgcgcggcacagcctgtggcgatgccgcttcataaaaattttacatctgtaaacattataaagggtatgacaaaattcggcaaggtctgcacacaaaaaagttatttttccgtcgctcccgcgcattttgcaggagatagccatagacatctacccccaaaatgactataataaagatgtatatatgtgtaacggaggggtctgtccatggaaaatctgattttcggcgcattcgccacgctggacggctaccgcgagggggacgccgccaatctgggccgcacggtctatgaccgctgcaccgtcgtggcgctgtgcagcgccaaggcgcagaaccctgcctgcacagtggccctgctgacgaatgctcccgtgccggagccgttccgcagccagctgacgcagggcggcgtcgagatctgggactgcccgtttaccacctaccgcgtgcccgccgacaccaattgggcactggcctactacaagctctgcgccatggcgtgggtgctggaaaaccacaactttgcccgcgcggcgatgctcgacctcgacaccttcacccagcgcccgctggacgatctgtggcgggaatgcgacgaggccgtgctgctgtatcaggtcccccacgccgccagccagacgatgaccgccgccatcagccgctgctttgatgcggtggagccggacggcgcaccgcacacgctgacgcactttggcggcgagctggtcgcgggcagcaggacgcggctgaccgattttatatcgctgtgccgtgattattttgaagagctgcaggcaaagggcatcaccccgagagagggtgacgaggccatctggtgcggtgccgcctaccgcagtctgctggccggtaaacccgtgcgcgctgcaaatgcctatatcttccgctactggcttggcgggcatttctactatgtatcgacaaattatacactcgaccccgtctgcatcctgcatctgccgggtgcggcgaaggaccgccagctgaagctgatttacaatggctatgccaggcgtggggttttcccgccgctgaacaaaatctaccgcctgtgcggcctgcccgccgcacatccgccgctgctgcgcaccgtatggacgcggctgctggccaagctgtaaggagctgccatgtccagaaggaaaaatgatttgagccagcggctcgaagctgtcatcaaaacgctggtgccccagcaggagcagaaccccgacgacctcggcccaatgatgcgggccatcaaggccgtgcacagcatcagcgaccacacctcgacgacgcccgaggatctggagcgccagcgcgccgcggaggagctgtttgcgcggctcgtcacgccgggcatcggcatccgcagcgacagcctgacagtggggagcatccccgccgagtgggtcagcctggagcacggccatgaccgccgccacgccgttttgtactgccacggcggcggctacacctgcggccagctggggtacgcccgcattctggccagcaagctggcgctggctaccgggtttgacgtgctctcgtttgagtaccgccttgcgccggagcacccgttccctgcggccattgaggatgccgtggcgatgtgggattatttaatgtatatgggctacggtgcgcgggacgttatcgtcgcgggcgactccgccgggggcaacctggcgctggagctggctttaaagctgaaggagcagggccgtgcccagccgcgcgggctggtgctgttcagcccatggaccgatatgaccgccagcggaaagagctaccgcacctgcaaggcactggacccgatgctgacgatggagtacatcgccgccgtgcgcgaggcctacaccggccccgatgccgactggtcgcgcccgtgctacagcccgctctttgccgacctgcgcggtctgcccccgacgctggtacaggtaggcacaaacgaaattctgaagtccgacagtgagcgccttgtggagaacctgcagaaggccggggtgtacgcccaactggaagtctaccccgagtgctggcatgtattccagcagatgccgatccgcagggccgccgtcgcaatggagagcgcggggcgatttgtgcagaggatcatttgagcgggctataacccgtcagagagcgatagccgcaaggcccgtcggaacccctcaggccggctagcgcggccagctcccctgatggggagcctttttgcgggctgacgcccgcgggataatgcgtccgttaaacactgcgggggttcgggggaactcccgaatttaaggtggaggaaggctcggcggcgttaagaacggacagtaatactgcgtccgtttagccgccgagacttccgacttccgctttggggttcttaggggcgtgcagcccctaagtcgcgggtccgctgcgtcgaaacagcggcagttttctttggttctttcttttgctgccaaaagaaagaacaaccttccgggaggctgccgctcccgtacagccacaaaagaaaggaccatgctcatgtccgattcctggtataaagtcgataacgtcgccaaggtgtttctggctacggtgtcccggcgcgacccgcgggtctttcgtatctcctgcacgctgaacgaggagatcgaccccgatacgctgaatgaggccctgcgcagcaccgcacaggaatggccgcagtttcaggtcacgctgcaccgcggtctgttctggcattattttgagtccaccgaccagctgcccaccgcccagccggaaaccaaagccccctgcgcacctctgtacacgccggagcgccgcaataagctgatctaccgcgtaacgtatttcggggcgcggatcaacctggaaatgttccacgcccttacggacggcaacggcggcctgctctacttaaagtccatcgtgcgcaactatctggcgctgcgccatcccggtgaaatggagaacgttccctcgcccaacagcgcctccgccggggatatggcacaggacagcttccgcaatttttatgagggcaccaagcggaagaaacccgctgaaaagcccaaagtgtaccacccgcacggttttctgccctacagccagctgcagttttttgaaggacatttaagctctaaacaggtgctggaacgttcccacgcgctgggcgtttcgatgacaagctacctgggcgcgtctttcatgctggccatctaccacgatatgcccgcactggaacgcaaaaagccgatctgcatcagcctgcccgtcaacctgcgcaactactatcccagcgagaccgcgcgcaacttcttcaactcggtctacatcgctcatacgctgacgcccgaggacacgctggaaaccgttgccccggtctttgatgccaagctgaaagaggttttaaagcccgagaacattcgcgcccagatggatgcgtatgaaaagctggaacacatacccggcatccgcccggttccgctggtcatcaaaaacgcggcggtcaagtttttcaccaatctggaagaccggcatgtctccgccgttgtctccaacatgggccgggtcagcatcccggagggtatgaagccctatatccacgattttgcagcgttttccagctgtaagacgctgttcactgtggtctgctcctacggggacgaccttgtgctgggcactgcttctgccctgcgcagcaccgccattttgcagcgcctttaccgagagtttgccaaggatgggctggatgttaccctgtacgctacggaggtggaaagatgaatacctgcccgcattgccatatcagggtcggcggggacactgcctactgcccgctgtgccagaaccgcctgtccggccccgccggagagccgtattttccggcaacggccccgcgcatccaccgcgcatccctgctgtataaggtcgtggcgttcgtgctgtcagcgctcatcgtcgtagccggtgcctttgatttcctgctgatggaagacacgccccaccgtcatttcagcattttgatggccgtctgggccgtggcggtcctgcgggtgctgcgcgccgtgctgcgccgccgcttcaacggcccgcggcagatcttcaatctgctgctgctcgtctcggcgctgctcgtctttaccgactggttcaacggctacacggggtacagcttggacctcgtcgtgccgattttgtgctgtgtagcgctggtctgcaactttatttttgccttcctgcgcagccgttttacagcaaacgcgctcgtgtatctgctcatgaacatcggcatcggcgtcctgccgtacattctgctgttcttccgcattgactattccggcaggctggacgcccacagtctgccgtgggtcatctgcctgatcgtaagcgtcatcacgtttctgggccttgtcatcttccgcggcagagccctgaaaaacgaaatcgtaaagcgtctgcacatgtaaccatactccgcgtcggcacagttcacaccggctgacgcaagcggatgcaagcctccacctctgcacgagccaaataaaaaagctgctgtccgcttgagacagcagcattttttatttcttgtcaaacgcttcccggcgctttgtggacaggcggaacatttcctccagcccctcgcggtcatcgcggacgagcttttcccgcatatcctgcagggcgctctcaaacatatcgatctcggaaatcaggttgtccttgttccacaggaacagctccgcccacattttgtcgttgatatgggcaattctcgtcaaatcgcggaaggagtcgcccgtgtagttcgccagctccgagttatcggacgcgcacatcaggctgacggcaatggcatggcagagctggctgacgtagccgatcatgtggtcgtgctcggcgggggtcagcacgctgatgcgcttgaagcccagctccgcggccaggtcgcggcaccagtcgatgcccgcctggctgttcttttccgtcggggtgatgatgaagtttgcgggggcaaagttgacctcggcgctgtgggcgatgccgctcgtctcgcggcccgccatcgggtggctggcgataaattctacaccctccggcagggcggcctgcaccggctcgaccacaccgcgcttgacgccggacacatccgtgaccatcgtgccggggcggatgagtggaccgtactgtttgacccagtccagcagcacggtggggtagaggccgaagatgatgcagtcggcctcccttaccagatcctcaaaatccgcatttttaccggcgcggatgtagtcatgctgcaaggcatagtccagcgtcggctggctgtgggtgatgccggtcacatggtagcccttctggctcagcacctgcgcgtacttgccgcccagcaggcccagaccgacgatcaggtaggttttgcttttatccagcataggaaatcacgcctttatgtcaaattcttcttgtttgtcggtgttcagctccaccttggcgccaagaccgcgcagcacgctccaaaacgcgggccagctcttgtccacggcctcggccccgcagagcagggcgggcaggccgctggcaatcgccgccacagccagcgccatgacgatgcggtggtcgttgtggccggacagtggcgcgttcggcgcgtggagcgccacgccctggatgtgcacggtgtcgccgtccacctcgatgcgcgcgcccatcttccgcagctcggtctgcatggcctcgatgcggtccgattccttcaggcgcaggcggcccgcattgcggatgaccgtctcaccgctgcaaaagcagccgagcgtgaacaaaatcggccctaaatcagggcagtccgccaggtcgatctccgtcgccttcagcaggctgcggtcaaagtgcagcccgccctcgacgggcttgaatttgccgccgcagcgctttaaaatgtccagaatgaccttgtcgccctgctggctgtcggggttcagccccgtgaccgtgatgccgccgatgacgcagcccagcacggccaggaacgcggcctggctgtagtcgccctcgacggcaaaatcgctggccgtataccgctgcggcgcggccacgcggtacatcacactgccgtttttgcgtgcgcggctcgtgaccttgacgccgaactgctgcatggcgtcaaccgtcatatccacgtaggagcggctctcgtagggggccagcacctcgatgctgctctcggactccatcagcggcgcggcaaacagcagaccgctgatgaactggctggacacgtcgccgggcagggtgaacccgccgggacgcagccgtccaaagatcgtgatgccctcgggcgtctgctcaaattgcaggccctggcgctcaaacagcatctggtagatggcctgcgggcggtcaaacagccgccccgcgccggtaaagcgcaccttctgggccgtcaggctgaacagcgggatcatgaaccgcagtgtggaaccgctctcgttgcagaaaaccgggcgtgtcaccgtcacaaagccacccgccgtcccgtgccccttgatggtcacggagtgggcctcctcggtgatttttgcgcccagctgggccgccgcgccaagcgtggcgcggatgtccttgctgtactcgatattcgtgatatggctggtgccctccgccaatgcggcgcacagcaccgcacggtgcgctgcgcttttactggggggcaccgtggtcgttccgcctaagcggctgacatgaattttcgcgtccaatttacatctcccggccgatggcggcagcgaccttgcggcacttggcaattacatcggcgaacttatccggcttcaggcactgggcgccgtcgctccaggcatgcggcgggtcgttgtggacctcgatctccagaccgtcggctccggcggccacagcagccaaagccatgctctcgatgtacttataatcaccggtggcgtggctggggtcaacgataatgggcaggtgcgttttttccttgatgaccggcacggcggacaggtccagcgtgttgcgggtcgcgcgctcaaacgtgcggatgccgcgctcacagaggataacgttctcattgccgccggccatgatgtactcggcggacatgatccactcctcaatggtattcgccaggccgcgcttgagcagaacgggcttgtgcatcttgccgacggccttgagcagctggaagttctgcatattgcgcgcgccgatctgcacaacgtccacatactcctcaaactcggggatgtggacctcgtccatcagctcactgacgataggcaggccggtgatctcgcgggccttgaccatatccaggatgccctcggtgcccagaccctggaaggagtaggggctcgtgcggggcttgtacgcgccgccgcgcaggaagttggcaccgcccgccttgacagccttggccatcttgatggtgtgctcctcgccctcaatgctgcacggaccggccataacggcgatgggcgcattgccgccgacccggacgccgttgatgtccacgacggtatcctccgggtggaacaggcggttggcgcgcttataaggggcggacacacgggtcacgttctcgacccaggggtttgccagcacgtccttctcggcaattttcgtcgtatcaccgacaaggccaaagacgttgtagtcggtaccgcggatcagcgtgacggacaggccctgcttctcgaagttatcgacaatgcggtccagctcgacctggggcgtaccttttttagtggaaataatcatggggagcctctttcttatatactttatatactttttatgctctatagaatattgcgttgcagggaccgatgccaagcatcggcccgccgcctgaaggcttcccccctcgggggaagctgtccgccgcagcggactgatgagggcaaaccttgcgggcactgctccttctcggcgggcctcggaagctctgccctcatccggcgctttgcgccaccttcccccgagggggaaggcttttacagcttttcgtctgtctcaaacagcttcaccgcagcgtccacggcttcgcccagcgtgccgtaattttccagcacggcggtggaggcggcctcatacagcggcgtgcgctcggcttcaagctgctttaaggccgcgccgcccttggagagcgggcgtccgccggtagccaacgcctccagcgggcggcgcacccacagcacggggccgttctggcgcagtgcgcggatgttggccgggctcttgatgaccccgccgccgcaggcgatgacctgactgttgctcttagcgacctcggccagcacgtccgtctcatagcggcggaacgcagcctcgccctcctgggcaaagatgtcggggatattatgcccggtgcggcgctcaatttcagcgtccagatccacaaatttcttgtcaaggcgctttgccagcgccgcgccgacggtggattttccgcagcccggcatcccgatgatcgagacattcgccagctggtgccgcagctcgcggctgaccgccgggatgatggccgccgtgtccaactgtctgccggtaaagtgctccgcggcaaacacagcctgcgccaccagcatctcaaagccgcccgccgcggtcacgccgcagtcctcggcccgcagcaaaagctcggtgcggaagggattgtacaccacatccagcacggcctccagcgcggggaacgccttcgggtcgataaggcactgccccacgttcgggaacatgccgcagggcgtcgtgttgacgatgatctgcacatccgggcggtgcatggcctcgccgtacagcagggcatcgcccttgccggtgcggctggcggtcagaatctccttagccccgccgtcgcggcagaccgccgtgaccgtcgagtgcgtaccgcccgtgcccaggatcagcacggtcttgcccgcaaaatctacgccgtggaccccggccagataggcaaagcccgcgtagtcggtgttatacccatacaatttcccgtcacggttcacaatcgtgttcaccgcgccgatggactgcgccttcgggtcaacgacgtcgcagtaggggatgacaaactgcttgtaggggatcgtcacgttgatggccgcaaaggcgcgcctttccataaaggtgcgggcctcggcctcggtgggcaggggcagcagctcataggtgtaatctgcaattttttcatggatgattttggagtagctgtggcccagcttgccgccaatcaatccgtacagcggttgctgcatagttcttcacttcctgtttttacactttggggaatccgtgcttctgggccagcgtgccgtagcgcacggtcagaaggtccagcagtccgaacgccgtcaggctgttctgcacgacggcggcgcggggcacgatgcaggggtcatggcggcccttgatctgcagctccgcatcggtcctgccgatataatccacggtatgctgttgtttatagatgctgggcgtgggcttgagcaccgtgcggaacacgatgggcattccgttggtgatgccgccgttgatgccgccgttcttgttcgtggcggttgcgattttgccgtcccgcatcgtgaacgggtcgttggcctcgctgccgtgcattgcggcaaagccgaagcccgcgccgaactcaatgcccttgcaggccgggatggcgaacatcaggtgggccagctcgctctcaacgctgtcgaaccacggctcgccgatgcccgcgggcagaccggtcacaatcgtttccagaatgccgccgacgctgtcgccctcgctgcccgcagcgcggatagccgcctgcatggcctcctccttcgacgcatccagcagcgcaaagtgtccgggctgcgggtcgggcatgaccagccccgcagcgctggaaagcggtgcgtcctgcacgcctgcacactcggcaatatgggtgtagacctttacgcccaggccgttcagcaccgtctcgcagatcgtgcccgccgcaacgcttgccgccgtaatgcggcccgagaagtgcccgccgccgcgcgcgtcctgaaagccctcatacttggcgtaggccgtgtagtcggcgtggccggggcgcagcaggtcggcggttttggcgtagtcgccgctgcgggtattcaggttgcggatcatcagggtgacggccgtgccggtggtgcggccctcatacacgccggagaggaactccacggcgtcggcctcggtgcgggcggtagaaagcccatccccgcgggcgcggcggcggtccatggccgcggcaatcgcggtctcatccaccggcaggcccgcggccagcccgtcgagcaccgcccccacggcaggtccatggctctcaccaaaaatcgtcatactgacggcatttccaaaggtgtttttcatatatccttcccgatttttctatgaatggaaaaatggcgatcccggcaagctctctccctccgctctgcgagggggctccggccagcaggccggtgggggagagagccatgccgtcagatgccgttttcctcattccatacctaacaaagccggcagctcggtcatgggcagactgtcggcgcgccagcagccgaggccggggcacttgatgaccgtgatatggtcgccgcgggcctttttgtcatgctgcatataggccaggaccttctccttgttggccccggcgcgggtgggcaggcccagcgcgcggtaaatcgcccgggtgcgcttgagcagggccgtgtcctcgatcatcggcagcatacccagcgcgacgcattcgccgtggtacaggcccgtggtacggcggccccgcacaccgcgcacggcttcgatgccgtggccgatggtgtggccgaagttcaggcaggcgcggacgctgccctcgcgctcgtcctgctcgacgatcttcttcttaaatttcagacttctgtaaacaatttgttcaatgttatcctcggggtgctcgcactcaaacagtgcaaacagctgcgggtctccgatgatgccggtcttgagcgcctcggccaggccgttgacgacctgacggcggggcagggtcttgagcgtgtcaaaatcgacaagcacgaccttgggctgccagaatgcgccgacgatgttcttcgtctcgcccaaatcaatcgccgtcttgccgccgatggaggaatccacctgcgaaagcaccgtcgtggggcagttgacaaagtcaatgccgcgcatgtagctggccgcgcagaagccgcccagatcgcccacaacgccgccgccgacggacaccagcagatccttgcggtccatgccgaacgccagcatagcctgcaaaacctgaccgtagacctttaggcatttgctgccctcgccccgggggatcgtgtagacggtggaatcggggcactgggccgccacggtctgcgcgtactcggcgggtacgccggagtcggtcagcacaaagaccttgcggtttgccacgttcgtgaactgatggaggttggcaaggcatccagccttcaaaataatatcgtagctgcggcttttaagctgcatcgtcagtttcatgcttcgcacatcctttatcttcatggcttatttctccgtactgtcaagggtgaaggcacccagcagccgcagggtgctgcaaacagaagtcagagtgtccagcagggtctggcaccctgcgcccgtgctgcccgctgggcagacgatctgtacatagaaatagtattcaaacggaacatggggcaggggacggctcttgatgcactccatgttaaagccccgcgcgccgatctgatccagcgccgcggccagctggccgggcttatggcgtgccgtgaacagcagcgccagccgctggccctcgccggtcatggcgggggcggcggcggcacgctcgatcacgatgaaccgcgtcgtgttgtcgccgtcggcgttgatgcccgcggacaaaatctgcaggccgtacagcccggcggtctcggcgctggcaatggccgcaacgctcgggtcgttcagctcggccacatggcgggccgcgtcggcggtgttgccccaggtggacgttttaaagccgtgctgctgtacaaaaacactgctctgggccagcgcctgcgggtggctgatgacggtcctgaccgtctccagcgtcgcgcccggcacgcccagcaggtcctgccggatcggcaggtcgcacatccgggcaatgataatatcggggtgggtgtacagcaggtcgagcacggtggagacatcgcccgcgttggagttttcaaacggcagaacgccgaattgtgcatccccgttctgcacggcgtcaaagacctcgccccaggtggtgcaggccgtctcccgcgcaaaggggaaaaggcggcgcagcgcaatgtggctccacgcgccgggcacgccttggtaggcggcggtatcgcggcccagccgggcgcgctggtatgcgcgggaaatgctcatggcatcgctgagaaaggcgcggtagtaggggcgcagcgcctcgtcggtgatgcgggccgtgtttttgtcaagcacggcggcctcccgcgcggcatcaaaaaccggcttgccggtctcggccttgtagcgcaccacatcggccaccgcgcgcatacgccgctcaaacagagcggccatctcggcatcaacggtgtcgatctcggcacgggcttgctgtaaaaggtccatgggtcggctccttttcggaatttttcaggaatatctccgctgcccctttttggcatggatgtagggcggggtgggggcaggccgccctacgaatcacccgcaggcgcagtgttgtttatttatacatactcaaagttagtataccataaataaagcgccgtcacaagagtgacggcgcgaaatttgtcttttcttggccacctcccccgcagagggaggcaagcgcagttttacccgtgcagcgcacttctcagggcggccaggagctcggcctggtaggcggggctgaaggtgccgtgcagcagcttgggcagggcctcctcctgcaggcggcgccagctgtcggcctcgcggcccggcaggatcggcacaaaggccacaccgttggcagcggcggcctgggcgtcgcccatggcgtcgccgaccatcatgaccttgcggctctcgtacccgcaggccagcattgtggcgatggagtttgccttgctgccgacctcctgcccgaagatgacatccgcatgacgggccagcccgtagcgcttccactcgctggcaatggcgctctcgttcgcggcactgacgacggccacatcggccacggcgtgcagctggcgcaggctttcctccacgccggggaacggctcaaacgtcggctccagcgcctgaatacggcggttgcaggcgttgttccactcctgcagcttgcgcagggccaggctgccggtcttttgcagctcccgctgcaggctggccgtggaaagctccgtcgcggtatcgacccaggcggcaatatcctcgctgcccgggatctcgatgccgcggtttttcaaccggtcaaacaccagccggacgctctcaaaccgggagatgccgcgggtgatcgtgtgcaggttgatctcatcccacgcggcagtgatgaaatccgcgtggtcatccagcgcaaacacgcggatgagctcggggcacatgacggtggaatgcttgatgcgcaccgtgtccatcacgcagccgtcggaatccatgcaaatcagaaattcacgtttcttggtaaaatccgtcagtgcatttgccataaaaaccgtctccctctatcaactctgcctataaactcaatatgaatctatcataacaaaattccacggcgttttgcaatgccttttttaaaaaaagcatggatttttgtgtaatttctacacttcaatgggggcatcggggtccagcgtgcggccaatcggagcgtggatcagcagattggccattgcgtccgccggggtgggctgcttgttgatgacaacaaggttctccccgcggaagtagcgcagcagacccgccgccgggtagacggccaggcttgtgccgccgacgatgagggtgtcggcctcgcggatggcgtgcacggcgttttccatcgtctcctcgtccagcccctcctcgtagagcacaacatcgggcttgacgatgccgccgcactcgtcgcagcggggcacgccgtcgccgacgcccgccgcatcctcaatgaactgcaccgggaagaatttgccgcaccgcgtacagtagttgcgcagggtcgagccgtgcagctcatacacggtcttgctgcccgcggcctggtgcaggccgtcgatgttctgggtcacgacggccctgcatttgccctcgcgctccaacgccgccagacgcaggtgggccgcgttgggctttgccccgtggacgatgagcttctggcggtagaagtcaaaaaactctgcggtgtgggtctcgtagaaggtgtgggagagcatcgtctcgggcgggtacttgaatttttggtggtacagcccgtccaccgagcggaaatcggggatgccgctctcggtcgagacgccagccccgccgaaaaagaccatgctttttgttgctgccagaattttctctaatgccgaaaccatgcaaactgcccctttcgcttttggcttttatgccttataatatacctattataatctattttcggagggatgcaagatgcagcgcgaaatcacacgggagctggtgcgccggctgctgcccgggcgcatggcggagagcaacaaggggagctacggcagtgtgctggccgcggcgggcagcatggcctaccgcggggcggcggcgctctgcaccgagggcgctttgcgcggcggggccgggctggtgtatctggccagcgtcgagcctgttatccagctggtactttcccgcacgccggaatgctgcgcctgcggctgccgcacggcggccaacgggggcatccacccgcaggacgccgacgcgctgcgccgctggttcgcggacaggcacgccgttttgctggccgggcccgggttgggggagagcgccgccgatgtctgtaaggccctgctcggcaggaacgccccgtgggccggtgccgtgctggacgccgacgcactgaacgcactggcagcggggaagtacaggggggatctgcccgcaagcacgatcctgacgccccaccccggcgaggccgcgcggctgctgggcctgactgtgcccgaggtgcaggcggaccgcgagggtgccgccgtatcgctggccgaaaaatatcactgcgtcgccgttttgaaagggcatcacacactggttgccgcgccggacggcacggtctggcgcaatgagaccggcaatgccgggttagccaagggcggcagcggggatattttagccggtctgaccgccgggctgctggcagcgggtctaaagcagagccgcacgcccgaggacgccgcggtctgcgcggtatggctccacggcgccgctgcagaccgctgcgccaagcgccgcagcatgaccgccatgctgccgggggatctatttgaagatttagggtggattttgggggagctgggacggtaaggctgcggaccgaaaggcggcaggcggaggaaggctgcagcggggtgagggcaccccgccctacaggtggacgggaagtttgtggtaatggggtctgacgagatataaggcaaggcccgtcaaagcccctcaggcctcgcaggctcggccagtccttcggacccgaacccctctgtcgcttcgcgacatctccccgcgcagcggggagtcaccccactgcgtgaggagccttttacgcgggcaaagcccgcgagagaagcctcccctttcaggggaggtggccgcgaagcaggccggaagggttcagcccgttgacgggggcatagcaaagtcgcgggccgggcatgcccggcccctacggactgctgtgaatgggttgcgaacgagaggggcaagggagggcggcagcccgcccctttgcagttggcgggcggtgacgcaaagcccgtcgagacccttcaggcctcgcaagctcggccagctcccctgatggggagccttttgcgggctgccgcccgagattatcgcagccgttaaaaacaacgggggttcgagggaactcccgaatttcgaaacggagcagagggcgcgggcgttaagcgcgaacagtaatactgcgttcgcgtagcccgcgccctctgcgacctccactttgggaatccaaggggcgtgtagccccttggtcgcgggtccgctgcgtcgaaacagcggcagttttctttggttctttcttttgctgccaaaagaaagaacaacctcccgggaggcagccgttcccggtcttgccacccgcccctatagggtgtataataggactatatctgccagactcaggaaaggagccgctgttatgtcgcgcaaagaaggccagaaacgcaaactgcttgttcttttggagatcctcgcccgggaaaccgacgagaagcaccccttgagtgttccccagctggtggaaaaattgcaggagcacggcgtcgtcgccgagcgcaaaagcgtctacgatgacctgaacaccttaaacaacctgcccgacaccaaatatgagatcgtgcagcagcgcgggcgcggcggcggctactatatgaccgatgctccgtttgagcttgccgagctcaagctgctcgtcgatgccgtctacgccagcaaattcatcacggcgcgcaaatccaaaatcctgatcgataagctcggccagttcacctccacataccggcaggaagagctggaccgtaaggtactggtcagcgggcgtatcaagagcaccgacgagaagatcctgtacaccgtcgatgcgctgcacgccgccatcacggcaggggagcaggtcaccttcaaatactgcgactggaacctgcaaaagcggatggccccgcgccacgacggccagctctaccgcgtcagcccgtgggtgctcgtgtgggagaacggcaactattatttgatcgcctacaccgagggacggctcaagcactaccgcgtcgacaagatgcagaacgttcaccagctgcccgacacgacccgcgagggtgccggggaatacgccaatttcgacgtcaatacgtatatgcagcagatgttcggcatgttcaacggcccgctcaagcgggtaacgctgcaatgcgagaaccgctttgccggggcgatgatcgatcggttcggcaccgcgccgatcctgacaccctgcgccgacggcgagcactttacgatgaccgccgagattcaggtcagcccgcagttcttcggctgggtggccgggttcggcaccggcgtcgtcgtctccggcccgccggaggtccgcgccgaaatgaagaaaacgctggatcaactgcaggagctttaccgctgatttgcaataccggcgtaaatatggtaaaatagattgtttaaatctatcaccgtagggagggcatcacctcttgctggaaaagaaccaacgcttcaaaagccttttgtatgtgctggcggacgcggcactgcttttcatcggctttttgcttgccaactatatccgtttcaattacgtccgctactttgagccgggcggcgcagggcctgcgctggccgtggctcgggacccgcgcaacatcattgccgggctggccacgtcgctggtgctcgtgctcatctactgggtcgccggtatctacagcaccacgcggctgcgcggcctggccgagcgctgcaccaaaattgccgtcatcaacgcggcgggactgttgatcttcattggtgctttgtatctgatgcacctggacgactactcccgtatcgtactggcgctgttctacatcctcggcacggcaggcgtcgtgatcgagcgtatggtcctgcgctgggtagaccgcgcccgccgccgcaaggggctgggtctgcgccatatcctgctggtgggcggcggtaaatccgccgcgctctatctgcgcgcgctcgagcacaacccctactacggctttgtcgtggacggctatctggccggaatcgaagaaccgggtcttggtgtgcgctacatgggcagctatgatgcgctgtccgcccggctcgacgaggttgccgtcgatgaggtcgtcgtagcgctggaggctgacgagatcgaattgctgccccacgtttttgccgcctgcgacaaaaacggcgtgcgcatcacgatggtaccgttctacagcgactatctgcccgcccggcccaccattgacgtgctggacgagtgcaagcttatcaatgtgcggcagacgccgtttgacaatctgctcaacgccgctgtcaagcgcgggcttgatattatcggcagcctgatcctgatcattctgaccagtccggtcatgctggtcacggccatcggcgtcaagctgtccagccccgggccggtcatcttcaggcaggagcgcatcggcctgaacaaaaagcccttcatgatgtataagttccgctcgatgcgggtcaatgtgcagcaggagaccggctggtccaccgactgcgacccgcgcaagacccacttcggcagctttatccgcaagttcagcctggacgagctgccccagttcttcaacgtgctgaaaggggatatgtccctcgtcgggccgcggcccgaggtgccctaccatgtggagcattttaaagaggagattccgcgctaccttgtgcgccagcaggtccgccccggctgcacgggctgggcgcagatccacggcctgcgcggcgacaccgacattgccgagcgcatccgctacgacatctggtacatcgaaaactggaccgtggcgctggacatcaagatcatcttccgcaccgtgttcggcggcaagatggtcaacgacgaaaaactacaataacgccctgtgcgttaccggacgggagtgtctgtaatgagcaaaaaggagcccaaggtcgccatcgttcacgactggcttgtcggctacgccggcggggaccgcgttgtggacgccatgaagcgcgttttccccgatgccgtcatctacacccttgtgtacgaccccaaaaacatgcccgagcactttaaaagctatgacatccgcacgagctggttccagaaggtgcccttctccaacaggctgtacaaggccatgctgccgctgatgccccgcgcgtttgaggcgttcgacctgaccgagtacgatctggtgctgtcgtcgtcctcctcctgttccaaaggcgtcatcacccgcccggatgccgtacacatctgctactgccacacgccgatccgttatgtgtgggatttttactacacctaccgtgacaacgccaactggctggcgaagctcgtcatgcccggccagatgcacaaaatgcgcatctgggacaagtgcgccgcggaccgcgtggattatttcatcgccaactcgcattatatcgcccagcgcatcaaaaaatattaccggcgtgacagcgatgtcatttacccctgctgccacatcaacgagtcgccttttgtcgaaaaggaggacttctacctgactgtgggccgtctgacctggtacaagcgcgtggatctggccgtgcaggcctgcacgcgccttaacaagcgcctcgtcgtcatcggcggcgggggagagctggacaaactcagggctatggccgggccgaccatcgagttcaagggcggcggtctgtccgacgaagaagtgcgcagctactacctgcgcgcgaagggctttcttttcccgggtgaagaggactttggcatcacccccgtcgaggcccagagcgcgggcacgccggtgctggcctatggccgcggcggcgcgtgcgagagcgtgctgcccggcaggaccggctactggtttaaagagcagaccgtcgagagcctgaccgactgcatcgaacggtttgagcgcgacggcgtggcctgttccaaagaggaaatccgtgagcacagccgctccttcagcgaggaacgctttgagcgcgagctgaaggaatactgcctgcgccgcatggccgactggcagcaggagctgctcgactgctcccactgggagaaggaggaactggattgaaccctatcgtcatcaacggcacggtactgtgtgacaatatcaccggcatcccgcgctatgtctatgagaatgtcgtccggctggacaagctgatcgagggcaccggcctggatgtccgcattgcctaccgcgacgacgggcggcccatccatctgccggagctgaaaaacatccggctggtgccgctcaagtccatcccgtatttttacaatctggccgtgctgcccgcctacctgcgccgcacccatgcgttttacgtgggccttgccagcgatatgctgctgacccgccgcagcgtcgtggtgctgcacgacatccgcccgctggtcatggataccgacaagggctttttccgcttcaagttctgggtacactgcctgtccaccaaatggttcgcccagcgggtgttcacggtcagcgacaaccagcggcacctcatcagcgagaagctcggcatcccgctggacaagatcggcatcacctacaacggctgggagcacatgaagaacgtcacccccgacgagagcatttttgacaagatgcccggcgtcaaaaaaggggagtacttctacgccctcggcagtttggcaaagcataaaaacttcaagtggatccgagaggtcgcccgccgcagccccgacaagacgtttgtcgtcgcgggcggcaaggacctgcgtgcctttggcgacgacaccgaggcgaaggacacccacaatgtgttttacccgggctatgtgtccgatgccgagaacgccgcgctgatgaagcactgcaagctgtttttgcaccccgccgtgttcgagggctttggcatcccgccgctggaggcgctggccctgggcgcgccggtcgcgctggccaacgccacctgcctgcccgagctgtacggcgatacggcgcggtattttgacccgtatgattatgatgtggatcttgacgcgctggccgcccagcccgtggccgcgcccgacgaggtcctgaaaaagtacagctgggacaagaccgccgagttctggctgcacgagatggagaagtatgcaaagcagtaacagcataaaccataaactaggagaacttctatgaaatttatttctcccccatccaaagggacttcacttacattcaagtgcaaagtcggtaccactgttatttggctgcttttgggggctgttttaggctatttgttcttagttattgcgttctgcctgcccactaatcgtatgcgcagtcacttagagagcacacctgatgttttttataacggttctgttgccctcgtaaaggatgatttagctacgcatttggattacttaacagaagcaactattttatccgaagctatctatgatggaaatgaaagtccttttgtgaaggctgccgccatttattccgtccttccaccagagggagatgaaaattggtcttatcgaaagctaatttcttcactcagtgcaaccaacgaatctgcccacggcccatatgatcgttattggcagggtcagttggccattttgagaccacttcttctgttgctggattacaaagatatcttacgcttgaatacgcttgttcagcttttcttaatgttatggattgctcatctgttatcctgtcattcattaactcaccttctttttcctctggcactaatgttctgctctttaaccccgatagctacaggcatctgccttcaatatactccgtgttttctcattatggctattggctgtgttgttcttctacgccatacaaatataataaataaatttaattggttgtttttcttatcacttggcatggcaacaagttattttgattttctgacatatccgcttgttaccttaggaatccccctcattctgtatttacagttagagacaagttctccttctcaacgttttttccaaattacaacttgctctttatcgtggggcattggttatattggattctgggcagaaaaatggttgcttggttctgtcatcttgcaggaaaacctcttttctgaagcatataacagcattattctccgttcttctcatgaaacactggggcaaaccataacctatatggctaccctaaaaaacaatcttcaggcatacgatttacgtacgtggaaaattctttggcttcttcttttcttagttactatcgtattggctttacaccgccattgtttgactttgcataatattttagctttctcccctttatgcttagttgcttgtatgccttttgtgtggtactattttacacagaatcactcctatattcacttcggtttcacacatcgtgaactctctattacatttttcgcacttagctgttttctggttcagctttgtaattcagctcatatcgaacccaagcaaaaaatataggctctgcaacaacttcaccgatggaaccgctgcactagccatatagcctgttgccacccttgatgcagtgctggaaaagtacagctggaaccgcatcgccaatttctggctgcacgagatggagaagtatgcaaagcagtgaagcggcagctcccgcagggtaaggcccctcaggcctcgcaagctcggccagctccccaccctgtggggagcctttcacgggcgtacgcccgaaaaaagcctcccccttcaggggaggtggtcgagcgccagcgatgatcggaagggctctggccatttcccgctgccacatcacccatcccacaaaaggaggagcattattcttatgtttattataatcgccctgctcctcaccgtgctcgtctccggcatcttcggtgcggttcctgcggtagtatcccgccgcagggtttcccgccgcgacgctgcctgggccgccgggctctggctggccgtctgggtgttcgctctgtgcgcctaccaccgccccgggctgaccgtcggcttccatgcgttccggctcgtcgccctcaccgccatgaccggctgggcggggcttgtcaccgccgggctgcgcagcctcgggcgcaaagggttaaaggccgtcgtcccgctgctggccgtcacggcgctggggctggaggtgttcgtcggcaatgtggcctacttcaacacccacagctacacgccgtttcagctcgtcgattaccttgacgacaacatcaacgtcgggcgcggcgtcggcacgatctcgctcgacgagggccgcacctatctgcggtttctcgacattgaccagcccatctacaacctgcggtttgacggtctggtcagcgacgacaccgagccgctccacgccgacagcgccgtgatcttcaccattgagggcaccgacgccgccaacaccgagctgacccgcttcggcagctggcaggtggggctgcaggccccgcgcacccaggtcatcagcttggacctgaccggctccgtcgggatgctgacgctgaccgctgccgggtacagctccacctacgcgcagttcccggtggcgctgaccttccgcggcatcacggccaacgcgccgcgcgcgctggatttctcgattttgcgcttctgcgcggtatttctggcgctgctggccgtctacggcctgcgcccggccagcgggctgtggcaccgccgctggctggcgggcaacgtctgtgaccgcgccgcagccgccgtgctgggccttgtgctggctgccttcgtcgtggtcatcccgttctgggagccgagcaacaccggccttgccacaaaagattacaacaccgcgttctgggacggggagagcacggtcagcttcgtctaccagcagtacggcgcgctggcgcacagcctgctgaacgggcgccttgacctggaggccgacccgcccgccgagctgctggcgctggacaacccctacgatgccggggcgcgcgacgccgcgcaaatcaacgacatccactgggaccacgccttttacaatgggcgctactacgtctattttggtattgtaccgtgtcttttgttccagctgccgtttgaggcactgaccggcatccagaacctggcctatgcgccctgcatggtcctgctggggctgatcttcctcgccgcctgcttcggcgtcgtcgggcaggccgtgcgccggtggttcccgcaggcgtccaccgcagcgtacctgctggccgtggccgccgtagcgctgggcagtcagttctactatctgttgctgcgcccctacatttatgaatatgccatcctctgcggtgcggcgctgctgatgctggggctttggctctggctctccgccgccagcacgccggtggaaaagcgcggtgcgctggtcgtcaagctcgtcttcggcagcctctgcgtggcgctcgtcgccgggtgccgcccccagatggagctgtttgcgtttttggccgtgcccatcttctggccgcggtacatcgggcagaagcggctgcgcagccgcgccggggcaggggaggccgccgcgttcctgctgccggtggtgctggtcgctgccgggctcatgtggtacaacgctgcgcggttcggctcgccctttgactttggcgccaactacaacctgaccggcaacgatatgacccagcgcggcttcaacgccgtgcgcatcggcccggctgtgttcacgagtctgttcgagctgcccagctggcagggtgttttcccgttcctgcgggagaccgacgtccagacgaacgccgtcatccgcacgatcagcgagaagttcacgggcggcattctggccgccacgccgtacctgtgggtgctggcgctgccgctgcttcccgcgttccgccactgtctgcaccgccgccgtgtcaccgcctgtgtggtctacggcagcctggccgccatggtcgtcatgaccgtcgttgactgcgagatggccggggtgctctaccgttatctaatggattacagccccgtgctgctgcttggtgcggcgctgtgctggttctgcgccgagggcgcactctcccgccgcgcagcgctgggggagggcactgccgctgcggcgctgcccgcactacgtaccgtcatggccgccgctgtggcatataccgccatctaccgcttctgcacgctcttcgccatggagccgtatctgcagggcatgaatccttccctttactacaccgtcagccgccttgttcaattctggatgtaaaatccgcccggaggtcctgttattatggataaaatcgccgttttgatcccctgctacaacgagtccaagactgtcgagaaggtcgtctcggatttccgccgcgtcctgcccgacgccaccgtctacgtctacgacaacaattccaccgacggcacggccgagctggccgccggagccggggccgttgtccgccacgagtaccagcagggcaagggcaatgtcatgcgccgcatgttccgcgagatcgacgcagaggcgtacattcttgtggacggcgacgacacctaccctgcggaggccgcgcccgagatggtcgctgccgtgaccgggcgtcaggccgacatggtcgtcggtgaccgcctgtccagcacctactacacccagaacaagcgcccgttccacaacttcggcaacgatctggtgcggttcttcacaaatcatttgtttggcggcaagatcaaggatattatgaccggctaccgcgcgttcagctaccagttcgtcaagacctatcccgtgctgtcccgcgggtttgagatcgagaccgagatgacgatccacgccctgcagcgcaatatgcaggtcgagaacgttgtcattgactaccgtgaccgtccggaagggtcggagagcaagctgaacacctactccgacggctttaaagtattgggcacgattgcgcggctgttcaagaactaccgcccgttcagctttttcggcattctggccgcgatcctggccgtgttcggcatcggctttatgatcccggtgctgggcgagtatttccggaccggccttgtgccgcgcttcccgactttgatcgtctgctgctttgtgctggtggcggcgctgctgctgtttatctcgggcatcatcctctcgagccagcttgccaaggatgcccgcgactttgagttccagctgcagaccgtgcatcattggcacagtgaaaagaaataagccttccccctcgggggaaggtggccgaggccccgcccgaggccggatgaggggcaagcctgcggcagccgcccgtttacgggctttctccgtaagctctcccctcatccgtcacctgcggtgacagcttcccccctcaggggaagctcttttgccccagcccgcaaaccgggacacccggtctgcgggcttcttgctttttggggcgcaatgggctataatagttttatatgtgcgcactgcacatactacgtacaacaaagagggactatcaagggagtatatacattatgacgaaaattgccgcatcgatcctgtctgctgattttgccaacctgaagcatgactgcacccgcctgttggaggccggtgtcgacctgatgcactttgacgtgatggacgggcactttgtacccaatatcagctacggcgcgccggtgctgaaatgcctgcatgccgctatgcccgacgtctactacgacgtccacctgatgatcagtgacccggcccgctacgccgccgactttgccagggcaggggccagcctcatcaccttccaccttgaagctgtgccggacacggcagaggaggtcatcgccgctatccgcgctgcgggctgccaggtcggcatcagcatccgccccggcacgccggtggaagctgttttcccgtatctgggcgttgtcgatctgatcctggtcatgagcgtggagcccggtttcggcgggcagaagttcatccccaccacccccacgcgcattgccgccatctgtgccgagcgcacccgccgcggctgtgataccctgatcgaggtggacggcggcatcaacaccgagaccggccccctgtgcatcgctgccggggccgactggcttgtggccggaagttcgctgttccatgccatggatcctgccgctgtggtaaacgtcctgcacagcaagtaaaggagctttttccctatgcccaatcgtaaaaaagttgaacgcagcgcgaactacagctactacagtgacctgctgtggtgcacagtcccgctgatcggcatgtcgtggtattactacggtgcgcgcccggtgcttttgctgctggccgcactgctgaccgcctacctgtgcgactgtgccctggccccgttgcacggcacgggctaccagtcccatgagccgtccagtgagtgctttgccgcgctcatcgcgctgctgatgcctgccagcatctcgtatcccatcgtcatttccgccgtcatcgtcgccgtgctcgtcaaggaggcgttcggcggcgagggccactatccgttccatcccgccgccgtcggcgtcgtcgtggccggtatctcgtggccgcaggacgtcttttcgtaccccattcccggcacgcagctgccgctgttcggcagcgtgaacaccactctcgtcgagggcatgaacgccactctgcgggatggcggtctgcccagtgccagcacgatgaacctgctgaccggcaacgtctccgccgccatgggcaccagcgcagcgctggtcgtgatggcctgcgggctgttcctgcttgtgcgcgggcacatcaagctttctgtcgttattccgttctttatctttgtcatcggcctgccgtggttcttcccgaatctgaacgagctgccgaccttcagcctgccgtgggaatatatccgccagcgcttctatctggaaaaatatgtcgtcctgtccggcacggcactgttcaccggcctgttcctgatctgtgagccggtcacgatgccggaccgccgcatgagccgcatcatctacggcgcggcgctgggcatcatgacctatgtgttccgcgtgttcagcccgtatgagtgcgcggcctgctgtgcgctgctgatcgtcagctccatccccgaatggctcgacctcatcagccaccgcaccgaacgcatccgctttatgagagaggaggagcagcgccttgccaattcaacaaaacccgaataagcgccggggcgaggagcgctccgagaccttaattatcccgcacatcaccagggagatgctcgaggtcgcccgcgccatggcggagaagggtgcctcccgcgccgagatcgaggccgcccttgccgccatgcagaccggcaaggcgcccgccgccccggcggcccctgcaccggaaaagcagcccggcgcaccgcagcagcccgcgcccgggtgcagtgatgccgcccgcagcggcggcatcatcccgacgagccgcccgcggtacaccgccgcggagcgccgcgccatgctggaggaggtccagcgccgccaggctgagcgcgaggccgcccgccaggcggaagcccaggccgaggaggatcggttccgcagctaccgggaccgggagtacggcaggagccccgcggtcacaccgtccgcagcaccccagcccactcccgctgcccacagcggccagacgcccgcagcagctgacgagacccgcacgatctcgatcccgaagcgcagaactgccgagcctgccgagcctgtcgcccatgccgtgcagccccctgcacccgcggcacagcccgcccagcagcccacgcaggtcatgccgccggtacaaagggcggcccctgcggcaccggctgcgcccgccccggcagagcacaccgcccacccggagccgacccctgcgccgaagtccaaaaaagccagcgtctcgcgttcctacgccgcggcggaggctgccctgaacgagcgcatccgcgccgaccatatctggctgtccaaccccgtgcttgtgcgcggcctcggcatggccccggtcatcggtgccgcgctggacggtcggcgggcgctcatgctctgtatcgcctcgctgattttggtcaccttcacccgtgtgctggccgtggccatctgccatctgacaaagaaccgcttccgccccgtggtgtactgctactctgcggcgcttctctacatccctacgtatgttttgctctacgcactgttcggctctgacctgacgctgctgggcatctacctgccgatcatggtcgtggagcccgccatcgtcaagcgcatggagttctccgaccttgaacccgtgagggatgcgttccgccacggcttcaacaacgcactcggcatgtgtgttgtgctgctcatcgtgggctgcctgcgtgagctgctggccacgggcgcggtctttggcaacgtcatcctgcacaatgcgctgctgccgctggctgcactgcccgcgggcggctttgtcatcgtgggtatcctggccgccatctggtgcgccgctgccaacctgtacaccgattataaacatgaggaggtgcgccgcctgtatgctgaccgtaagcactgagctgcagccgattttaaacggtattgtgcagtttatcagctatatggtgctggccgtctttgcggagaatgtcatcctggcccgcgcgctgggcgtcacccgcctgatgaagctcgtgcccgaccaccgtgcgcaggtgtgggatttctgcctgccgctgctgctggtcatcacgctgtccgcacctgccggctgggccgcacacgacctgtttttcccgtggctgcgtgattatctgcccgcatggttgcccatctcggccctgcggcccatcgtctacctgacctgcggcatcgcggccatggccgtggcctggctgctgctgggcatgctgccccgcaggctgcgcgccagctgccgcagccaactcagccttgccacctgcagcaccgccgtgctgggcacgatgctcatctgcgcgaaccagaactatacgattttgcaaagcgtcgcgttcgctctgggcagcgggctgggctatgtcttcgccgtctttatcgttcgggagggccgccgccgtctgcgcagcaaggccatctcctcgatcttccagggtctgcccagctcgatgatctacgtcggcgtgctgtcgctggcgatctacgccctggttggccacaccgttgttctgtaactgttagggggtcgttgttatgtccgaagcctgctttaccgcagccgatattttactgcccgctgccggggtcccgctggacccgtgggcctgcattgccgttgaccagttcacctcccagccggagtactggcagcgcgccgagcacctggccgacggcaagcccagcaccctgcacattgttctgccggaggcgtacttaggcaccccgcacgaggccgagcgcttagagagcatccgccgcacgatggaggagtaccgcaagtccgttctgacccggaaagtacatggctacgtttatgttgagcgtacccagatggacggcacggtccggcagggccttgtcggcgctgtcgatcttgatgcctacgactacgcgaagggctccaagcccgccatccgcccgagcgagagcaccgtcgtggagcgcatcccgccgcgcctcaaggtccgccgcggggcgacgctggaaacgccccacgtcatgatgctggccgacgacgccgactgcacgctgatcgagcccatcgggctgatgaagaaccagttgccgccgctctacgacggtgagctgatgctgggcggcgggcatctgcgcggctgggccgtcgaggaccccgcgctgatcgccgggatcgacgccgcgctggcggcgctggccgaccctgccgcctttgcccgccgctggcccgctgccaaagggcagcagccgatggtactggccgtcggtgacggcaatcacagcctggccaccgccaaagcctactgggaggagctgaagcccaccctgagcgaggagcagcgcaggacccatccggcgcgctggtgcctggccgaggtctgcaacgtccacagccccgccattgagatcgagccgatccaccgcgtcgtgttcggcgtcggtgccaaggagctgtatgccgcgctcgacgcctgggaccagcagcaggggagcagtacgacgatgtccgaccagcgtctgcgcctggccgatgcccacggcgagagtgccgtcgcgctggccaacccacccgcgccgctgaccgtcggcagtgtggaggcatttctggcggacttcctgcccgcccatcccggcgtgaccgtggactacatccacggcgaaagcacggcgctggcgctggcctccgacccggccaaaccagccacggccattctgctgcccgactttgcgaaggctgacctgtttaagggcgttgtgctgggcggcgtgctgccccgcaagaccttcagcatgggccatgccgaggaaaaacgatattacaatgaatgccgtgtcatcggcgtataacaggattcaggtgaattatggaaaaagctgcacaaaccccgaacggtgcaccgcaccgtcgccgccgccgtcgccctgccggcaatggcagcgccccgcaggcgcagcagcccgcgcgtgaggggaaagcccccgcacagccgcgcaagccggccccgcaggccgctgcgcccgcagcccccaaggcaccgcgcagcgagaatgcgccccgcgccaatggcagccacccccgccgtgggcagggcagacccgcccaaccgcagagccagcaggcaccgagccagaatgccccggcccagcgcccggctgcaccccagaatgcgccccagagcgcacgccctgctgcgctccagccgccgcgccgcaatgcccgcccggccccgcaggtgcccagccagccgctgcgcgaccagcccaaggcaccgcgcccgccccgcaatgcccgcgccccgcgcagcaccgctccggagcagccgggtctcgatctgatctcccgccgcccgccgaagcagaagttcgcaaatttcgaggactatctcgccgcccacggcggtatgactgtgccgctgccgcccgaggcatcggacgcagcggacacccccgagacggtcaagcccgccgaggctgccgaatgacccccgccaccgcggcagccctgcgctgccccgtatgcggcgggccgctgctgctggccgggcgcagcctgcgctgtgccagagcccacagctttgaccttgccaaagagggctacgcctacttgctgccgatgcagaagaagcacgccgccgaccccggcgacggcaaggccatggtccgcgcccgccgcgcgttcctgtcggcagggcactacgccccgctgatggcgacgctggccgcgctttgcgccgcactgccccacgaccatattgtggacgccggctgcggcgagggcagctacgataagtatttgtatgacgcgctgggctgccctcagattgcggcgttcgacctgtccaaggaggccgtgcggctggcgtcgaagctcgtgcccgacgcagcattctgtgtcggcggcagcttctgtgcgccggtgcgcgacggctgggccgacctgcttttgaacatcttttcgcccatggccgaggccgagtttgcccgtatgctgcgcccgggcgggcatcttgtttacgccgtgcccaccgcgcggcatctgttcggcctgaaagagattttgtacgactgcccgtatgaaaacgaggtccggcagaccgaatacgacggctttgcgtttgtgaaggccgttgagtccaccgctgtcatcacgctggaagggcagagtgtgcaggatttgttcgccatgacgccctattactggaacacccccgccgacggcgcagcccggcttgcggaatgtgaacgcctgacgacagagatcgggttccggtttttggtgtatcaaaaggtataaatgtacgtgccttcccccgtgggggaaggtggccgaggccccgcccgaggccggatgaggggcgagcttgcgacgtctccccgtgtacgggctgcctccgcaagctcgcccctcatcagtcgcctgcggcgacagcttccccgcgggggaagcctttttactttagctctcctccggcggcacgatccccgggccatacggctcctgcgcgggtgggacaatgacctcctgcgtctgcttcggctcatcctcgtcgcggtactgctcgtcgggcacctcgctcaaatcggtccagaagcgttcgcgctcatcctcggcaccgcggggtccaaattcatcaaacataccagacactcccttataatagtgtataagcgcggcctttgcggcctacactgtaggcatagtctttgctgggggagtgtgggttatgcgttccaaccgcggaattttctggtacagcctcgggctgacgctgcttctgctgctgccgatggtgctgaccgtcgcgttcttcaccgaccaataccagaagcagcagctcctgcgccaggcgtcggcggcggacagtacgctgcacatcgagccgggtgcgcagggcgtgtatacgctgctgctcgtcgtccagcaggaggagcccgcctttgtgctggcccgtgcggacggcccgcagcagacggtcacactctgcgcactgccgggttcgctgcgcgtcagcgcaccctcaggcacgacaacgctggcggagtgtgcgctgtctgccggggccgggcgggccgcacagctgctcgttggcacggtagctacgggggagaccgccgccccggcgctgcactatatcgcggccacgcccgccacctgggcggactgcgcgggccgcacagcctcggcacgcatcgacacggcatcgctgctggataccgccgcacgcacgcgcctgggctacggcgaggatcccatcgccgtgtgcaccgccgcgcaggcgtcggagctgatcgcccaattgcaggcggcgctgcccggggcaggggagggctgcatggcccgcgccgccgtctgggcggcgttcctgcggcaggacccggcgctgctggccggtctgcccgacggtctgcgcagccgcagtgcccggctgctgaccgacctgctggccgcagacctgaacgccctgggcgagacactgacctatttaagtgcccgcaccgccctgacgattgactacaccaccgccgccgtggccgctgcccggggcggcgtgcagctgacggaggaggggatggcagccgtttgcgccctcctgctgtgacggggaacgcggctatgcccgcccgcggagcttccgcttctgcgttcggcgcaaggccgtcaaaattttacaagaatttttgcaaaaccgcttgacgtagacccgcagtcgtgttattatgatagcacctcttttgcgggtttattttttatgccctttttcaagggcgcctgcaagcgcgagggaggcttattaaccgataatggaggtgccgaacaatgactgtcaagatcaccctggcctgcacggagtgcaagcagcgcaactacaacaaggagaagaacaagaagaactctccggaccgtcttgagatgaagaagtattgccgtttctgcaagaagcatacccttcaccgcgaaaccaagtgaggataggagcttagagatggcagacaataaagcagccaccgctgcagcccagactcaaagcgacaagcccaaaaagaacgacggcaagaagaaggtctccttcttcgacaaggtcaagaactttttcaaagggatcggcaagtatttcaaagatacgaagagcgagctgaaaaaggtcgtgtggcccagcaagaacgacgtcaaaaccaatacgatcaccgttatcgtggtcgtgctggtcgcagctgtcgtgctgatcctgctggacctcatctttggcggcgccatccacctgttgatcggcgcctgagcgcgttgagcggaggcaaagacaatggctgagcaagcaaattggtatgtggcacatacctattccggctatgagaacaaggtcgcaaccgatctgatgacgatggtggagaaccgccacctgcaggatctgatctgcgacgtcaaggttcccaccgagacccgcattgaagaagtttttgacaagcgcggcaacaagaccggcgagaaagaggttcagtcgaagctctaccccggctacgtctttattaaaatggtcatgaacgacaacacctggtacatcgtgcgcaacacgcgcggctgcaccggctttgtcggcccggagtccaagcccgagcccctgaccgaggcggaggttgccaagatgggcgtcgaaaccaccgttgaccttgaggtcgagtacaaggtcggtgatacggttgagatcaccgccggtccgatggaaggctccgtcggcaccgtcgacgagatcgacattcctgcgcgcaaggtgcgcgtaaggatcaccatgtttggccgcgagcttccggcagagctggagctgcatcaggtcaagctgttctgagtttttctcaggacaccctagtttccggtaaagaccgcgaacgggcctgtgcccggggtacggtttttatagggcgcgcggaggtcgtgcgcccgtgggaggtctgcaccgcaggccgcaactcaccacaaaatttggaggtgcaagtattatggcacagaaaatcactggctacatcaagctgcaaattcccgccggcaaggcaactccggctccccctgttggtcctgctctgggtcagaagggcgtcaacatcatggcgttcaccaaggagttcaacgagcgtaccaagaaccagatgggcatgatcatccccgtcgtcatcacggtctacgctgaccgctccttctccttcatcaccaagactcctccggcgcccgttctgatcaagaaggctgccggcatcgacactgcttccggcgtgcccaacaagaacaaggttggctccatcacgctggctcaggccgaggagatcgccaagaccaagatgcccgacctgaacgctgcttccctggaggccgctgtcagcatgatcaagggcaccgcccgcagcatgggcgttaccgttgagggctgaataggagggtaatacgcaatgaaacacggcaagaagtatatcgacgctgctaagctgatcgagaataacaagacttacgatcccaacgaggccctggagctgtgctgcaagaccgctaccgctaagttcgacgagaccgttgagctgcacgtccgcctgggcgttgacagccgtcacgccgaccagcaggtccgcggcgctgttgtcctgcccaacggcaccggtaagaacgtccgcgttatcgccatcgccaagggcgacgccgccaaggccgctgaggctgccggtgcgcaggaggtcggtgatgacgatctgatcgccaagatcgccggcggctacctggacttcgacgttctggtcaccacccccgacatgatgggccgcgttggccgtctcggtaaggtcctgggcccccgtggtctgatgcccaacccgaaggccggcaccgttacccccgacgtcggcaaggctgttaccgacgctaaggccggtaagatcgagtaccgtctggacaagcagaacatcatccatgtgcccatcggcaaggcctctttcggcgccgagaagctgatgaccaacctggacaccgtcctggatgccatcgccaaggctaagcccgccgctgccaagggccagtacttcaagagcgctaccatcgccaccaccatgggccccggcgtccgcgttgctaccaacaagtatggcgtataagtttttcagctttgagctgaaaaatgcttgacaaacgcatgttcgcgtgctatactaattaagctgtttttgagacagcaggtgccgcaaggcataacgggttttacccacctgccgagaaacgtgcgtttgattgcaatgctttcaagccctttcccggcgacgggaaggggcttttttctgtatatcacataaaaagccgcttaccgaaaccaatctgtaagtggaatgaggtgaatttcaaatgcccagtgcaaagattctggaagctaagaaggctcttgttgctgatctgaacgagaagatcgcaggctctctggccggtgttgtcgttgcttacaacggcatcagcgttgctgatgacaccaagctgcgtaaggagctgcgtgaggctggcgtgcactacatggtcgtcaagaacaccatgctgcgcctggccgtcaagggcacccagtacgagggtctgaccgagtacttcaagggtgacacggctatcgctctgtctccggaggatccggctgctgctgctcgcatcctgtgcaagtttgctgacgccgacaagtccaagcgcttcgtcgtcaagggcggcttctgcgatggtcaggtcatggacgctgcaggtatcaagagcctgtctaccatgcccaaccgcgaaggcctgctctccatgctggctggctccctcaacggtatcgttggcggtctggctgttgccctgcagggtatcgtcgacaagcaggacgagactgctgcctaagtttaggtttagcaggttgagcgcatcggcgcagcgctccttgaatacaaaccgcgccgcttaaaactataaaatttatggaggtaactaccatggcttctgagaagatcactgccattgtcgagtctgtcaagactatgactgttctggagctgaaagagctcgttgacaccatctgcgaggagttcggcgtttctgctgttgctgctgccgctcccgctgccgccggcgctgctgctcccgctgaggaggagaagaccgagtttgacgtcatcctggctgacgttggcgccaacaagatgcaggtcatcaagaccgttaaggagctgaccggcgcttccctgatggaggccaagaagctggttgagaccccgaacgccaagctgaaggagcaggcttccaaggctgacgccgaggacatccagaagaagctggccgaggtcggcgctaaggtcgagctgaagtaatttagcttgccaaatagctttcaacaccgtgtggtttaacaccgcacggtgtttttttgtgtaccttaacaaaaacttcctcgcttctttgtacattcctctgaatttgaccgtgttgcataggccttgcatttcgtataatattgatgtatcctttttgtatcgaataaaatgggaaagtgaggctgtatactcttggagaacgaaaagccaaaaggcggcgggatggaaaagctggcttcgtttatcgttgataaacgcaacctgttcttcctgttatacatatttgcgctgattttcagtgtcatcgccacgggctgggtcaaggtcgaggacgacatcacgacctacctgcccgacaccaccgagacccgccagggcctgaccgtgatgaatgacaacttcgtcacctacggcacggccaacgtcatggtgtccaacatcacctacgatactgcgctggacatccagtcccggcttgaggacatcgagggtgtcaccaccgttgaatttgacgacaccgacgagcattacacgaatgcgtcggcgctgttctccgtcagctttgacgcagaagtaggggacgagcgcgccgagaacgccctgcaggagatccgcgacgagcttgagggcagctacgacacctcgatctattccgaggtcggctacgattcctccgcggacctgcaatcggaaatggtcgtcatcgtcatcatcgcggccatcatcatcgtcgtcgtgctgacgctgacctcccgctcctatgccgaggtcccggtcctcctcatgaccttcggcgcggcggcgctgctgaacatgggcacaaacttcctgtgcggcacgatcagcttcatctccaactcagtcaccgtcatactgcagctggcgctggccatcgactacgccatcattctgtgccaccgtttcagcgatgagcatgagacgctgcccacccgcgaggcctgcattgccgcgctttccaaggctatcccggagatttcttcctcctcgctcacgacgatcagcggcctggccgcgctggcgttcatgcacttcggcattggccgcgacctggctacggtcctgatcaaggctatcctgttcagtatgctctgtgtctttacgctgatgcccggcctgctggtgctgttcagcaagctgatcgacaaaacccgccacaaaaacctgattcccaagattaccgccgtcggcaagttcgacatcaagacccgctttatcatcccgccgatcttcggcgtcatcatcgtggcggcggcggtctttgccaacctgtgcccctactgctacacctacaccgacctggtcaccgccaagcagagcgagcgccagatcgcctaccagaaaatcaaaaacaccttcggttccagcaacatggtggccgtcattgtgccgtcgggcgactatgagtccgagggcaggatcctcgacgagctggacgcctgcgccgaggtcaaatccacgatgggtctggccaacattgaagcgatggacggctatatgctgaccgacgctgtgacaccgcgccagttggccgagatggccgacctcgacttcgaggtcgccaaggcactgtacggcgcctacgccgtcgaccatgacgagtacggcgagatcatcaacggcctggacgattataaagtgccgatctacgacatgttcaggttcctggaacaggagatgcacgacggcaacatcacgctctcgggcgatgtgcaggacacgctggacgacctgttcgaccagctcgatgaagcccagaagcagctgcagagcgacgattacagccgtatggtcgtctatctgaacctgcccgaggagaccgacgagacgttcgccttcgtcaacaagatgcacgacatcatcggcaaatactacgccaccgattcgttctacgttgtcggcaatacgacgagcgccatggacctgtccagctccttcggcgaggataacctgctgatcagtgtgctgtccgcgctgttcgttatcctggtcctgctgttcacattcaagtccgcgggtctgcccgtgctgctgatcatcgtcattcagggcagtatctggatcaacttctcggtgccgtacctgcagcacaccccgctgtacttcctcggctacctgatcgtcaactccattcagatgggtgcaaacatcgactacgccatcgttatctccagccactacaccgacctgaagaaggtcatgcgcccgcgggaggccatcgtcacagccttgaacgagtcgttcccgaccatcttcacctccggctccattctggcatccgcgggtattctgatcagcgtcctgaccacgaaccccgttatcgccgccatcggtacctgcctgggccgcggcacgatcgtttccatcgttctggttctgttcgtcctgccgcagatcctgatcctgggtgactccatcatcgagcgcacgagctttgagatgaagggcgttgccggtatggcccgcacggccagcggcacaatgcacgtcaatggccgcgtgcgcggctacatcaacggcgtcgtagatgctgacatcaagggcgtgctgcacggccagttcagtgcgaacattgccaccggcactgaatttaccgttgacaagcccgacatgtacctgtcggagaagaacctccacgaatccgaggacggtgcccccgaaccaggcacacccgatacgcccgacactgacacgaagggaggcgacgctgaatgaaccgcatttctgacctgacgcgccgcctctgggctgcgctgctggcgctctgccttgtgctggcgctgaccctgcccgtttttgcggaaggggagagcgagaccgccgacaccaccgaaaaggagacctttcacatcggcaccgtcgatgaccttttgcagctggccgattcctgccgcctggacagctggagcaaaaaccgcaccgtctatctggacgccgatctggagctgaccggcagcggctttgcgggcatcccgtccttcagcggcgtgtttgaggggcagggccacacgatctccggcctgagccttgtaaatgacggctcggtcatcggcttcttccgctatgtgcagcagggggccaacgtccgcgacctcgtcatccggggccgctcgctgcccaccggcagccgctccaccgtgggcggcattgcgggcagcaacgccggtacgctgcacaactgccgctttgagggcgtgtcctccggcgcgtctgttgtcggcggcatcgcgggcacaaatctggccgccggcgtcatcgaaagctgcacgaccacgggcagtgtctacggtgcgcacttcatcggcggcatcgtcggtgaaaatcacggcatcattgccaactgcacgaacacctccagcgtcaacacgacggtggagcagaacgacatcgacctttcctcgttgacgctgaaggacctgatcggcaccgagaacgccgccgacatcaccgacatcggcggcattgcgggccagtccggcggcgtcatccgcgcctgcatgaaccgcggcaccgtgggctaccagcacatgggctacaacgtcggcggcatcgcgggcagccagaccggctacattgagggctgcgtcaactacggcactgtctacgcccgcaaggagggcggcggcatcgtcggccagatggagccgagcagcacgctggaatacacaaaggacacgctgcaggagctttccgacgagatgagcacgctgcagacgctggtcaaccgcgcctgcgatgacgccagcgccgccagcagtgacctttccaaccagctcgaagcgctgaagaacaacgtgaccagctcccgcaatgccattgagaatctgctgaagcaggccgaaaacggcgtgtccatcggttcccagaccgtcaagaccgacttgagtcagttcaagcaggacctcaagaataccaacctgcccggcgcggacgacggagacaatgccgcggactcggacacagtcatcgactacagcgaagcgacgcctccgtctgacaccgaccctgtcgatccgaattacacgctgtccccctcggaggagcccgcgcagagtgctgacctctccacgcctgacgaaagcagtacggcagcgcaggacactgcccccgcacaggagcccgctgcagagggcggcgaggcggaccgcacctcccacgggcagcccggccccgaagccgttgacgattccgctgacagcaccgttgtcagcgaggacgacggcgctgccacaaagccggacgagcgctatccgatcgacccgaactatacgctcatcaccgagggtcttgacgacctgcccgacgcaaaggatgtgctcaatgacatttcggatgcattgccggactccgtggacgtcgaaattccaaaggtcgagctgacgaaccgcgacgccatcacggccagccgcaatgatctgagcagcagcctgaccagcatgggcgacatcgtcagcagcctgaacaacaacgccagcagcaacagccaggcgctgatcaacgacgtgaaggcgatctcgaagcagatcaacaagatcggccagacgctgtccggtgccagcgagaatgtcaaccgggatgcagacgacatcgtggacgatgtttccgacgacgacaccgatgacgacgtcgaggccaaggtcacgaactgcatcaacagcggcacggtcaatgccgacctcaacgccggcggcattaccggtgcaatggcccgcgagaacgatctggaccccgaggacgactacaccaccgcgggcagcgaatcgctgaactttaccttcaagacccgcgtcgtcacccgtgactgcacaaactacggcacggtcagcgccaaaaagcagaacgcgggcggcatcgtcggcgacgccgagatgggctctgtcatcgactgcaggggctttggcaccctcgatgccgaggacgccaccggcgtcggcggcgtggccggtatcagcaagtccacgatccgcgagagctgcgccaagggccgcctgtccggtgcaaagcaggtcggcggcattgtcggcagcggtgccaccatcgaaaactgccgcgccatggtcatgatcgacaacgctgccgaacagatcggtgcgattgccggtatcgtggacgacccgctggacggcagcgtgaccggcaacaccttcgtggacgggggtgtcgcgggcatcgacagcgtcagctaccagggcattgccgaaccgctggcctacgaggatttcgtcgcgcaggaaaatctgcccgacgatttcggcagcatctgtgtccgctttgtgaccgacgaggattcgctggtccaggaataccacatcccgtacggcagcgacttcccgacggatcagctgccgccggttcccaaccaccagggccagtacggcagctgggaggatgtggatctgaccggcatgacgtttgacgcgacgatccacgccgagtacagcgacataaacacggtccgccagagccaggaaaagcgcggtgaacgctcccttgtgctggtggagggcagcttcgacaccaccgacgagctgatgctctatgaggtggacgacgcgcccgatacccccggcacgctggtggaggcgtggggcctggagctgcccgccgacaccggccacacgctgcgctatatgccgccggagacgacggacaacaccgtgctgtgggtcaggacagacgcaggctggcagcaggccgacacaagcgtggacggcagctatctgacctgcaccgcccccgccggtacgacggccttcgccgctgtgcagatgcccgccagcaaggtgcccctgctcgcggcggcttgcggcgccgcagccgcactgctgctggtgattttgttcatcgcccgcaagaagaaaaagaagaaggccgcggcaaagaaaaccgcgtaaggccctgccgggccgatgctcgtcatcgacccgcgcatacggcagatgcctcgcacaaaaaaaccgctgcagcacagaagcctgtgctgcagcggctttttgtttcagcagctttctataaacgccttaaaaacctttcggctgtcctcattcacgcggaacgaaaattcggggtgccactgcacagcccagacgaactttttatccggcaggcatacggcctccgtcagtccatcctccgagacggccataaccgccagccccggcgcaagcgttcacacctcactgtaaaaaataaaacagagaagtcctgtgcgacctctctgtccgttgtgctgattataccgcaacgcgcggcggattgcaagcccttacatcggcgggtggctgcccttgaagcgcttatccgtcggcagggtcgtatatttgtcgtacagctcccgcagcagcacggtacggcgcaccatgccgatgaacacattgcggtcatccaccaccggcacaaagttctgttcgatggctgcctttaaaagcgtcggcatgtcggtggtcacggtaacggccttgtaatcgcggcggcgggggaaactggaaatcggcacgtcctcgctggcctcaaggtccagcccgtgcagatttttcatgccccagaggatgtcgccctcggtgatgctgccgacatactcgccgttgcgcttcagaacagggatggtcgcgtagcgctggttggaccatttttccagcgtctggcgcagggtgaaatcctcgtaaatgtacaggacgtcctgcttgggtgtcaaaaagaataaaaggttcatggtttaaaccgagctcctttggtaaggttgtcatacttctgtaaacagtatatactcttgcgctgtaaactttgtgaatggaatgttaaatccacgcgccaaaataaatttctccgaaatgccctgttcaagcggggaaaaatggtgtataatagctaaagattcatatagtgcagctgcgggcttagccgcagctaaccctgaaaaggaggatcgcagatgatcaccaaggtcaatccctatggacatatttcgctgacgaatgactacttctccggcctggtggagcaggccgccaagcagtgctacggcattgccgccatgggtcaggccccggctgaaagcgttgtgcgcagcgccctgcgcaccggcagcctgccgccaaagggcgtcaccgtcacgcaggaggccggcaagctggtcatcgccctgcatatcaaggtcgggttcggtctgaacatctcgaccatcacccaaagcatcacccaccgcgtcaaggacgaagttgaacttgccaccggcttaaaggtcgcccgcatcgatgtctacgtggacgacgtcattgccgactaaagactgttttacccaaaaaatatgaggtgtaacgaaaccatgattactggccagaccctgcgcgacgccattctttccggcgccaacaacattgccaaccagcgcacccgcgtggatgagctgaacgttttccccgttccggacggtgataccggcacgaacatgagcatgaccatcggcgccgcccgcgccgagcttgaggccatgcccgacagctgcaccgtggccgaggccagcaagaccgctgcctccgccatgctgcgcggtgcccgcggcaactccggcgttatcacgagccttttgttccgcggcttctccaaggcgctgaaggacaagaccgaggcatcctccgctgacctggctgccgccttgcagcagggcgtcgaggccgcctacaaggccgtcatgaagcccaccgagggcacgatcctgaccgtctcccgtctggctgccgagaaggccgccgagtgcaccgagctggatgttcctgccatgtgggacgctacgctgcaagccggtcatgccgcgctggacgacaccccgaacctgctgcccgtgctgaaaaaggccggtgtcgtggacgccggcggtcagggcatcatgctgatctttgagggcatgaagcaggtgttcgacggcggcgagatcatcgccggtgccgaggtcgccgccaagcccaaggtatccagcgaagccgcaggcaagggtgtttttgccgacgacctgatgaaggtcgaggacatcaagaacggctactgcacccagttcctgctgcacaaggatgccgatgccagcgttacccgcctacgcgccttccttgagtccaacggcgactccgttgtcgtgatcgaggacgacgacgttgccaactgccatgttcacacctccgaccccggtatgatgctgagcgaggccatcaagtacggctacctgaccaattttaaaattgaaaacatgcacgagcagttcctcgcccgccagaagcaggcgaagggtctggagaagcaggccgaggccgaggaaaagaaggacagcgagttcacctacgccgccgttgaccccgagcgcgagtacggctttgtggccgtggccgcgggcgagggcctgaaggctgtgttcggcgacctgggcgtggacgctgtcgtcagcggcggccagacgatgaacccctccaccgaggacatcctcgccgccatccagagcgtgcccgccaagaccgtgctcgttctgcccaacaacaaaaacatcatcatggcgtccgagcaggcgcagaagctcgcggaccgcaaggtcatcgtgttgcccacccgcaccgtgccccagggcatgaccgccatgctgaactttgaccccgacctgaagccggaggagaacgctgttgccatgatgcaggcggcggaccgcgtcagcacgggtctgatcacctatgccgcccgcgacagcgagtttgacggcaagcccatcaagaagggcgagattatggcgctggagaacggcaaaatcgttgccaccggcaccgacctggtcaagatgacctatcgtctggcccgctccatgaagaagaaggacacccagttcatcacggtcatttccggctgcgacgtcagcgacgaggacgccgaaaagacgaccgatctggtgcgcaccaagtgcggcagcagtgtcgaggtcagccacatcagcggcggccagcccgtgtactactacatgatctctgtggagtaattcggacgttataacattaaaaaggcgaatttggggatgttccgagttcgccttttttggtacgtggccggaccggggacggctgcccccccgggaactcgttctttcttttgccaacaaaagaaagaaccaaagaaaattgccgctgtttcgacgcagcggacccgcgacctaggggctgcacgcccctaggaaccccaaagcggaggtcgcagagggcgcgggctaaacgaaagcagtattacttttcgttcttaacgcccgcgccctctgctccgttttgaaactcgggtgttcccccgaacccccgcaggggtgaacgactgctgtttccgcgatgacctccactttacatcactgccctgtaggggccgggcatgcccggcccgcagccttgccattaccgcccatttatcttttgcttcgtagggaggggtcttgacccctccgcggagcgtcgaggacgccgccccctacaaacgcaagctgcaagcctttcgctagtcgtaggggagggattcatccctcccgcgccacatcccattgccgcccgccatcccaaagaaaggaggcccccatgcccaccatcaacgattccgtccaattccttaagggcgttggcccggccttcgccaaaaaatttgagaagctcggcatcctcacgatccgcgacctgcttttgtgctatccgcgcaaatacatcgactacacgcagccctacaccgtcgtgtccgcgccgtatgacgtggaatgctgcgtccgcgcaaccgtgctgcaaaaggagcccgcccggcgcgtcaagggcgggcgggtcatgaaccgggtgctggcggcggacgattccggcattctggcactgtcgtggttcaatgcgccctacgcggcggacaagctggaagtgggggagacctactactttgagggccgcatcggcggagcgctgacccggcgcgagctgctgcacccgctggtgcgcaccgaggctcaggtcgctgactgcccgtttgtggcggtctatcccggcaccgacggtctgcccgccagccgccacgccagctgtgcccatgcagcgctggcgttcgcggaccagcttgtggacccgctgccgcccgagctgctgacccgctaccggatgcccgccaaggcacaggccgtgcggggcatccacgcgcccaaaaacgcggacgaccttgccgcggcgcggcggcggctgattttcgaagagctgtacctgctccaaatcggcatcttcctgctgcgcagccacgggcgacgcaagaccagcgcccccatgcacccgctggacatcggcccgttctggcgcagcctgccgtacccgcccaccggtgcgcaaaagcgctccaccgaggaaattctggccgatctttgcggcgacgtgccgatgaaccggcttttgcagggcgacgtcggcagcggcaaaacgctggtggccgccgcggccatctggtttgccgcgcagaacggctggcagagcgccatgctggcccccacggaaattttagcccgccagcacgccgccacgctggcggaccggctcgagccgttcggcgtcaacgtcacgctgctggtcggcggcatgaaagcgaaggagaagcgcatcgcgctggaggctattgccgatgggcgggcaaatttagtcgtaggtacgcacgccgtgctgaccgacaccgtggaatttaaaaatctcggcctcgccatcgtggacgagcagcaccgcttcggcgtgcggcagcgcggcctgttggcgggcaaggcacaaagcccgcacctgctggtcatgagcgccacgcccatcccgcgcacgctggggctgctcatgtacggcgacctggatatttcggtgctggacgagctgccgccgggccgcaagcccatcaaaacgtggttcatcaccggcaaaaagcgccgcgacatgtacggctttctggacaagcagatcgcggcggggcatcaggtctacatcgtctgcccggccattgaggaaaacgaagccatgggcgatctgcaggccgtcacgacctactacaccgagaccgcctgtgcactgctgcccaaccggcgcatcggcctgctgcacggcaagctgaagccaaaggaaaaggacgatgtcatgcagagattcaaggccggtgagctggacgtgcttgtctcgacaacagtcatcgaggtcggtgttgacgtgccgaacgcaacggtcatggtcattgagaatgccgagcggttcggcctgtcggcactgcaccagctgcgcgggcgcgtggggcgcggcgcggcggattcctgctgcattctgatttccgacaacggcaacgacgcggtgcgcgagcggctgcaatttctgtgccgcacgtcggacggcttcgccgtggcgaagtatgatctggagacccgcggcccgggtgatttctttggctcggcgcagcacggtctgccgacgctgcgggtggcggatttagtgcaggacacccgcacgctgcgcgtcgcgcaggacgaagccaaggccctgctggccaaggatccgaatctgatcgaccccgcgcaccgtgcgctgtccgatgaggttgagcggctgtttgagacggcaggggcgatgaattagcagccttctttggcttcccactcgggggaagctgccgcccgcaggcggctgatgagggcagagtttcccacaggcaatccgcaagcgagatttcccggcaagttccccctcatccgagcgcgggcggggccgcgcccacctccccccaagggggaaggcactctgccctgcgcggcggcctgccctcaccccgccgcagctgtgctattgtatcccgttgctctcccgcgataaattcctttctatcccttttattttcccttcaaatttgctatactgataggtaactttataaaggaaatcttgcctatgaaaaaattctgcgcgattttattttccttcgtgctcgttctgatgctggcgctgcccgtcgcggcagaggacgcggcaggggagagtgactccctctttgacaccgcgcccgcgctgacagctcccgccgggtatgtcgtcaacctcgacaccaacatcgtcgtgtacgagaaaaacagcgagacccagctctccgccgccagcctgaccaagatgatgacgacactgctcctgctggaaaattaccaggatcagctcgactccatcagcctgaccgcgccaagctacatctacgatttaatttgggagcagagcacgaacgcctccaccgccgacatccgccggggcgagacccagagcctgcgcaacctgctctacgccatgctgctgcccagcggcaacgaggccgcctacatcgtggccgactacatgggcggcggcagcatcgacaactttgtcgccatgatgaacgacgaggcgaaggccgtgggctgcacgggcacaacgtttgtcgatccctgcgggctgaaccccaacaacatcacgacggcgcgggacgcctacctcatcctgcgcgccctgacagcctacgatgtgttcgccacggtcatcgccacccccagctacgacatgggcacaaatgaccgctacacgacgcccggcacctatatcatccagaataccgacaagctcgtgaccaacagcagctaccaccgcgactacaccaggggcggcaagaccggcagcctgggcgagtggcagaactttgcgggctggcacagccagaacggcgagagctacatcagcgtactgctgaacgtgccctacgacgccgaccccgagggcatgcgccccgcgctggcggagaccggcacgatcatggactgggtgttcgacacctacaccatcgccccggcgctggacacgacccagcccatcaccgaggtccgggtcgcctactcgacccagacggacaccgtcatgctttatccggctgacaatatgatgacgctgctgcccgccgcgggcggcgctgcgctgaccgagccggtgttcaatgtgccggacgagctggccgcgcccatccggcagggcgacgtcgtcggcaccgtcacgctgacgatccagggcgaggtcatcggcaccgccgatttaattgcgggcagcgacgtttcgcgcaatcaggttttgtacacgctttcgcgcgtaagcctttttttttcaagcacatatttcaaagtcgtcattgcgctgacgatcttcgtcgttggctgctatggaatatatattgccggccgcgtcctgctcgcctcacgcaagacacgctgagccgcatatacaggagggtttacccatgctggatgtaaaacgcaatctgaccaccatgaccgatttctacgagctgacgatgtcggcgggctatctggacgagggatatgtggataagatcgccgtctttgatatgttcttccgccgcgtgccggacggcggcggctacgccattatggccggtctgcagcagttcatcgacgccgtggatcacctggaatttaccgacgaggacatcgaatacctgcgctcgacgaaggcgttcgacgagaaattcctcacctacctgaagaatttccagctgcactgcaatatctgggccattgaggagggcatgcccatcttcccgcaggagcccatcgtcaccgtcgagggtccggccattgagtgccagttgctcgagacgctgctgctcgtcaccttcaaccaccagtgcctgatcgccaccaaggcgaaccgcatcgtgcgctccgccgcgggccgcccggtcatggagttcggtgcccgccgcgcgcaagggtatgacgccgcctattttggcgcacgcgcgtcctatatcggcggctgcggctccacctcctgcgtcatggccgcgcgtgacttcggcatcccggcctccggcacgatggcccacagctgggtgcagatgttcccgacggagtacgacgccttcaagaaatacgccgagatgtaccccgacgcctgcgtgctgctggtggacacctacaacgtgctgcgccacggcgtacccgatgccatcaaggtgtttgacgaagtcctgaagccgatgggcaagcgcccgaagggcattcgcatcgactccggcgatattgcctacctgtccaagaaagcccgcaagatgctggacgaggccggctaccccgactgcacgatctgcgcgtccaactctctggatgagtacatcgtccgcgacctgatcctgcagggtgcccgcgtggacagcttcggcatcggcgagaacatgatcacggccaagagcgaccctgtgttcggcggcgtctacaagctggccgccgtcagggaggacgacggcagctacaccccgaagatgaagctgtccgaatccgccgagaagatgacgatcccctgcctgaaaaaggtctggcgtatctacgaccaggacggcaaggcgatggccgaccttatcacgatggccgacgaggtcgtcgagacccagcacggcatcacgctgtttgacccgatagagacctggaaggaatgtacctacgtcaactgcacggcccgctgcctgtccaccccgatttacgagaacggcaagcgcgtttacagctcccagagcctggacgacatcaagaagttctgcaaggcgcaggtcaacaccctctgggacgaggtcaagcgcttcgagaacccccaccgctactacgttgacctgagccagaaactgtgggatacccgcagcgcgctgctgaagaagctgtcgaaataaagatctccggcttcccccttgggggaagccatttcttcccaaaaactcccaccatccttacaaaacggttacaacccgcgccccctgcacatactgtggctatacagcttgtgcagggggattttgtatgctggaacgtgcttctctgtttttgctcggcggcggggcgtatgccgcgctggaattggcctggcgcggcaccacgcactggacgatgtttctgaccggcggggtctgtctctgccttttgcaggcgctcgcggatcgtccgctgccgctgggcccggcggcggctgtcggggcggcgggcgtcagcgggttggagctggccgtcggcgcagtctgccgccgcgtgctgcacaccgccgtctgggattacgccgacgagtggggcaatctggccgggctggtctgccccaaatacaccgcctactggtttttgctgtgcgggtgggtcatttttgtgctgcgcggtgttgaaagtaccgtttatcaccctcaaaaatccgcctcccggcattaaagtccaaattatcgtactgcctgtctggtataataaaagcatggaaagcaaaaccagacacagaaaggcggtatccaccatgacccagcagttccgatacgtcagcggccacatcgaagtctttaccgagaatggagagttccttttttcagcagacaccatgcaggaggcatgggaggaactgtccgcgtaacgcgtacactcgcaacgtcattatgtacactatgccgaaatagtttaaaatatacaaataacttttgtaagtttgtacaaaatgcagcttgcaaaagtccggcctttcgcatataataaagacagaaagaggggagcgaaagcccccggaacacttagccctacactaggaaaggagacggggttactatgttgaagctgcacactttagccgaatggatgcacgggtttttggatcccgaacgtccctacggactgccggaggatgtttacaatgacgtgattccgtcaggcgtccacaatttcaaccgcaacgatcttttttaaagccgtctgaatcccacaacccccaccccggtgcggcccgcaagccccgcaccggggtgggggtttattttgcaataaaagagcggcgtgaatcgtaatgtaggtaggggccgggcatgcccggcccgcggttttcccgtaagcgcccgtccaccttatacctccgggccggacatgtccggcccctaccgtgcggcatctttcaaaactccctcttgtttttttcgtcaaaacacggtattctataataagtatattatgcctttcaaaaggagcgacctatgaaactcattacctttaccgtgccgtgctacaactcggctgcctatatggatcactgcatcgagaccctgctcaccgcgggggaggacgccgagatcatccttgtggatgacggctccaaggacgacaccggcaaaattgccgacgcctacgccgaaaagtaccccaccatcgtccgcgtcattcatcaggagaacggcggccacggcgagggcgtcaaccagggcatccgcaatgccaccggcgtctacttcaaggtcgtcgactccgacgactggctcgacaccgatgccctgcagcaggtcctggccgagctgcgcgcccacctcaacgacgagcagccgcttgatttgatgatggccaactatgtctatgagcatgtggccgacaacacccgcaacatcgtcgactacaagggcatcctgcccgaaggccgcgttttcacctggaacgagatcggcaagttcccgccgaacaaaaacatcctgatgcacagcgtcatctaccgcactgaggtgctgcgccgcagcggcatggagctgcccaagcacaccttctatgtggacaacatcttcgtctaccagccgctgccgcaggtcaaaaccatctactacatgaaccttgacctctaccgctacttcatcgggcgcgaggatcagagcgtcaacgaggccaacatgatcaagcgcgttgaccagcagctgcgcgtcacccgcattatgatgaacgcggtcgatgtctacgccctgccgccggagcaggccaagctgcgtgcctacatgctgaactatttctcgatgatgatggcgatctccagcatcttcctgacgctggacggcagcaaggaggcactggccaagcgccgccagctgtgggatgacctcaaggcacacgacggccacctctaccgccgctgccgcttctcggtggcggagggctgcaacctgcccggctggctgggcagcaagatcagcatcggcggctaccgcatcgcccagaagatcttcaagttcaattaaggaagttttatgcgtaattacgatgttattttgttcgatttggacggcacactcaccgactccgcgccgggcattttaaactcggtgcgttacgcctgccgcaagctgggactgcctatccccggcgaggaaacgctgcgccgctttctcggcccgccgcttatcgcctccttccgggagctgatggggctggacgccgccgacgcagaccgcgccgtcagcgcctttcgggagtatttccccacgaagggcctgtttgagaacgaggtctacccgggcgtcccggccctgctggccgatctgaaggccgccgggaaaaccgtcatcctcgcgacgagcaagcccgaggcgttcgccaggcgcatcatggagcacttcgatttagcgcagtactgcgattttatctgcggtgccacgctggatgagacccgcaccgacaaggccgaggtcattgcctacgcactggaaactgcgggcatcaccgacaagaccggccttgtcatggtcggcgaccgcgagcatgatgtgctgggtgccaaaaagaacggcctgccctgcatcggtgctgtctacggctacggcacagccgaggagctgaccgccaccggggccgctgctctggctgacacggtggacgagctgcacaagctgctgctgggataaatcaaatgggagacagcccgcgctgcctcccgttttttattggtctcggtcgttgtaatagagataccacccgcggaagccgtatccgatgccgagagcgcccagcaccagcagcatagccgccttgtcgggccaaagcggcatattccgggtgcacacccagaccaccgccagtacaaggcatacaagcaccggcaggccgtagtgcagaaatctctgcacccgcagccgcttcgggtcgccctccaccgccagcgccgatggatcgcacacctcgcaccgcacccgcaggatcgggatattgcgcacatggcttgaataccgcacagccctgtactcgatgccgtccagcgtaaaccgcggtgtcatgccctcgtgggtgatgacgatctcctcgccgcagttcgccgcccaggccaacagctcggcggtaaactcctgcggggttgcaatggcggtgtccggcgtaaaggtaaactgccgcttatgctcggcagccgccattttgcggtagtcctgcacccagtcggtaaaccagccgcccgccggggcaagggagtccatccgctcaaggcagctgtccacatccagctctgccgccgttcggtcgccggcggccagctccgtgcagaaggctgcggctgccgccagcttttgctgctcggcctccagccgttgccgctggcgttcggcagcctcggccagcggcagggtgccgttcagcacagtgccgatctcctcgaccggcatatccagtgtgcgcagcatccggatcagcttcagggcgcgcacatccgcctgcgaatagatgcgatactcattttccgggttgcgggcgggggtcagcagccctgcctgctcataatagcggatattgcgggcggacacgcccgattgctccgctgcctgcttgatgttcataacatcacgctcctttcgctctcaccttacaccctgcacccactggaaggtcaatactttttcataaaataaccataccatatttcgtaaaattgtgctatactgttttcatatatcaatacaaaagagggaatttatcatgtacaaacccggtgacgataagctcgaggtccgtgaattgctggtcaaggcctttgccagcgcgtgggaggccggcgacaaggccgttgaccgcgacacctacatcaattccagcatcaatgtgatcgactctctgcaggtcggccccgagatgatctacggcgaggagggccagggcctgctggacgacgagcttgaccatctgcccgatatgctgcgtgccgacggcgcgtgggtctactacgccgtgcccgcagagaactacttcatcctgacctggatggaggacgccgaaaaggccgccgccaaggtcaactccctgaaggacgaggatgacagcctggcctgcatcgttgacctgacgcaggagtggacccgcgccgcagaataaccgccggaaacgccgcgagaggggaggggaacgcatgagccgcgatacgatacgtctgccgcacgacgcctaccgactgctgcagacgctgcgcgctgccgggcacagtgcctacgtggtgggcggctgcgtgcgcgacagcctgctgggtcgtctgcccggcgactgggacatctgcacctccgcccggcccgacgagatgaaggcgctgttctgcagccagcgcctgatcctgaccggcgaaaagcacggcacagtggccgtcattctgcacggaaagccgtatgagatgacgacctaccgtctggacggcagctaccgcgaccaccgccaccccgataacgtacagtttgtggacgacctggcctccgacctggcacggcgggatttcacgatcaacgccatggcctacgcccccggcgagggagtcatcgacctgtacggcgggcgcagcgatctggccgcgcgtgtcgtgcggtgcgtcggcacgcccgcggaccgctttgccgaggatgcgctgcgcatcctgcgggcgctgcggttcagcgcaaagctcggctttgcgctggaccctgctactgccgccgcagcactggccgcgcgcgacacgctgcgcactgtcagcgccgagcggctctacaccgagctggacggcctgctgctggccccgggggccgggcagacgctggcgcagtacggcgagattttaagcggcgctgtgccggagatcctgccctgcatcggctgcacccagcccgggaaatggcattgctacgacgtctggcagcattctgccgccgccgtgggcgcactggacctgcgcgggcaggacacccgcggcgtgcgggtgctgtgctgggccacgtttttgcatgacattgccaagccgctctgccgcagcgtcgggccggacggggctgcgcatttcaaaggccacaaccagcgcggtgcgcagctggcgcgggtcatcctgcgccgcctgaaggcccccgcctaccttgtggacggcgcggtggggctgatcgccgtgcacgacgcaccgctgcccgccgacgatgtgggcattttaaagctgctgaaccgcagcggggcgatctttctgcgccgtctctgtgcgctgaaatacgccgaccttgacgcccacgccaatacacccgaggttgccgcccgccgcgccgatgtagcagcctttgagcgccgcatgaacgagctggccaagaccggctgctacaccatgcgccagctggccgtcaacggcgcggatctgatggacatcggcatccccgccgggccgggcgtcggcgcaacactgcaaacgctgctgaacgacgttatggagggcacactgcccaatgagcgggaagccctgctggcggcagcggtaaagtgaagggtatccgcccccttttccgccgcttagcagggagggggcttgcctcctccgcgggcgcatatagaatgcgcccctacggactgtgcggccaaacgggtcattggtggataccgccctctacaccgtaggggcggattccatatccgcccgcggggctttccgccgccgcacacggccacggcggccagagggctggccgccttacatactgcattataaatcacctggaaatttacaaagggggttcccactatgtccatccaaaacgaaatcctcaacgctatcgcagcccggcgcagctgccgggcctataagccggagcagatcacggcggaggagctggaggccgtcaccaccgcaggcacctgggccgctaccgctatgggcaggcagagccccgtcatggtcgctgtgcaggacaaggaaacgctggccgagctgtcccgcctgaacgccgccgtcatgggcacccaaaacgacccgttctacggcgcacccaccgcggtgctggtcctgggcgagaagaataaccccaacggcgtgcaggacgccagccttgtgatgggcaacctgatgctggccgcgtccggcatcggtctgggctcctgctggatcaaccgcgcaaaagagacgtttgaaacgcccgagggcaaggctctgctggccaagtggggccttgatcccgagaagtacatcggcgtcggctactgcattcttggctatcccgcgcccaatggcacccgcacacccggcccccgcaaggccggctatgtcctgcacgtatgattttcggcgtcggcatcgacctgtgtgacgcaggccgccttgaaaaaagtttggcgaagcagagctttctcgaccatgtattttcgccgtcggagcaggccctgctggcatccttaggcgaaaagcgacgcgccgagaccgccgccgcaaattttgcggccaaggaagccttcttgaaggccgccggcaccggtctgggcggctttgccatgcccgagctggccgtactgcgccaaaagagcggtgcgccctattttgccctgaccggcgcagccgctgcctgggtcagggagcagggtctgaccgttcatgtcagcctgacccatgagcgcgggctggcaaatgcgcttgtgcttttggagaaagagtaattcttggccccctctgcgagggggctccgcccgcaggcggtgggggagagagcttcgcggcaacccgaaatatttcgggctgccgcaaggttctctccctccagccctacgggccacctccctcgcagagggaggcaagtatgtcacggaggtgacctatgcccggcaaaacgacacgcagcagcaatctggagctgctgcgcattctgtgcatgctgctcatcatcggcgaccatctgaccgggcagagcggcattgcggactacaccaccctgccgtcgtccttcgcgttctgcctgatcggctgcgggtcgcgcattgcgtgcagcgtctttgtgctgatcggcggctggttcctgtgcgagcagccatataagacccgccgcccgctctcgctgtggctgtcgctgtggctctataccgtgcctgtgacgctgctgtgcaagctctccgggctggatgtctcgtggggcgcactgcgctgggcggcgttcccggcgtccacgcggcagctgtggttcatctcggactatctgctgctcttgctctgtgtgccgctgctcaaccgcctgctgcgcgggctgtcccgcccggcgcaccgcggtctgctggctgtgctggctgtgccgcttatcgtctacccgacgctgtttggcgagaacggcgcggtcagcgacaccgcatggatgtttttgtatgagtacctgctcatcgcctacctgcgccgctggccggacaaccggctggcgcaccttttgcagcaccgcgcggcggcgctcggactcgggctggggctgccgcttctcaacacgattctgcgcgctgtgctcgagacacgcggtctgaccgacggcaaggcgttccagtacatggcctactatcgcacggcgctgggcgcactgcccaacctgctggccgcgctggcgctgttctacctgttcaagaggctggacctcggctgcgtgcggtgggtcaatgccctggccggcacaacgctgggcgtctacatcctgcatcaggtgcccgcgttccgcggttttttatggaacggcctgctgcaggcagaggcgcaccacgggtcggtggggtatacgctgcttgcgattttggccgtgtttctcggctgtgcggcggtggacgccctgcgcacggcgcttgtgatgcgccctctggaaaatacccgcctgtttaaagtgctgtgcgaaaaaggcgacgcgctcgccgcaaaaatcacagcggatgattaaaaagacctccctctgcttatactttcagtaacaagcaaagggaggtcttttctatggaagtgcaccgcggagaggttttttacgccgatctaagccccgtcgtggggtccgagcaggggggcatacgtccggtacttatcattcagaatgagatcggcaaccggcacagccccacggtcattgcggcagccatcacaagccgccaggacaagaaccgtctgccgacgcacatcagcgtgcgggcggaccgctgcgggctggccaaggacagcatcattttgaccgagcagatccgcacgctggataagcgccgtctgcgggagcgcgccggtgtcatcccgcccgacgatatgcgccgcgtcgatgaggcgctggggatctctatggggctggaaagccaggatgtgcatacgaatacggggtacttttgagcagctgctttgtaggggccgggcacgcccggcccgcagccttgccaatgcccccctttaatggtcgctttgtagggaggggtcttgacccctccgcggggcgtcggggacgccgccccctacagcggcaatccagtaagctcctcatagccgcaagcgggcacggcggccagagggtggggtgccctcaccccgccgagccttaccgctgccgtccttttacggcaaaaaattcgccacaaccggtgccaaaatcgcggtcataatgcccgctacggcaatcgcaaggccgctcatggcaccctcgatctcacccatctgcagggccttgctcgtgccgatcgcgtgcgccgatgtgccgagcgccaaacccttcgccagcggatcggtgatgtggcagatcttgcagaccgtctcgcccagcaggctgccgacgatgccggtcaggatgatgaccgcaccggccagcgccgccgtgccgcccagcgtctcggccacatccatgccgatggccgtcgtgacggatttcggcaaaaagctcacagcgtgggcgcgctccaacttgagcagccaggccatcgccagcacgctgcccaggctcgtcagcacgcccgcggcaatcgacgcaaaaatcgcggccaggttcttttccagcagctcccacttttcatacagcgggattgccaggctgactgtggcgggcatcagaagccagctcacgggctgggcgctggacttgtaatcggcgtagggcacgccgaagcagctcaaaaacacgatcataaaaatgctgcccatcaaaaggggattgaacagcgccttgccggtcttgcggttgatccagacgcccgcggcgtaggccgccagcgtggccagcacgccccagctgccgcattgctgcaaaaattcagccatttttgtgctcctttccgcccgcgcatttctgcgcgaccatgcccgtgaccgccatgaccagtgctgtgatcggcacaatcgccagcacggcgggcagtaaaagattcatcagctggctgcccagctccatgacgcccgccgccgcgggcacgaacagcagcgggaagatgccggtcagaaacagcccggtctcccgcacctgatcgagcttgagcacgccgaatttgagcgccgcggccagcagcagcaggccgtacacgctggccgggatcggcagcggcagcaccgccgccagcacctcgcccgccaggcagaacgccgtgatgcgggcaaactggaaaatatacttcacacaataaccctcttttttacaaaattcgtgtaccatcataccacgccgcccggctttcggcaagttgtacattgtatgaaaaccatccacattttcctatcggcattgtgggaatcggcacttgtattttgggagtgagtgtggtatactaaccgaaaataaatgattttcacttgaaaagaggttttgactatgtctttactgaaaaagctggccggtctggccgtgggtgccgctgctgtgggcgctgtcgcttatgttttacagaaccgtgagcatcacgacgacgagtacgagcatatttggggcccggaggacgaggtcgaacctgagaccgattccgccgagcccgccgctgacgatgcgtccgccgaggctgaacccgcccccgctgccgcacctgaggaacctgccgcccccgccgaggagccgaagcccgaagaacccgcggacgctgctgaaacgcccgccgctaaggctcccgactttgacgcccctaacgtgaaccccgtggagctgggtcatgttgaggtatcccgcacgccggacggcaagatcgaccccacccagattgttgaccccgctgtggccggcgattgggaggagcagggctgcaggggctgatacaccaaacgcgcaaggcgcatctttgttttatggcaaaggtgcgcctttttgttttttgcgttaccgtgcgggcgggcacgctcctccctcagctgtagggggcgacgtccccgacgccccgcgggcggatatggaatccgcccctacggttttcaccgctctgtaggggccgcacatgtgcggcccgcggccttcccgcatacggccttttatgggaaacctccgggccgggcatacccgacccctacaccgcgcctatggatttccgcgcacaaatgtccgtgaaattgctacaaacctactttacaactttactgcactaaagtataatagaatttgtatcggatcagagaggtaggaatgttatggagatcgaactcaaccgctttacccccgccgaacaggcgaccttccgcctgcgtgccctgtatgagcaggccggctaccgcaaataccgcgcgtcccgctttgaggaatacgccctgtatcaggagtatcagcgctttctgccggacgcacaggtcatcaccttcaccgacctggacggcaagctgcgggccatcaagcccgacgtaacgctgtccatcgccaagacggcccagcccgcggcaggggagtgcaagcgcttttattataatgaagaggtctgccgccccagccgcgagagccacaccttccagaccatccaccagatgggattggagagcatgggcgcggtggacgccgacgagcaggccgccgtggtgcggctggccctgcaaagcctggccgcgctggatgtgcccaccgtgctggaaatcagccacatgggctacctgaccggcctgctggacgcgctgcatgtccccgccgaggcacgcgcgaagctgctcgatttcctgcgcgccaagaacgcccacgagctgcgaaccgccgcgctggccgcggggctggacgaatccgccgctgccgcgttgaccggcctgctcgacctgcacggcccgctgggtgcaacgctgaccgccgcccgcgccgcctgccggtgcgagacccagcgcgcggcgctggaggaattgcaggctttgcagaatgcgctgggcgaggcgggccgcggcacccggctggacctgagcatggccgacgaaatggagtattacaacggccttgtgttcaccggctacgtcgcgggcatcccgtgcgcggtgctcaagggcggacggtatgactacctgatgcagcggttcacgccgggggccaacgccatcggctttgccatctacttagacgagctggaacgcctggccgcgccgctgccccccgtgcagcagcagggccgcgagaaaagctggctgaacattgccctgccgaagggccgcctcggcgacaaggcgtacaagctgctggcgggcgcgggctacagcgccaccgaggactacaacgacacccgcaagctcgtggtcgagaaccccgacgcctgtgtgcggtacttcctcgtcaagcccagcgacgttgcgatttacgtcgagcacggcgcggcggacatcggcatcgtcggcaaggacattctgaccgagtccggcgcagacgtgtatgagctgctggataccggcatgggcaagtgccggatgtgcgtggccgggcctgcgggcttcaccgacgacgagagccgcgccttgcgcgtagctacaaaatttgtcaacattgcccgcgaccactacgagcgccgcggacgcgacatcgacattgtcaagctgaacggctccattgagctggccccgattttgggcctgtccgacgtcatcgtcgatattgtcgagaccggcacgaccttaaaagaaaacgacctgaccgtgatcgaggagtttatgccgatctcggcgcggttcattgccaacaaggcaagctacaagttcaaatacgcccagctgaccgagctgctaaataagatgaaggaggcccttgcaaaatgatccgtctgtatgactttgatgaggtacgccccgaggaaattctgaaccgtgacatccgcgccgaggccgacgtggaggccaccgtcgatgcgattattgcggacgtccgcgcccgcggcgacgccgccctgatcgagtacgccgccaaattcgaccacgccgagctgaccgacgtgcgggtcagccaggccgaaattgaggaagcctttgccgagctggaaaagacagatcccgagttcatcacaacgctgaagatggccgccgagaacatccgccacttccatgagcagcagctgcacaaaaactttgtggtcaacgacaagcccggcatcgtgctggggcagaagtacacccccatccagcgcgcgggcgtctacgtgccgggcggcacggcggcgtacccgtccaccgtgctgatggacgtcattcccgccaaagtcgcgggcgtcgggcagatcgtcatgacgacccccgcgggacgggacggcaaggtgaaccccgcgattctggccgccgccgtcattgcgggcattgatttgatttttaaaacgggcggcgcacaggctgtggcagcccttgcctatggcaccgagagcgtccccgccgtggataagatcgtcggccccggcaatatctacgtggccacggcaaagcggaaggtgttcggcaaggtcggcattgatatgatcgcaggcccgtcggaaattctcgtgctggcagacggcacctgcaaccccgcgtgggtcgccgccgacctgctcagccaggccgagcacgacaagctggccagcccggtgctcgtcaccgacagccgggatttagccaaggccgtgcaggcggagctggaggttcagatcccgcagctgccccgcgccgccatcgcccgcgccagcgtggacacgaacggcaaaattattgtcaccgacgacatgaacaaggccattgaggccgtgaacatcattgcgccggagcacctggaaatctgcgtcgatgacccgttcgcggtgctgaactcggtgcagaacgcgggcagcatcttcctgggcaaaaacgtgcctgaggcactgggcgactactttgccggcccgaaccacacgctgcccaccagcggcacggcgcggttctcgagcccgctgggcgtcgatgattttgtgaagaagtcgagctttatctattacacccgcgaagccctcggcgaggtgcagggacgcatcgccaattttgccgagcacgaggggttacatgcccatgccaggagtgtgacgatccggtttgaggaatgagcttgccaaaaaggaagcatccgaggttgaagcagcatgattatagtgaaccgggtgcgtattttataacggtgtgtaccaaaaataaggcgcacattctttcccggatcgttgttgaccttccgtcatccgtacggcgggatgccctcatcccgccgcgggttcaactgctgcctgccgggaaaattgtggacgatttaattcgccgcacggaaacggtttacgacaatgtcaccgtggatgcgtatgttatcatgccgaaccatctgcacattctttttcatatccatgcacccgggaacggcggcgggatgggggcatcccgccctacgattcaccaaatggtccgtgccatcaaaacggggactacacgccgcctcggccattccatctttcaaacatcctactacgatcatgtcatacgcgggccgcgggattatgatgaaatcttccaatacatccaaaacaatcccgccaaatggccccacgatcaattctacacttcggacggggaggaacacccatgagccgttattttaccaaaaccctcgcttcgctggagccgtacacccccggcgaacagcttaaaatcgctgacattgtcaaactcaacgccaacgaaaacccatacccgcccgcgcccggcgtggcggcggcggtggccgcggcggtgccggggctgcggctgtactctgatttgaccaacggcgatctcaacgccgccattgcgcgccactggggcgtgcgcccggagaatatcctctgcggcaacggcagcgacgagaacctgctgctggccctgcgcgcgttctgcgacgaaagcacgccgctggccttcgccgatgtgacctacagcttttacacggttctgtgtgatttactgcacatcccgcagcacatcatcccgctggaggctgacctgaccatcgacccgaaaaaatactgcggcctgcacgagacgattgtcattgctaacccgaacgcgcccaccagcctgctggccccggtggacgccatcgaggaggtgctgcaaacgaaccccgacaacatcgtgatcgtggacgagacctacgtcgagttcgcgcctgccgggtcgtcctgtctgccgcttttggaaaaatatgacaacctcgtcatcacccataccttctccaaaacgcacaatctggcgggtgcacggctgggcttctgcattgcgcggcccgcgctgattgccgacatgaaccgcgtcaagttcagctacagcccctacaacgtcaacgccatgacccaggccgcgggcgcggcggcgatctccgacgaggcctattttgccgatgtaacggcaaaggtcattgccgagcgcacccacaccaccgacgagctgcgccgccgcgggttcactgtgtttgactcggccacaaattttttattcgcgaccacggaccgtatgccctgtgtggaaatttttgaaaagctgcgtgcccgcggcattttaatccgccacttcaacgcgccgcgcatctcggactatctgcgcatcacgattggcacacccgagcagatgcagcggttctttgcggcgctggatgagatcctgggtgaataaatgccgctcccacagcgcaagacaccgcgcctgaagggctatgattccattctcaccaacccggcccgccggcccatggataagttttatacagagggggagaaccatacatgatcgcaatcgttgactacggcgtgggcaacctgttcagcctgtcgtccagcgtcagaagcctgggcgcagaggtgcgggtgacccgcgacgccgcggacctgcgggcggcggatcatatcctgctgccgggcgtcggggcgttcgccgacgcaatggccaagctcgaagccacgggccttgtgcccgttctgcgcgaggaaacgcagaaaaagccgctgctgggcatctgcttaggcatgcagctgctgtttgaaaaaagctgcgagtacggcgagcaccgcggcctcggcctgattcccggcgaggtctgcccgctggcggacgacctgaccgatccggcgctcaaggtgccgcacatcggctggaatgccatggacattgtgcccgggcgcgaggccgacccgctgttcaagtacatcaaaaacggcgagtacgtctattacgtacacagctattacgccaaaaactgcgctgcatcgacactagcgacgagtgactacagcatccccgtcacgggcgcggtgcggcaggggctggtgtacggcacccagttccaccccgaaaaatccggtgataccggcctgcggctgttaaaggcctttgccgagctgtaagcgagagggaggaagtaccatgaagctataccccgccattgacctgcgcggcggccaggccgtgcggctttatcagggcgattacgaccgaatgaccgtctacaacgcagaccccgtcgcccaagcgcagcaatttatcgacgcaggtgcgaagtatttgcatgtcgtcgatctggacggcgccaaggacgacaccacggccaatttgcagacgattgccgccattgccaagctgggcggcctcaaaatcgaggtcggcggcggcatccgcgacgaggcgcgcatccaacggtatcttgacctcggcgcggaccgctgcattctgggcacggtggccgtgaaaaacttcgatttcacggcagaaatggcacagaaatacggcgcacagatcgccgtcggcgttgacatgaaggacggcgctgtcgctgtcaacggctggaaggaggtcacccccgagccgggcgtggcattttgccgccgctgcgccaatgcgggcgtcaaggccattattgccaccgatatttcccgggacggcacgatgcagggcaccaatatggcgctgtaccgtgagcttttgacgattcccggcatcgaggtcacggccagcggcggcattgccgccatggccgagctggccgagctttccgctatgcactgccacgcagtcattttggggaagtcgatttatacgggagcgattgatctggccgaggccgtgaggctgtacgagggggaatgaggacatgattaccaaacgcataattccttgtctggacgtcaaaaacgggcgcgtggtcaagggtgtcaactttgaaggactgcaggacatggccgatcccgtcgagatggcgcggtactacaacgcctccggcgcggacgagctggtgttctacgatattaccgccagcgtcgaggggcgcgggctgttcaccgatattttgcgccgagtcgcaagccagatttttatcccgctgaccgtcggcggcggcatcaacacgctggacgactttgaccgcgtgctgaaatgcggcgcggacaaggtcagcgtcaactcgggggccatccgcaaccccggcatcatcccggctgccgcgcagaaatacggcaaccagtgcgtggtgctctccgccgatattaagcgtgtggacggcaaattcatgctgttcgccaagggcgggcgcgagaacacaggcatcgacgcgctggactggctggagcagggcgtcaaaaacggcgcgggcgagctggtcgtgaactccatcgacaccgacggcgtgaagaacggctttgatctggagctgctggacgccgtggccgcacgctgcgccgtgcccatcatcgcctccggcggcgcaggcaaaaaggaggatttccttgagctgttccgcaatcacccggcagtggatgccggtctggccgcgtcgatcttccacacaaagcaggtagaaatcaacgatttgaagcggtatttgcgggagaacggggtagagatgcgggtgtgatcgccccttcgccatgcatccacccggtaggggccgcacatgtgcggcccgcaacattcccaaaagtgtcctcttgcgggaaagccgcgggccgggcatgcccggcccctactgcgtaataatagcaaacctacactttacctcttgccaaaactcacaaaaagaggtacactaaactatattactttaggagtgtccaccatggaaatcaccgaaaattccaagactctcaaatttgacgcaaacggcctgatcccggccatcgtgcaggaccattataccaaagaggtgctgaccctcgcctacatgaatgccgagacgctggctctgacgattgccgagggccgcaccgtattctggtctcgcagccgccgggagatctggcgcaagggcgagacctccggcaacgtgcagcgggtcgtctccatcaccgccgactgcgacaaggacgcgctcgtcatcgacgtcgtcaaatccggccccgcctgccacaccggcgcggagagctgcttcttcaacccggtctatgtctccgatgagctgaagcagttcacctggcagggcctgtacgcactcatcgagggccgcaagaccgacccgaaggagggcagctacaccacctatctgttcgacaagggcctggaaaagatcctcaaaaaagtcggcgaggaatccaccgaggtcatcattgcaggctccaagcgcgacagggaggagaccatctacgagatcagcgacctggcttaccacgtcatggtgctgatgatcgagctgggcatttccgtagaggacatcacgaaggaactcgaaaaacgacacgtaattgaccataaggtcaagcaggaaaggatgcagtaaccatggcaggcgaatacctgaaaagctctgtacacgttcattccaaattgtgcgacggtaagaacacgctggacgagattgcggtcacagcatggcggaacggtctgcaaacgctgggcttcagcgggcacagccacaccccctgtgatctggaatattgcatgacccagagccgtaccgccctgtacaaggcgcaggtcgccaagctcaaggagcgctacgccggcaagcttgacattctgtgcggcttggaatgggatctgttcagcgacgatgacccgacccagtacgactactggatcggcagcacgcactatgtcaaagggcccaagaccggcaagtattatgagatcgactggcgcgaggaggatctgcgcgcctgcatcgacgacgattttgacggcgatgcgctggccgtggccgaggcatactttgccaacgtagccaaggttgccgagaaaaaaccgacgattctgggtcattttgacctcatcaagaagatcaacggcggcaacaagttctttgacgagaatgacccccgctacactgccgctgcaaactctgccctgatggccgccgcccgcaatcgctgcgtgctcgaggtcaacacctcggcggcgtaccgcggcttccgcaaggatttcttcccgtccgatgcgattttgaaggagtggctggtgctcagcggcaatgttgtcatcaccgccgacgcccacgataccaaggcgctgaccttcggttttgaggctgttgccgccaaactgaaggaactgggctacacgaaggtccaggtgctgggcaaggacggctttaccccctgtgcgctgtaaaggcaacactgcataattcccgccttacggcttaagcaccgctccggcggctgcggcacggcatctgcgttgccaaaatgctcgataatacacaaagtattatctgcgcttttggcttagcagctgccgcacctcgctcgccgtatcggcacttagaattatgcggtattgcctaaaataatccccgaaaattttcccgccgcggtgtaacactgcggcggtttttgcgtttcttatggatgaagggcccaaaacaaagacaactcgaacaaaacacaggagaaaattcaccgtgagattcacattcgaaataattttcaaaaagtttgcgccgaggggttgacaacccctccgtatttttgtataataatacctgcattctggcggcagccactgtggagaggtgtccgagtggtttatggaactggtcttgaaaaccagcgattcgcgcgagcggaccatgggttcgaatcccatcctctccgccattttgtgataacaagtgaatatataaaatcactttgacttgtggagtaatactcaagaggtcgaagaggcgcccctgctaagggcgtagggtgggaaaccgccgcgagagttcaaatctctcttactccgccaaatcagccaatatttaacgctagcgcgttgaatatcggctgattctttttatgctttccgttcgtaactattcgtaaaaaacgccctaaagcaccagaaaacgcaacgggtgcctacgtcggtgcctacacacaatcttcgtatcgtactaccgtttccgtaccatcccggaaacggtttgtctccaacctctctccgcatttttcaaacactttccccgataaacgtaaaaatttatcagggaagtgttgttattcttaacattttcttccttttctgcccgtgccttgcaatcccgcgccaaatccgctatactcattctataccattttataagtgaggtgtccgttatgcggttatttgatgtgctcggcccggccatgacggggccgtccagcagccacacggcgggtgcggtgcgcatcggcagcacggcgcggcggctcctgggggagcagcctgccgaggccgagatcctgctttacggcagctttgccgccacggggcgcggccacggcacggaccgggcgcttgtcgccgggctgctgggcatgcagccggacgatgaccgcatcccgcacagcttttccattgccaaggaggccgggctgcactttaagatcggcaccacaaacctgcgcggcgcacaccccaacacggcggtgctgcggctgaccggtgcgtcgggccgtaagctcgaggtcgtcggcgcgtccatcggcggcgggcggatcaacatctgccagatcgacggcatcacgacgaattttggcggagaccacaacacgctgatcgtccacaaccaggacacgcccggccatgtggcagccgtcaccacctgtttgagccagcacggcgtcaacattgccacgatgcagctctaccgctcgacggcgggcggctacgccgtcatggtgctggagtgcgacgagcctatcccggacgagattgccgggcagctgggcagccagccgggcatcgtcaaggtcacgattctgaatctgtaagggggcgggaaagatggcattttcatccgtgcatgagatgatcgacctctgcaaggagagcggcaagccgctgtatgaggtcatccttgagagcgatctggccgaaagcggcctgacccgcgccgaaagtgaggccgagatgcaccgtctgtgggcggtcatgcaggccaccagcgacggctactgcggcgcagaccgctcgatgagcggctttgcgggcggcgacgcggccaaggtcaacgcggcagcggcgcgcggcgtgctctacgccgacggctactttgccgacgtcatggccgaggcactgaaaaccgccgagtgcaacgcctgcatgaagcgcatcgtggccgcgcccacggcgggaagctgcggcgtgctgcctgcggtcctgctgccgctgcagcgacgcgggctggccgacgaggccgccgtgcaccgcgccctgtatatcgctgccgggttcgggcaggtcgttgccgcgcgtgccacgctggccggggccgagggcggctgtcaggccgaggtcggcgcggccagcggcatggccgccgcggcgctggtggacatcaagggcggcacggcagagcagtgcgccgaggcgttcgccatggcgctgaccaaccttgagggccttgtctgcgaccccgtggcaggtcttgtggagattccctgcatcaagcgcaacgtcatcggtgccatgaacgcggtctccgccgccgacatggcgctggccggggtcgtggggcacatccccgcggacgaggtcattgacgcgatggccgaggtcggcaacgcgatgagcaaggacctgcgtgagaccggcatcggcggtctggccggcactcccacgggccgcgccatctgcgagatcgtgacgatggacaacggggaagaggaagattgatattttacggcggtaaaccggcgggcacacagcaccgcaaccactgccccaactgcctgaccagcctgcatctggacaatgaacccggggaccgcgcagcggactgcggcgggcagatggagcccgtggccgtctgggtgcgcaagggcggcgagtgggccatcatccaccgctgccgcctctgcggcaaactgacatccaaccgcatcgccgcggacgacaacccgatgcttttaatgagcatcgccatgcgcccgctctgcaccccgccgttcccgctggagtgcatcgaggagatgacggcactgatgggcggggagggtcgtatgcggtaatgcggggcgtcggggacgccgacccctgcactgaccccgacgcaactttcctttacaaatttcgccaatgtgctatactgaataaaaaacatcaggaggaaattcttatgaacgtgaacgatccgcgctgggcgtccattgacgcctttgtggagaaaaaccgcgacaacatcctgcgcgacatcacccgtctggtggccgtgcccagcgtggagggcgcacccgagccgggcgcaccgttcggccccggccccaaggccgcgctggccaaggcgctggagatcgccgacgagctgggcctggacaccttcaacgccgacagctacatcggctgggccgagacgggcaggatcgccgacggccagaagttcctggcgaccatcacccacaccgacgttgtgcccgagggcaacggctgggacgccgacccctacacggtccgcgtgcgggacggctggctgctgggccgcggcgtggccgacgacaagggcccaagcatcctctgcctgtacgcgctaaagtacctgaaggacagcggcgcggcgctgaaataccccgtgcgtgccctgctgggtgccaacgaggagacgaacatgcacgacgtagactactacgccgagcattacccgatgcccgccttctgctttacgccggacgccgagttcccggtctgcaacggcgagaagggcggcttcaacggcgagctcgtcagcccgaagtttgagaacggcgtcatcacggcgttcgagggcggcgtcgcccacaacgccgtgccggaccgcgcctcctgcacggtgcaggtcggcgcgggcgcactcgtccagaccgagggcgtgaccttcgaggcaggggagggcggtgccaccgtcatccgcggctggggcaagagcggccacgccgccatgcccgagggcacggtcaacgccatcagcctgatcgtcaactgcctgctcaagagcggcgtctgcaccccgcaggaggaggcctacctgaacgtgctgcacacgctgcacgccgacaccgacggcagcgcgctgggcattgcggcggacgacggcctgtttgacccgctgaccatcatcggcggcacgatcgagatggctgacggcgtcatccgccagagctttgactgccgctacccgacgaacaccgaccccgaaaagatgactgccgccatccggaaggtctgcggcggcgcggccacgctggagaacgtcagcagccgcgtgccgttctacatcgacgcggacagcccggccatccagacgctcatcaacacctacaacgacgtcaccggcgagggcaagaagccctttacaatgggcggcggcacctatgcacgccacttcccctatgccgtcagcttcggccccgagcacaccgacattgagatcccgtcctttgcgggcccgatgcacggcgcgaacgagggcaccccgtttgagaagctcattgaggccctcaagatctatatcctggccctgctccgcctgcaggagatcgagctgtaaataaaagcaggggccgggcatgcccggcccctaccatatcacccctggcagaccgacatctgccaggggttttctttgtgggattgttaatttttatacagccttttattctgcggcgattgcccaaattgttgcaaatcttgcgtgttcgatgcaaaatcgaccttttgtcatacttggttgcttgacatgcttttgaaaaatggtacaataaatccgtatagttatccaccacggacgggggagcagaaatcccgtccgcggcgagaaaaatcagagaaacgggggaaatcagattgttcaagtccctaaagcgctctgccaagggtgctgccgtaccgcacacgaaggcgacagccgggcagccgaccaacaagatgccggtgcccgagcacgtcgtcattcccatgtcgatgcacatcggcgcgcccgcggagcctgtcgtcaaaaagggcgacaccgtcatggtcggtaccgtgatcggcaaggccggcggctttgtatccgccaatatctactccagtgtgtccggcactgtgcaggacattgcaccgctgcgcatggtcaacggcgcgatggcgacggctgtcgccatcaagaccgacggtgcgcagaccgttgatccggcctgtgtgccgcccgtcgtcaccgacaaggccagcctgctggctgccgtgcaggcctgcggcctggtgggtgtcggcggcgccggcttcccgacgcatgtcaagctggcggccaacaccatcgacacgctgctcatcaacgctgccgagtgcgagccctacctgaccaccgactgccgcgagatgctggagtgcagcgacacgatcatctccggcatcaccgctgtcatgaagtactgcgagatcccgcactgcatcatcggcattgaacgcaacaagcccgagtgcatcgacctgctcacctcgctgacccgcgagatgaagggcgtcgaggtcaagggcctgccgatgcgctacccgcagggcgccgagaaaacgctcgtcgagacctgcaccgggcgcgaggtgccgcaggtcggcccctccggcaagccgggcctgcccgccgacgtgggctgcgtcatcatgaacgtgacgagcgtctccacgttgggcaagttcctcaagaccggcatcccgctggtgacgaagcgcgtcaccgtcgagggcgacgccatcgccaaaccccagaacatcgaggtgcccatcggcacgctgtaccgcgacgtcattgacgcctgcggcggtgtcaaggagggcgtcgagctgggcaagatcatcttcggcggcccgatgatgggcggcgctgcacccagcgccgacttcccggtgctcaagcagaacaacggcctgctgctgttcagcaagaaggccgcctcgctgcccgagccgtccgcctgcatccgctgcgggcgctgcatcgaggcctgcccgatgggtctggagcccgtcgtcattgcgcaggactttgccaacaaggactttgctgcgctgaaagcacgctgcgtggatctctgcgtagcctgcggcagctgcacctatgcctgcccggccaagcgccccgtcagccagacgatgggccttgccaagggctggtacatggccgagctgcggaaaggaggcaaataacccatggaagatcgtctgatcgttaccgcctcgccgcatatccgcgatacatccaccacccgcgggctgatgggcaatgttgtcattgcgctgctgcccgccgtgctggccgcgggtctgatcttcggcgtacaggcgctggtgctggtcgctgtgaccaccctggcctgtgtggcgtttgagtacatttatgaaaagctgctgaaaaagtccaacacggtgggcgacctgtccgccgttgtcaccggcatcattctggcgctgaacatgcccgtgagcatgccgctctggatcgccgttgtcggcgcgttcgtcgccatcgtcatcacgaaacagctgttcggcggccttggctacaacttcgccaaccccgcgctggtgggccgtatcgtgctgttcctcggcttcacctcccgcatgactgcctacgtctaccccgacatggccgttgacgcgctggcctccgccacgccgctggccgtggccgacaagaccacgctgcccctgctggacgtctttttgggcttccacggcggcatgatgggtgaggtctgcgtgctggccatcctgctgggcttcgcctatctggttgctacccggaccatccaggccaccatccccgtgaccatcgttgccacggtctttgtgctgactgcgctcaacaccggcagtgcctacaccgccctgatcgagtgcatgtccggcggtcttttgttcggtgctgtctttatggcgacggactacgtgaccagcccgttcaccaccaagggcaagctgttctacggcgtgtttatcggcctcatcaccttcctcatccgccacttcggctcgatgaatgagggcatgagctacgccatcctgctgggcaacctgatgaccccgtggttcaacgcctggggccaccagacgccgctgggctacaaaaagcccaaaaaagccaagaaaggcggtgcggaataatggctgaaaagcaaaccaccgagaagcagagcactttcaaggagcttgtgctgcccgtcatcgtgctggtcgtcatctgcctggtctgcagcgcgctgctggctgtgctgaacgacatcaccgcccccatcattgcggaaaacacccaagccgagaccctggccgcctatgtctccgtcctgcccgagggcacgaccaccgacagcatgactgccatcgacggtctgaccaccgccagcgtcgagggtgctgtcaagaccgcgaacggcgatgtcgccgtcaaagctgcggcctccggttactccggcaaggacgtcacggtctacgttgcttttgacgccgagggtgccatttccggtatctccatcgacggctccacccagaccaccggcatcggctccaaggtctccggcgattccttcgcctccggctttatcggctggaacgggggagaggtcgcctccggcagccctgtggacagcattgccggtgcaacgtattccagcaacggcgcgttcaacgccatcaacgcagccatcgactgctacaacaatgagatcaagggggtgcagtaacgatgaacgaaaaaccgagcaagtggaaggtttttaccgcgggcatcatccgtgagaaccccgttctgcgcctggtgctgggctgctgctccgcactggctgtcaccaccaccgtttccggcgctgtgggcatgggcctggccatgacgttcgttctggtctgctccaacatcgttatctcggcactgcgcaaggtcatcccggccaaggtgcatctgccgtgctacatcgttatcatcgcaacgtttgttaccgtcgtgcagatggtgctgcaggcgttcgtgcccgacctgtacaaggcgctgggcgtgtatctggcgctgatcgtcgtcaactgcatcatcctcggccgtgccgagatgttcgcctgcaagaacaccgtcgtggactccgcgctggacggtctgggcatgggcatcggctatatcctgaccatgctgctcatgtcctccatccgcgagatcatcggcagcggcacctggatgggcatcaccatcatccccgagagcgtggaccgcatgaccgtcatgaactccgcgccgggcggcttcttcgtctttggctgcctgatggccggctgtgtctggctggagcgcaagctgaacaagcccattgagcgcaagagctgcggcgacgtcatgctcgagaagatcgacgccgccaaggaagaacagaaggagggtgccgcacaatgagttctcagatcgcaacgtttgccaccatcttcttcagcatgatcctggtcaacaactacgtactggtgcagtttctgggtatctgcccgttcctcggcgtttccaaaaagctggattcctccgcgggcatgggcgctgccgttatcgtcgtcatggtcattgccacggctgtgaccttcccgctgcagatcttcctgctggatgcctataatctgggttacctgcagacgatcatcttcatcctcgtcatcgctgttctggtccagctgatcgagatcacgctgaaaaagtacgtcccggcgctgtatcagtccctgggcgtctacctgccgctgatcacgaccaactgctgcgtgctgggcgtcaccatcctggctgtgcaggactactccgccgttgtggccgagttcggcttcggcctggcctacgctgaggcgcttgtctgcgccgccggtgcgggcgtcggcttcctggtcgccatgctgctgttctgcggcgtgcgttcccgcgtcgaggccgccaacccgccggagagcttcaagggcctgcccatcacgctggtttctgccgctatcacctccatgagcttcatgggctttggcggtctggtcgaaaacatcatcaacgcgatattctaagaaaggggaatggagagaatgaacccgatcgtatttgctatcgttgtcgtggtggtgctgggcctggccggcggcgtgatccttgtgctggcctccaagttcatggctgtgtatgaggacccgcgcatcgcgcaggtcacggaatgtctggccggcgccaactgcggcggctgcggctacgccggctgtgccgactacgccaaggccatcgtggagaacggtgcccccaccttcaagtgtgccccgggcggcgacaagactgccgacgccatcaacaccatcatgggcaatgccaccgacgaccgccccagcctgcgcgccaccgtcatctgtgcgggcggcgagaactgcggcaagcggtttgactaccagggcatccagacctgcgctgccgcggcctccattgcgggcggccccagcgcctgcgcctatggctgcctgggtctgggcgactgcacccgcgcgtgcaagtttgacgccatccacatcatcaacggcgtggccgtcgtggaccgcaaaaagtgcaccggctgcacggcctgcaccgtgacctgcccgcgccacgtcatccagatgaagcccattgccccgcagcccgcggtcaagtgctccaacaaggacaagggcgcgctggtcaacaagacctgtaaggtgggctgcattgcctgcggtctctgcgtgcgcaactgcccgaaccaggcgatcttcctgaaggacaacgtcgctgtcatcgactataccaagtgcaacggctgcggcacctgcgtcagcaagtgcccgaagaaagccatccagtgggtcgagggcacgccccgtcccatcgacgcccccgtgcccgcgcacgaggttctgaaaacgcgcgtataattttcaggtaaacatccctgtgctccccgccaagaatcggcggggagctttttgttttacccgcgctttcctccggctctgtagggaggggtcttgacccctccgcagaacctgacggcagccgccacgctgcacgggcggcagcgataacaccgcactcctgccgccatgtaggggccgggcatgcccggccctcagcgtataaggcgaacgccatttccccggaaagctgcgggccgcacatgtgcggcccctacctatcaactgtatttaaaaaattctaaaattattttcccaaaaaccgagacaacttcctaaaactatgctatactgtgtccagaataacaactctggtatttttcgggaggtttacacgtatggaaatcaccaaagatattttgtatgtcggcgtcaacgaccaccttgttgacctgtttgagggccagtacgacgtgcccaacggcatggcctacaattcgtacctgatctgcgacgacaaggtcgccgtcatggacagcgtcgatgctcattttaccgacgagtggatcaccaagatcgccgctgcactgggcgagcgcacgcccgactacttgatcgtgcagcacatggagcctgaccattccggctccgtcgccgcgttcgcgcaggcgtaccccggcacgaccatcgtcgcgtccgcccaggcattcaacatgatgaaggcctatttcggcaccgactacgcggaccgccgcgtcgtcgtcaaggagggggacaccctgccgctgggcacccacacgctgcactttgtcaccgcgccgatggtccactggcccgaggtcatcatgacctatgacgatgcagacaaggtcctgttcagcgccgacgcgttcggcaagttcggcgcactcgacgtggaggagccgtggctgcccgaggcccgccgctacttcatcggcatcgtcggcaaatacggcgtgcaggtgcaggccgtgctgaaaaaggccgccgcgctggacatcgagaccgtctgcagcctgcacggtcccgtcctgcacaaggagcagctgggcgatgtgctggccgcctacgacgcctggagtgcctaccgccccgagaccgagggtgtgctcgtcgcctacagcagcatctacggccacactgccgaggctgccaaccgcctggccgaggccctgcgcgagaagggcgtggagacgattgccatggacctggcccgctgcgatatggccgaggccgtcgcgcaggcattccgcttcagcaagctggtactggccacgcctacctacaacgccgatgtattccccttcatgaaggagttcatccatcacctgaccgagcgcaactatcagaaccgcacggtggcctttattgagaacggctcctgggcgccgatggccgccaaagtcatgaccaaaatgcttgagggcagcaagaacctgacctacgctgccaccaccgtcacggtccgcggcgcgctgaatgccgccagcgaggcccagctcgccgctctggccgatgagctgagcaggtaatcctcttttcctctcaactgcaagccccgcctcacagcgcgtctctcgcgccgtgaggcggggtctttttgcgggcagggggagaggaggacaacaacaaaacaattgaaaatttgcgcttgacaaatcggggcaaatcctgtatactatcatttgtcaatcgcatacggatgattagctcagctggttagagcgctgcgttcacatcgcagaggtcgagggttcgagtcccccatcctccaccagacagttcgtactcgaacccaattctttacggaaaagggttcgggtacgtttttttatttgcagggtaccgcacaccagacaggggagaggtaaatacgccatgaatttgaaaaaagttcatcacattgccattatcgggagcaactatgagaaatcaaggcgcttttatgtggatctgttaggcttttctgtcattcgagaaaattacagaccggaacgcgatgattacaaaatcgatcttcaactcgatgggatggaattagaactttttatcattaaaaattgcccgaaacgccccagttatccagaggcttacggcctccggcatcttgcctttgctgtagactctgtcgatgataccgtaagagaattgaataaaaagggcatcctgaccgagccgatccgagtcgatgcttacacaggcaaaaaaatgacattcttttccgaccctgacaatcttcctttggaaattcacgaataaagtcagaccggcaaaaaattgcattcttgccgtactgcgtgtgtaggggcggccattggtcgcccgcggggcatgacctgcccgaaggaggagtaaaatggtacaggtcgatttgatcactgggtttctcggctctggcaagacgacgttcctgcgccgctacgtgcagtatctcgtcgcgcaggggcacagcgtctgcattctggaaaacgacttcggcgcggtgaacgtcgatgccatgctgctgcaggacctgatcggggagcactgcgacatagagacgatcagtggcggctgtgactgcgacacccaccagcgccggatgcgcaccaagctgatctcaatggcaatgcgcggcttcgaccgggtcgtcattgagccgagcggcatctttgacgtggacgagttctacgacattctgcgggacgagccgctggaccgctggtatacgctgggcagcgtcattgccattgtggacgccaagctggaaaacgagctttccccgcaggccgactacctgctggcctccgaggccgccagtgccgggcttgtcgtcatgagccgcacgcagctggccgcacccggcgaggcggaagcggtcatcgaccacctgaaccgcgcactggccggctgccattgtgcccgccgctttggcgcggacgatgtagtgtgccgggactggaacgcgctgacaaccgctgattttgcccgcgtggattgctgcggctggcggcagacaagctacgtcaagctgcattttgacgagcacaaggcgtttacctcgctgtatttcctcgaggccgggcgcagtgttgcgcaggtccggcaggccgcgcagatgctcctgcacgacgcgaaatacggccatgtgctgcgcgtcaaggggtttatccccgacggcggcggctgggtcgagctgaacgctgcccgcgacgccataaccgtacagcccattcccagcggtcaggaggtgctgatcgtgattggggaagggttggataaggccgcgattgaggcggctgtgaggggctgctaggcgcgtctgcgggcggatcgagcgatgcggaaatttgcccaggtgacactcgtcactgccgcaaacggccacggagcatcggggacgccgccccctacagcgtctggcgcaaacgataagggcacacgctgtatccgcccgcaccgcgccggttgttaaacggttgtgaatatttatacatgcgaataaatatacagacagcaaagccccgggattttctgctttggaaaatcccggggctgttgttattcagggcacattttcaaaaattccgctttttcttcttattcttcgtcaaaggccttcgtccagttgtattcccggtgcagcgtgtggccggtgtcgctctgggccttgcgggcggtgtattcgccgatgatggcggacggcatcagcagggccttttcgacctcagactgaaagacgagcttcggatttttgatcctggggttcttcatcaggtccttccagtaggtgtcgtagtccatcatgaccgacatcgcctcaaacagcggggtcaggctctcataccgggcaattaccttgttcaaagcgtccaaaaactgcatgttggccttgccctccatcatgccgtcgtccttgcctttgacgttgcgacggcaaaaataggccgtcatctgcaaaatatcctcgaatgcctccatctggccggtggtcagccgggccgagagcgtgtcgcggtcaatgtagcgcagcagcgccgccgtgacttctttcttcgtcgcggcatcctccggcaccagctggttgaccggctcggcgtcggtctccacaaagtcggtggtctcgacgatgtccggcgtctcgggtgcgccgtagtcgtcctccacctcctccggcataccgccggtgacgtagatacgataattttccaggtcctccaaaattgcgcgggacaggtagggcaggggagcgctcttggtgcgcgccaccgggatgaccttggcggcgtagcgggtggcgacaccctcgaaccagcggcgcagaccgccgcagttgtcaatgacgttattcatcgtctggaagaacgtcgcgttgccgccgtcgatcatcttatcattgccgcgcggtgtgccggccatttttaccatagcatcgatgatcgtgcgcacggcgtccatctcgtccgccgtcagctcgcggatcagcttgtcgggctctgccttgatctccagctcctggcgcagcaattccggcgtagcaccgtaggaataggggatcgtcgtctcgggcaccgagacatactcgagcgtcagcacgttcgggtcgtcatccagcgtgccggtctcggccagggtcagcttgcccttcttgctgcggacccggttggacatggattttgtgatctcgttcagcttgtcatcggcgacctgcttgtccaccggctcaatggtgacggcaatcgcaatgacgcgctgacgatctttttcgtagacctcatagtcaaaatagatgtcggtgtggccgttgatctcgctcttagccttgtccagcacggtacggcgcacgtgggcccagttggccgcattgcagtccacctgctttttcagcgtctcaatgttccagaccagcggttcgcccttctcttttttggtgatgtacaggttctggtagctcttgcacagctcataaattttcagactatactggctcttcatcgggagcgtataggtgatattcatcgttgtgtagaactcttttagctggatcaggtgcggcttgagcgactggtcgagcgtcagcacgatcttgccggtgccctcgtcgatggtcgcgctggaaagccagcggaacatcgtgattttctgggtgcctgccaggcgtatccactggaccttggcgttggcgatgtcctcgatgtttttcttgacctgcttgtacatcgagccgttgtgcgggtcaacgccgcagagcttcaaaaactcgtagatcgacatctcgtaccggggcagctcggtgtccgacggcttgatcatcgcgaaaatgtgcagcatcagcttttgctggctcagcgaaaggctgtacattgcgttctggatcaggtcgttggatttgcggacaatcgtctgattgccgcgcccgctataggtagcaacaggggccgaaggcgacgccttggcagacttcgccccctgctttttgttatggttggcttttggggtcgttttcaacgtactttggggtgtcatttgcaaaacctcatcttttacaacacgttaaacgtatcatagcagattgtgcgcgctgtgtcaattattgtaacattcagcacattttctccgcgccgcacaaaatcccgtgttcttttgttttgggatttttagccctatttatatatatttagaaaagtagtatagctatgtcgaatattccaacacaaatgtgcgccgtgttacaacggtgctgtgcgcagcattccaacacaaatgtgtaaaacgcaacaatgtgcgaagcgtaacaacagtaaaaaagtttttttgcaggaaaatggcggcaaagaaaattttgtgggatttttaaaaagtgtcgagtataacaaccccgggcgcgaaaaaggaaaagtgagaaatgtgcgcagcattccaacagggcggatggaaaaatcctgccgcggggaaatgtgcgctgaataacaacccgtgctgaaaaatccttgtattgtgccgtcgataacaaccccggcccctgcagggcaaactgtgcgcagactaacaacccacggcaggacgcgccgcaaaaaaaagcggatttttgcgaattgtgcgccggataacaaccgctctgccccggaaaaaacgaattgtgccgtgaataacaataccggctgtacgctgtacggtggatttttcagaactgtgccgtcgataacaacagccgcccaaattctacagtttggaaactgtgcgcccgataacaacctcgctgccggaaatgtgcgctggataacaacccggtccggatacgtttggaaagcagacgaaattccgaaatgtgctgccgataacaatagccgaattttacccaccgcgcaaattgtgctgtggataacaacctgccgcccgcagaaaaaagtccgaattgtgcgcccgataacaaccattttttttgccccgcgatgcacaccgcaccgaaattgtgctgccgataacaaccccgcccgccgtaaactgtgcgggggattccaacgccggctccccggaattgtgtgcaggataacaacctgtataaaagaggctgcccggcaaactgtgccgccgataacaatacagcctgtagaaaactgtgccgcggattccaacccccgccgccccgctccggcagaaaatgtgcgccggataacaaccccgcccgccgccgaaaaaaacgccgccggtgttggaacaaacggcacagtttgaagtgaaaattttatttttctttttaaagggggtgtgctacaataagagagtaaaaagctccggctgcaaggcgcggcaggtactctgggacggaaaaggaaaatagtacgaaacaaataacgatatagtacattgtgcactgtgccgtcttgtggtacgatactactaaggcaataccgcataattctaagtgccgatacggcgggaattgtgcggtgttgccctaagaaagaggaaacaaaaatgacaacgtttagaaaaatgcgccgcggtaagcgcatcaaggaatcgtgagggtctgccgatgaacaaaaaagctgtgcccaccgccgcggcggtgcgggaacttgccatcctgaccggagccgtggccatcattgcggcggcggtctacttcttccttgtgcccagccatgcctcggtcagcagcatctcaggtctgggtatcgtgctggcaaactttgtgccgctgccgttgtcagccatcacgatgattttgaatgtcgtgctgctcgtcatcgggtttctgacctgcgggcgggagttcggtgccaagacggtctacaccagcatcctgctcccggcgtttatcggcctgttcgagcggctcttcccgaacctcggctccctgaccgacagccaggagctggacgtgctgtgctacatcctcgtcgtcagcgtggggctgagcatcctgttcaaccgcaacgcctcgtcgggcgggctggacatcgtcgccaagatcatgaacaaatacctgcacatggacctgggcaaggccatgtcgctgtccggcatgtgtgtggcgctctccgccgcgctggtctacgacaaaaagaccgtggttttaagcgtgctgggtacctattttaacgggcttgtgctcgaccactttatctttgacaacaacatcaagcgccgcgtctgcatcatcaccaaaaaggaagaagaactgcgccggttcatcattgaggacctgcacagcggcgcgacggtgtatgaatcctacggcgcgtacaatatgcagaagcgccgcgagatcatcacgattgtggacaaggccgaataccagaagctgatgagctacatgaaccgcgaggacccgcaggccttcattacggtgtataccgtgtcggacatgcggtatcggcccaagggcaacaccgcataattcccgccttacggcttaagcaccgctccggcggctgcggcacggcatctgcgttgccaaaatgctcgataagacatccagtattatctgcgcttttggcttagcagctgccgcacctcgctcgccgtatcggcacttagaattatgcggtattgcccaaggaataaaagtgccgccggctgttaagcggatccacctgcaccggataacaaaaaacgattgacgcagcagcgatgaattctgaaaaactgaaaaatttggagaaaaatttgaagttttttcaaaaaaggcgttgacaaatcccgtcgggcacgctataatatatgagcgttgagggcagacgcccaagacacaaacccgatggggattcgcataatggtagtgcagcggactctgactccgcccgtgggagttcgatcctctcatccccaaccacaccgcagcagcccagctgctgcggtttttctttacggggtgtagcgcagttggtagcgcgcttggttcgggaccaagaggccgtgggttcgaatcccgtcactccgaccaaaaggacctccggtttaagccggaggccctttttgttttttgtatatttttataaagcaaagcccccgtccggcagcggacgggggctttgctgttggtgcggttataaaagatgttacgcttcgacgccccaggcttcgatctgggtcagggcggggaagggggacgggtcctcggccttgatgagctcaaacagcttcaggctcttgaccgtgcgcggggagatggcaaaacactgcggggcggcggacttcttcagctccagcacctcgcgactaccgtcgtcaaattccacggtggcctgggtccaccaggcgtcatgcgggaagtcggcgcgcagggtcaggcgcagctcgtcgatggtaaccgggcggccaaagtccagcgtgagtgcggcgttggggtcgcggttgatgccccagctctggtagggccagatgccgtgggcgtcgttctcgtaaatgccgtcgatggcgttgcgggccgcaaagacagcttcgccgcgggtctcaacgttggcatgggcatgggggaagaagccggtatcgccgtgctcgtcataggggttgtaggcaaggttgcggcgcgcggcgatctcctccggggtggcaaagcgggcgcggatgatgtggcaggcaccggcaaagctcttggggctgtaggtgatggcctgctcaccgaacgggatgtggaagttgatctcgcgcttgacgacgtagacgagggccggggccattgtgtcctcaaactggatgaccacatactggccgggcgtgccgatctccagcgagacacggtcaccgggcttgtaggcgttcatgtaaacaaggctgacctgcccggcggcgggggccgtcagcagcgtcatgccgtcggtgtcgaggagcttgagcttgatgagttccattttattttgtctccttttatcctatcacaagggaaagctgttgagtaaagtaaatgcgtgtgcggtagagcgtgtcgggccaggcctggcgcagtcgggggtcggcgatgggcacggcctcggtcacgattttgtccgcaccggtcacggcggctgcggccagcgcaccgaacgctacggtatcaccgtccacggcgggcttctcgacgctcatcagcgtcagggccacggtgcccgggtagtcggtctcatcgcgcaaggtcaggccggtatcggtcaggtgtacgctgcggcggtaacggcccagccccggcacactgccgtaggcgggggcaaggtccattgcaaggccgtccagcgcgtcggtcacagtgacgtctgcggcggcaaacgcggcgccgggctgctggtcgtatttggcaccgtccgggtcgaactggggcaggttgtgccagccggactgcatcgtccagatctcataccgctgggggctgaacgtctttttgctgtaggtctccacgccgacgtcgatcagcagtggtctgccgtccctgtagagcgtcacgctgcccacatcgttgtggttgtggctgtcggcgttgctgccggccttgccgcccagtgcataggcaccgcggcggctgacgagaatgccgacgctgggataccagacatcgtgcggagcggcgggggcggcggtttcggcaaagtcggtgacctcgcgctcggccattgcggcctggatgtggtagaacaggttgatgccctcgctgtcgtcggggtggtgcagacggtccgggtcggggtccgcggccagtacggcggcccagtcgcgggcggccagcgtcatcagcggcaggctgcccacccgtttgccgaacaggtactcccgcacgccgcgggccccggccagcgggctgcagtcggcaaagttcaggtaatacggcccggcaatgtgcatgttgacgatgtactcggccatgttcctgatcttcggctcggcccagacgtcgtcaaagacgccgggggccattttgcacagcaggtccagcgcgttgaacatcgtcagcgcagcgtggcggtaatactgtgcgccctcgctgcagcaaccgtcgtcaccgtagtccttcaaaaagcagtcgatgctgtaggcggcctgctgcacataggcgggcaggtcctcggcaggggcgcactgggcggcggccagcagtacgttctgggtacaccagggcgtccagttgcacatcggctcgtcgccgttgcccatccaccagaagtgcgcggtgcggtagggcgtcagcacgcggcgctcgacctcgcccctgagccgtgcggccagcccgggggcgtaggcgtcgagcgcctcgcccagcaggccgcagacggtggcgatcagtgcgccggtctcggcggcgaacaggtctacaatgggccgggtcacgtcgggcagcggcagctgcggcgtgtcgcggatatagctgttgtgggcgggcagctgccaggcgctctcctcacagatgcgccaggccaggtcggccagcgcgggcagataggtgccgcggttcgtcacggcctcggccatggccagcgcgcagagcgtgcggcggcgggcaaagtaggcgtgctcccacttggcgcggtccccgctgcgggtgaattgcagccacagcgagagcggcagctccggcgtggtttgggcgtccgccagcgcggcctgcccggcagcgacccagcgtgcggcgccgggcaggctctcccacttggcgcggtccgccagcggcgggaacaggactggctgtgcggtcttaaacggttgcttcatcttttgcgtcaacatacgataccttcattctctgcatgtactcccgggggctgacgccctcgagctttttgaacaccttactgaaatagaaagcgctgtcaaagccgaccttgtcgctgatctcgtagaccttcaggtcggtggaggccatcagttccttcgcagcggtgatgcgggtggcagtgacaaactccacaaaaccactctcgctgttttgtgcaaaaagctggcttaaatagttcgggctgaaattaaagacggcagctacatcgttcagcgtcagccgctcggacagatgatcgcggatgtactgctgcacctgcccgacgacctgtgcgcggtgatccagctgggtgttggggctttcatggtagaaggccaccggctcgccctcatgcagcagcggcagcgcggcaaaggcgtcgtgctggctctcgctgatctttaaaatgtcgttcaccgggcggcccaccgcccagtaaatggcagtgctgaaatagttgtacaaaatctgcccggcggttttcaggatcggagccagtacagtctcggggtcctcgtccgcttccagcggcagcagcaccgagaaatgccgcagatccatggcggtcacgcggcaggggcggtacttgggcagcgtttcggcggccatgcgggtcacgccggtgctcagcgtcacaagctggcttgtgggcaggtcgggcgtttgcaggctgcccaccgccacaatatgccgcggcgctttgaaggtgacgcccagctcggcacactgccggtcaaacacggcgcgatccgtgaacagcccgccgtacagctgcagaaacaaccggtcccggaaggtgtcgaggctgaccggggcaggggatggcatccgcagctttttttctttttcggcagtggcgcgggcgtgctccagcgctgcggtcaggctgtcggcggtcagatcgatcttgacaaggtagtccacaacgcccagacgcatgctgcgtttgacataatcgaactcctcatagctcgtcagcatgatgaaggccggcagggcggagccgtccttatggcaggcttccgcaagcgcaaagccgtccatgaccggcatacggatgtcggaaaccacgatgtccggctgcttctcctgaacggccctgagcgcctcggcaccgttgcgggcggtgccgacgacctcatagcccagcgcggcccagttcagcatgccctgcataccgatcaggaccagcggctcatcgtctacaagcaagactccggtcacaagaaaaccccctttatttttggctgtccgggcccggcagacggattgttaccgttgtgccgatgtcgggctcactctcaatgctcaggccgtaggcctcgccaaagctgtattgcagccgcttgtggacattccacatgcccacatggcggtatttggcggcggcctcctcggggccgggctcctgcagggcctttgcggcctgctccggtgtcatgccgacgccgtcgtccgtcaggtggatgagcacatcgccgttcgcggtgtcgcgctcgacccgcagtgtgacctccccggcactgcccttcggctcaatgccgtggaagatcgcgttctcgacgaggggctgcaaagtgaaccgcgggatcaggcagctgtggttcagcgactcatcctcgatatagctgacgtccagcgtgatcgtgccgccgtagcggtactgctggatcgtgaaatagtcgttcagcagggcgaactcctcatacagcggcacaaggcgctcgttgctcttggagatgctcttgagcagacgggacagcgccatgaccatctcggcaatgccgggggcgtgctggatggtcgccatccacttgatgctgttgagcgtattataaatgaagtgcgggttgatctggttttgcagcatccggtattcgaggtcctgcttctgcttttcgtcctcgaggcggtgctccatcagcgcagtgacgccggccgacatgctgttgatgccgcggccgatgtcgcccagctcgttgtcccactcaatatccgggtcggcagagaaatcgccgccgctgattttttcaatgcggctctgcagcgccgagatcgggtgggcgatcatccggtgcagcaggaacgccagtgagcagcccagcagcaggatggctgtcaggctgatgaggagcggcaccgacacgaaggtgatctgccgctgtgtggggccgttgggcagcacctcgatcaggtacagctcatggatgccgatgggataccgcacaacaagctgtgcgctgctgccggacccgcgtgtgtagacctcggtgttcgggtcgagcgtgttgctgtccagcgggacggcatcgtcaaagtcggcgatggagccgttcagcgcggacagcaggctgccgttgatcgtgtagaggttttcgcccatttcccaatacagttgtccgccgtcggccagggtgaagctgcgcagcggggaaaggatcagggaaggggagacaaagatacaggcatgggccgtgcggtctgtgccgggcagggtcagggtgtgggtgacggggatcgtgttggcagcctgggagttcagggccagcgggtcgcggagaatgcagtcccatccggtattgggcgaatcgtaaccgggaatgcgctgcagtatatccggcgtcagggtcacggcattggtggccgccgtgccgaacatcatctgccgccccgaggcgttgatgagcagaaagcgctggatgtaggccatcgtgcgcatcgagttgaacttggcggtcaatgtcgggtacatcgacagcgcctggttgctggcggtgtcgccggtcagcaggtaggtgcgcatgccggggttgtaggcgcaccagccggccaggtcgtcgatctcatccacatcccggcggatggccgatgccgcggtctgcagggcatactcggcgttcaggatcgtcgtgcgctcccactcggcggtcatctggtgcatattgctggcggcgatgaccagggatgcgcccagcgtaaaaaacatcgtaagcgccagcacccgtgcctggataccgctgcggcggaatttcagcttgtccatgaaggctcctctatgtaaatatgtaaataaaaatgcagatcatgcaggaaagcggggaagaaaacacaccgccgtttataaaaagataccttattataataggtgtgtcaagcgcaaaaatgtacaaaacagacaaaacgacgcatgcacagacagggagaactgtagggaaagataaatattgcaggtttcttaaaaaagtacaggtttttccgccgcgattggggaactgccgtaaaatttgcaaaccgaaccccaaaaaaaccatccatttcgacgggaagatgatgtattataatggcaacgaaagggacaggcccccatgaggggacaagcctggaccccgaaaaatgttttcttattaggaggagaaacattatgcgtaaaatgcagaagattgctgctctcggcctggcaggtaccatggccctgagcctggccgcctgcggcggttccggcgactctaccgctgacaccgcttccaccgcggagagcaccgcttcttccaccgaggccactgccgagagcaccggctccggcgacgaggctgtcaccctgaactgggccctgtgggataaggactccactgcttactggcaggctctggctgacggctatatggagagccatcccaacgtcaccatcgagatgaccgatctgggctccaccgattacatgacccagctggctacccagctggccggcggcaacggtgagctggacgttctgtccatcaaggacatccctggctactccaacctgatcaacctcggcatgctcgagcccctgagcggcaagctgaccactgacgagagcaagttcaacggcgttctggagcagctgactgcagaggacggcaactattacgctgtcccgttccgctctgacttctgggtcgtctactacaacaaagacatcttcgaccaagccggtgtcgagtatcccaccaacgatatgacgatggcggacttcgacgccaagatccgcgaggtcaatgaaaaggccggtgtctacggcaacatctaccacacttggcgttctaccaccacgctgttcggcatcctggacggccagcacaccgttatcgacggcaactacgacttcctgaagccttactacgagcaggtcctgtccgagcaggctgacggtgttatccccaactacggcgagcagaagacctccggcctgcattactccggtgcctttgagaacggccaggctgccatgtgcaacatgggctcctggttcatcgctaccctgcagaagtacaatgcggaggctgcctccaacggtgtccagcccgtcaacttcggcatcgtcaagtatcctcatccggacggcgcacctgccggttctactctgggcactgtgaccagcctggccgtcaacgctaactccgagaagaaagaggctgctctggacttcgtcaactggtgcgcttctgaggacggcgccaagtgcgttgctgccgtcggcaccttccccgccgttgccagcgacgagaccaacaagatcatctcctctaccgatggcttcccctctgacgacgcttctctggaggctctgaacaccaccgccatctacctcgagatgcctctgtctgacaaggcttccgagatcgagaccatcctgaacaccgagcatgacgccatcatgaccgagagcgagacagttgacgagggcatcgccaacatgaacgagcaggtccaggctctcctcggctgattcccaaatgattccctgacttctttttcataagttttccttttccttccaaaaggggcgggcgggcgcgcctgccccttacttattgccaaaacaccgaggaggtatgacccatggctgaaaccacgcaggctgtgcaggcaaaaccgaagcgcggcatgagcaaatctctccgcgacagtctggttgcctacagcttcattgcaccgaacttcatcggcttctgcatctttacgctggtgcccatgatcttcgctatcgggctttcgttctgcaactgggacggtgtccatcccgttgagttcaccggcatcagcaactttgttgccctgttgagcgacaaaactttcaaggctgcttttgtcaatacgctggtttacgccatcggcacggtgccgctgacactggtgtgcagccttggtctggccatgctgctgaaccagaaggtcaagttccgcaacttcttccgtaccgtttcgttcttcccctacgttgcttctctggtcgccgttgctgcggtctggaacatgatcttcagcccctccatgggcccggtcaaccagatcctcgcaacccttggcgtggagaacctgcccaagtgggccgccggtaaggacaccgctatgctcacggtcatcctgttcagcgtctggaagaacatgggctattacatggtcatctacctggccggtctgcagggcaccaaccccgagctggaggaggctgccgagctggacggtgccagcaagtggcagatcttctggaatgtaaccctgccgcagctgaagcccaccaccttcttcgttatcatcatgctgaccatcgcctccttcaaggtgtatgaccagatgtacatgatcacccagggcggccccggcaatgcgaccatgacccttgtttattacatctacaacgtagccttcgtcaacacgccgaagtacggctacgcaagtgccgtgtccatggtgctgtttgtgctggtgctgtttgtcaccatcatccagttcaagggctcgtccagcaacgactaagggaaggaggaaacacacatggctactaccgcagttaagaagaagacaggctccatgaaggcgcagcatgttgtcagccgcgtgctgatctacgcactgctcatcgtcgtggccgccctgatgctcatcccgttcctgtggatgctctccgcatccttcaagctgaacaaggacgtctttacgttccccattgagtggatcccctcgaacccgcgcccgcagaactatgtggacatctggacgaagatccccctgctgaccttcgttaagaacaccgcgttcctgaccatcgtcgtcacgatcttacaggtcctgacctcctccttcgccgcctatgcgttcgccaagctgaacttcaagggcaagaatgtgctgttcctgggctacatcgcgaccatcgcggtgccctggcaggcttacatggtgccccagttcatgatgatgcgctcctggcacctgaacaacacccatctggccatcatcttcctgcaggcgttcagcgccttcggcgttttcatgatgaagcagttctatgagggcgttcccaccgagctgtgcgaggctgcccgtatcgacggtctgtccgagtacggcatctatgcccgcatcatgctgccgctttctctgcccgctgtgtcgacgctggtcatctttaccttcgtcaacacgtggaacgacttcctcggacccctgatctacctgaccaagaccgagctcaagaccatccagatcggcctgcgtatgttcatcagccagtactctgccgagtatggcctgatcatggcggcttccgttgtcgcactgatcccggtcctgatcgtattcctgtccctgcagaagtacttcgtccagggcgttgcatcctccggcctgaagggctgatatagctacccagaagttacccatttgtacggggcgcaaggcgaaagccctgcgcccccttcttttttaaaataaaaaataagaaataataaataataaaaaatgtggagttttctcccagtggtcgaaaacaaaaaacgtaggggcggatttcatatccgcccgcagtgttgctcacagatgcacaatattttttagcggagcgcagcgacgcgaaccaccgcatttattatttattatttgtgagcatgaggtttcctacaatgaaaacattctcaaacaaagtcttgaccaaacccgaggctgagcaggcgctggataccgctatcgcgctcgtccgccggaatctgccgctgtataccgaccactgccagaaccattccagcgtccatgacatctatccccaatgcgagaacaaccagtggacctgcggcttctggcccggcgaggtctggctgagctatgagcgcaccggtgacgaggcgttcaaaaataccgcgctgaccctggtggacagcttcctctaccgcattgagcacaagatcgaggtcgaccaccacgacatgggcttcctgtacagcccgtcctgtgtcgccgcctacaagctgaccggcagtgagaaggggagaaaggccgctatcttggctgccgaccagctctgcacccgctttcaggagaagggcgagttctttcaggcgtggggcgcgctcggcgctgccgacaactaccgctacattatcgactgcctgctgaacgtgccgctgctctactgggccagcgagaccaccggcgacgcccactacgccgatctggcgcacaagcatgtcacgacctgtctggccaactccatccgcccggacggctcgacctaccacaccttcttcatggaccccgtgaccggcggccctgtgcgcggcgcgacctgtcagggctataaggatgactcctgctgggcccgcggtcaggcgtggggcgtctacggcacggccatcagctaccgctacaccagacgccccgagtatctggacgccttccgccgcgtgctggcctattatctggagcgcctgcccgaggacctggtcccgtactgggatatgaccttcaccagcggcaccgaggagccacgcgactcctcctccgcgtccatcgtggcctgcggcctgctggaggccgccaagtacgtcggcaccgacgaagctgccgagtacacgaagctggccgcccagatgctgggcagcgtggccgcgcactacgccgtcaaggaaggcccgcagggcattggtcttgtgcgccacggcacctacagcaaaaagagcccctacaacacctgcacgcccgagggcgttgacgagtgcgtcagctggggcgactacttctacatggaagcgctgacgagattgacaaaggattgggagctgtactggtgatgaaattacatacaaagtccgattttacggcgctgatgcaccgatttctggacccgctgctgccgctgtattccgagggcggcgcacggctgcaccttggcgacaccggcgtgacctacccgggccgtacgatcgagatggaagccttctcccgcccgctgtgggcgctggccccgttctggacgggcggcggcagggcggatgacttcctgcgcatctaccgcaagggtctggccagcggcaccgaccccgagagccccgaatactggggcgacccgaacgattatgaccagctctttgtggagatggccgcgctggcctgcgcgatcctggagacgcctgagagcgtctgggagccgctgaccgatgccgaaaaggccaatctggccaagtggctcgatacgatcaaccaccatgacctgcccggctgcaactggctgctgttccgcgtgctcgtcaatctggcgctcgactctgtcgggatgccctgcgatatggcccgtgccgccgctgacatggccgaggtcgataaatggtacgtcgccgacggctggtactccgacggcccggcggacatcaagccccagaaggattactacaacccctgggccatccagtattacaccgtgctctacagcgtgtttgccgctaagagcgaccccgcccgcgcggcgctctaccgcgaccgcgtgaccaagtttggccagcagtttgcgcgctggttcgatgaaaacggcgcggcgctgccttttggccgcagcctgacctaccgcatcggccagagcgctttctactccgcctgcatctgggccggtctcgagccgctgcccctgccggtcatgaagggcatcatcgtgcgcaatttgaactggtggctggcacggcccatctttgaccgcgacggcgtgctgaccatcggctacggctacccgcagcagtacatggccgagcagtacaacgcccccggcagcccgtactggggcctgaaggtctttttgctgctggccctgcccgacgaccacccgttttggaccgccgaggccgccccgctgcccgtcgagctgacccgcgccggtgtgaccggccagcccagcgcagacctgcttttgcagcgtctgccggacggccagctgaacgcctactcgcccgccaactacgagaaggacgaccacggccagtttgtagagaagtacggcaagttcgtctacaacacgcggttcggcttctcggccagccgcagctatgtgcagctggagcaggccgcgcccgacagtatgctggccttcgtcatcgacggctggaccttcgtgcgccgccacagcgacaggtttgtcctgatgggagaccgtctgctgagcgagtggcggcccttcccgggcatcaaggtcacgacggagctggtgcccactaagtggggccacgtccgcaaccatacggtggagagcaccatcgcctgcacggcgtatgactgcggttttgccgtgcccaagttcgccgccggctttgccgccgcggccaacggcaccggggccgaggcccacaacgacacctgccgctgcaccgtgcagggccgtggcggcgagggcttccttgtgaacgcctaccccaacacgaacctgtacgaccccaacacggtcatccccgcggtcaggtacgacgtccccgttggcacgtccgtctttaccaccacagtggagagccggcacgaataattctcttggccccctctgggagggggctccgcccgcaggcggtgggggagagagccttgccatggcccgaaatatttcggattaccgcagagttctcttcctccggccttcggccaccgttcccccctctggcgctacgtgccacctcccccgtatcgggggagtctgtctcgcagagggaggtctttagcgcaaagagagagaggtaatgtatatgtatccgcagtccaattctgcccgcagtgtccgggatctgtccggcgtgtgggatttccgcttcaacgccgatgagccctggcagcccattgcggttccggcttcctacaatgaccagagccccgacccggagttccgccgccattacggcatggcctactaccgcacgaccttcaccgtgcccgagggcgcgcgccgggtgctgcgcttcgacgctgtgacccacaacgccgtggtgcggctgaacgggcaggaaatcgccagccaccgcggcggcttcctgccgtttgaggccgacatcaccgcgctggctcagcccggcgagaccgtgacgctcgatgtcgaggtggacaaccgcatcggccacagctcgctgcctgtcggcaacgagggcggcacggcgttcttcggctccgacaacgcgggcattcccgccgtcgaggccggcaaggcgcgccagcaggctcagggcatcaacctgccgaactttgacttcttcaactatgcgggcatcacccgcccggtgcacctctgcacgaccccggcagcctacatccgcgatgtgaccgtcgccgccgatatgaccggcacgctgcgctacacggtggacaccgtgggcgagggcagcgtcaaggtggagatcctggacgcagaggaccgcgttgtggcctgcgccgacggtgccgcgggcaccgtgcaggtggagaatgcccgcctgtggcagcctcgccccggcacgccgtatctctacacggcgctggttaagttcggcaaggacgagtaccgccagaagttcggcttccgcagcgtggaggtcagcgggcacaagttccttattaacggcgcaccgttctatttcaagggcccctgcaagcatgaggactcggccttccgtggccgcggctatgatgcctgcgtgacggtgaccgacctgaaattgtacgagtggctcaacgccaactgcctgcgcatgagccactacccttacgccgaggaggtctacgacctgtgtgaccgtctgggcatcgtcgtcatcgacgagacgccggctgtcggcatcggcgcgggcgcggcgtgcgacccgtatcagaccttcccgctcaaggcctaccacagcgccgtgctgcgggcgatgatcgagcgcgacaagaaccacccctgcgttgtgctgtggagcctgggcaacgagccggacaccgagcacttccccgagagcgcccgcgactactggcgcccgctgtatgagcaggcccacacccaggacccgcaggaccgcccggtcacgatggtctgctgccagaacgactacacgaaggacatcacgacccgcacgatggacgtcgtctgcatcaaccgctactacggctggtacaacctgagcggcgatctggataacgcggcctacgcctttaagaaggaactggatttctgggagaccatcgacaagccgctgattttgtcggagtacggcgcggacacggtggccggtatgcacggcttcgcccccgagatgttcaccgaggagttccaggtcgagtattaccgcacgatcaacggctgtctggatgagcgccgttttgtcgtgggcgagtggccgtggaacttcgcggacttctcgacccagcagggcccgatgcgcgtgggcagctgcaaccgcaagggtctgttcacccgtgagcgcacccccaagctggctgcccactacttccgtgaccgctggggcaaaaaggaaccgaacgaccggtaagcactacccctgagatagaaaaaagcccgctgttcatcgcaacagcgggctttttcgcgattatttcagattcggtctgtcctggtcgccgtcggccttgaacatgacgaagctctcgggcttgttcgtgaagtagtaatactcggtgttctcgtgcacgggtggggtcaggtagttcgggatgatgcagccgtcgccctcgacgcgctcggtgaagccggcggccagccagacgtctgcagggataccggcgttgtagcagtccatgtactcggcacccgcgtggttcaggatggcgtccagcgccgcgccgatgcggggcagcacgctgtcctcaccgatgaaatccacgagccgcacaacggcggcacagccggtctcctgcgcggtgacggtgcgggtcacgacgtaggccagcagctttccgttctcctgcgcggcccagacatcgtacttgaagtgcggatagtggaagtaccgccgccgcatgtaccacacatccttgcgcggcgtgtggggcgtggcgggcatacccagcgggatcaggtccgcggcgctctcgattttagcaaggcccagatcgcgctgcacggggggcagggaataccgcagcggttttgccagatagtaggcgcggcggcggcccagccggtagtaatggggcaggcgctcggccttccagcccaggaactggtagaatgtgcaggtgttggggcggatgttattgcaggcgacgacgtcggcattcaaaagcccgggcagggcgttcatcaattccaaccccacgccgttgtggcttttggccgcgacccagacgctgacccagatgtccggcctgcgctttgtgttggccagtatgtacccggcggcgctgacgtactcgccgtcctgctccgccacggcaaactgcggcacgccgccgcggcccgcgtagtagtggtggtacagctcggggcggttcagcagcggcaggcgcatatcaaagtttgcgttgataaagtcgatgatggcggcatcctcgccgaggcgtgccagccggaatgttgtatcagacaatggccgaacctcccgtgaccggcagcgttacgccggtgatgaagcctgcctcgtcggagagcaggaacgccatggcgggtacaacgtccgcgggcgttgcgttgcggcccatggggttttcctccgccgcggcctgcacgatgagatcgggcgtgtccttcaggaagttcgtctccatcatgctgggggcgacgcagttgaccgtgacgccgaagcgggcatactcgacggccaggctcttgaccagcccgccgatggcgctcttggccatgacgtaagcggcggtattcttgggcgggcagccgatggtgtagctcgtctggatgaacagcacacggccaaacctggccttggccatggcgggcagcacggcgcggcagatgcgcacggcgctgtggacctgaatttccagatcgcggtcaaagcgggtctggtcgaacgccttgaatttggcgttcacaacgggcagcgcgggcaggtggatgaaatgcgtcggcgcgggggcggaggccgccagcacctgcacgaaggtatcgaccttggcgcggtccgacaggtccacgtcgaacgggcgcacctgaccggggaagcgggcgcagaggtcagccagcttttccagatcgccgcagccctgggccagcacaagcgtatcggcgggcgcgttttgcagcagccgctcgatcagcgcgcggcccacatcgctggtggcaccggttattaaataggtataggacatgattttctccttgttattttgctaacccggccttgatgatgccgcgggtcacgcgcttgccgtcctgattcgtgataacggccttgatctcggcctcgctgccgatctcgctgacgctgacaaccgtgcccttgacggtcagcgtgtcgccgatgaaaatcggcttggcgaatttgcactccacgccgtggagcaggcagtgctcgccgggcagatagacgcccgccagcgtagagaaaaagctcgcgcccagcatcccgtagacgacccgccccgggaagccgcgtccccgggcgtagtcggcgtcgatgtggatgggggagacgtcccccgtgatggcgcggaatgcatccatcatctccggcgtgacggtcacggtaaattcctcggtcaggccgggggtcatctccgccagcgtgtagtggttcatggcaggctccttcgctgttcgaaaaaaggcggcaggatgccgccttgcgtattctcttggccacctcccctggcaggggaggcaaggtttttacaccatccgtgcaaccagatccagcaggtcgccgacatccttcaggccgcggacatccgcgagcttgaacttgatgttgaatttcttctcgatggccgtcagcaggttgatctgctccaggctgtcccagtcctcgatgtcatcggcgcaggtgctgcgggtgatctccagggtgtcgtcgtcaaaattatcgcggaaaatatcctgtaccgcgttcagaatttcctgttcgctcatagtatagctcctttatagtatggtagttacctatactatagcataaaagcggggcagacgcaagaaaaagtgaggggagaggagatgccgcagcgtttccgggtcgatgacgagcatcgacccctgcacgtaggggcggattccatatccgtccggaaagtctgcggcggcctctgccttccccgggcgagcaatgctcgcccctacagaccgtttcccactgtgttcactcctcactgatgttcacagcccataatcctccagccgccgctgcaattccgcctcgtcggctacaaaaacgccctgctgcagggctaagacgtcgctttcgggcagaaggcgggtgtaaaggtcgtcgtaggtcgccagcgggccgatgccgtcggcggtgtacagcgctacgtgcccgccgctgtcctttaaaaggtagcgcggcgcggcggtttccggctgcgggcgggcaaaccagaccagcgccgccgcaaggcagagcacggccagccccgccagcagcgaaaggtacagcccgtgcccgtcgatttgtcggttttgcataataattcccccttgcacggttagtatggccgccatgacagacaaaaacaccgaaagttgtgaattttacgtctgacgctgtacttttgccccctttttgtggtataatccattctatagcattgtgcaatttcgtgttaccacgcttcgatacagaccaaaggaggcggttcccatagaacccaagcagcagcgccatatctccacagatggcgtaaagacgacgacaggtgccaccggccagcccggcgcacccgcacccaagaacaagaaaaagcccaaaaagcgccgcagcatcatcggtatgatcttcagcttcatcggctgtatgctctgcctgtgcattatggcggccagcgtgggcggcgtgctgctgtccatgtatatcgtgcaggtcacggcggatgacgccgagaccctcgatctggacaaccagaaaaaccgccagacgtcgattgtctacgacatcaacggcaacgagtacgcctcgctctcccgcaacgagaaccgtatctggcgtgagctctccgctatgccggagaatctgcagaacgcggtcatcgccatcgaggacaaaaacttccgcaccgagcccggcatcaacctcaagggcaccatcggcgcggcgctgaacgctttcaccggcaaccgcatctggggcacgaaccgcggtgcgtccacgctggagcagcagctcatcaagaacctgaccggcgataacgagcaggacaacatgcgtaaggtgcgcgagatcttccgtgcgctgggtctggacaacaagtacagcaaggagaccatccttgaggcgtacctgaacacgatcccgctgaccggcatcatccacggtatggaggccggctccatcgagtatttcggcaagcatgtcgaggatctgaccctggccgagtgcgcgacactcgcctccatcacgaagaacccgacgaagtacaaccccgccacgaaccccgaggagctcatcaagcgccgcaaccacgtgctgtatgagatgtacacccaggggtatatcaccgaggccgagttcaacgccgccaaggccgagactgtcaccctgaccgaaaagacgagcaccaccgagaacgcgacccgctcgtccagcaactcctggttcaccgatgccctgtacacccagctgctgaaccagctgcaggaggacctgaactacaccgccgacgaggcgaaggagctgatcttctccggcggtctgcgcatctattccaccgtcgaccccaccgtgcaggcgggcatcgagaagacgatgtacaacgaggacgacctcatccccgcactgtggcacgaggagcctgtctgcctgcgcgactatcccgccgacagcagcagctgggatgaggtgcagtacgacgaggccaccggcctgcccatcacgaaggacggttacgccgtctacgggcaggaggctatccccgtctacgccgatgacgagggcacgaccctcaagaccggcacctccaccgacccggattaccccaacgacaccaccgagtacctctgcgtgtacgagaaagtccgcacgcaggccgccatggcgacgctggactacgacggtaacatccttggcatcggcggcggtatcggcgagaagaaatacgatctgggcttcaaccgcgcgacttcgccgcaccagaccggttctacgatgaagcccatcggtgcctacgcgctggcgctggattataagctcatcaactattcttcgcagattttggactccccgtactactcggccgaggacaagaaggtactgaaggatcagtatatcggcgtcatgagtcccttctccgaggcggcgcagtcccgcagcgatgtgtggcgcgcctggccgacgaactacggcggcgcaggcggtcagggcaacccgatgcttgtctatgacgcattgcagcagtcttacaacacggtggctgtctgggtcggcgatatggtcggcgtggactacctgtacaactttgtccatgacacgctggaatgcagctatatcaacgccgagaacgatatggacctcggaccgctggtcctgggctcccagagcagcggcctgacggtggtgcagctggccggtgcgtacacgatgttcaacaccggtacattcacgacaccgcactactataccgagatcaccgattaccagggcaacatgatcctggacaacaacaagtatatcaacacgacccaggccatcagcgcggacacggcgtacatcatgaaccgcatgatgtggaatgtcctgcacagcagaaagggtactgcctacggcaaagcccccgacggcgagatggactctgtggccaagactggtacgacgagcaactacaaggactacacctttgccggtctgacgccgtactacgtgaccgccatctggtggggttgtgaccgcccgaccgagatggacacgctgggcaaggcgggccgcaacgccagccccatccagtacgcctggaaggcactgatggaggatctgcaggccgacctgccggtcaaggagttcgccaagggcgagaacgtcgttgagaaacactttgacacctccaccggcgcgatcatctccggcggcggcagtgtgggctattacaccgaggacaacctgcccgacaacagctacacgatctccgaggacgacccctacgccgccctggcccaggccgccgcggacgctgccgccgccgcaggggacaccaccactgagccgacggaataaaaagctgcctcccatgtaggggccgggcatgcccggcccgcggcctttccgtaagcatacgtctgccttacacgacagggcctcccatgtccggcccctaccgcacagcagagaaaaacacaccattcgaatcgtacccggtttggatggtgtgtttttgtatcagctacagttgtgctcgcacaaaagatatcgacttttccctgctgtgggctgtgcaatttgacaaattgcacaaaaaccgccgcaaaaggcttgcaaccgggccttgcccgtggtatgatgggacacatcgagaacagttgtacacaagggggatacacgatggccgagaggcgttttctgctggtagacgcggatgttctgccggaagtttttgtcaaggtgctgcaggccaaggagctgctggcctcgggtgcggtgagaaatatctccgccgcggccaagcaggcaggcatatcacgcagtgccttctataaatataaggatacggtgtttgacgccgagaccgggcgcgagtccatcaccgtggtggcaacgctgctggataagaccggcgcactgcaggggctgctgtcgggcatttcggcggcgggcgcgtccatcgtgaccatcacccagtcccgcccggagaacggcgcggcccaggtcgaggtcacagtccgcaccggcacgatgcagatgccggtggatgagatgctgacccgcctgtcccaccagccgtgcgtggtggagatccacagaggcgcgtgaccgcagggtaggggcgaggcatgcctcgcccgcagccttgccggaatagctctatcgcgggaaagccgcgggccgggcatgcccggcccctacagagcatataccgagtgtaagaatagggggatttttccaatggctaaaatcgcaatcatgggcttcggcacggtcggctctggcgtgctggaggtctgccgccgcaatgcagcctccatcgcccgccgcgccggtgagcccgtcgaggtcaaatatatcctggatgtgcgggacttttccggttctccggatgccgcgctttttacgaaatccatcgacacgatcctgaatgaccccgaaatcaaggtcgtcgtcgagaccattggcggcacaaaatttgcctacccgtatgtgcgccagtgcctcgagagcgggcgcagcgtttgcacctccaacaaggagatggtcgcgacctacggcgcagagctgctggcccttgccaaagagcacagcgcggccttcctgtttgaggccagcgtcggcggcggcacgccgatcatcaccccgatgcaccagtgcctggccgccaaccatatcagcagcatccgcggcatcgtcaacggcacgacgaacttcatgctgacgaagatgaagcgcgagaacatgggctttgacgaggccctgaaaattgcccagcagctcggctacgccgagacgaaggaccccggcgacgatgtggatggccgcgatgcctgccgcaaaatcgccattctggccagcctcgcctgcgggcatcacgtctacccggacaacatcccgacccgcggcatccgcgacatcaccgttgctgacatcaaggccgccgaaaagctcgacagcgccatcaagctgatcgcctggtacaacgagggcggggacggtcagatggccgcgggcgtcgagccgatgctcgtctccaactcgaaccagctggcgggcgtcgatgacgtgttcaacgccgttttgatgaagggcgatatgctcggcgacgtcgtgttctacggcaagggtgcgggcaagctgcccaccgccagcgccgttgtggccgacgtcattgacgctttgaaagagggcgtcaaggtacacgactcgctgttctggaagcccgccgagaagccggagggcatgctcgaggacaggaacacctacccgtggtatctgcgcgtgaccggtgtggcggcggcgctgctgcccagcgtggccggtgcgggccatgtggtttttgaggacaacggcgaggccgcctatctggtcgatgccgccacgtctgcggatattgccgctgtcacggagaaaatcgaagtgctgggcggcaaggtcgcgctggccatgaagaagctggaagactgagagggggcagggtatatggtaactgtaaccgtcccggccaccagcgccaatgtcggcgccgggtttgactcgctgggtctggccgtttcgatgcacaacgtctttacgtttgaggaatcggaccgcattcagatttcgtccgtcgatgggacccatgtcccggcgggcagcaacaacctggtctaccgctcggcccgggtcgtctatgaccagctgggcatcccgctgaagggtctgcgcatcacccagcgcaacgacatcccgatggcgcgcggcctcgggtccagctcggcctgcatcgtggcgggcatcatgggcgcgaacgccctgctgggcgacaagctgaccgagcgccagatgctgacgctggcgacggccatcgagggccatcccgacaacgtcgcccccgccatgctgggcggctttgtgaccagcgtcatcgacgagggccaggtctacagcgtcaagaaggacattgaccccgaactggcgtttgcggcgtttgtgccggacttccgcctgctgaccagcaaggcgcgcgcggcgctgcccgccatggtcagccataaggacgccgtctacaacctgtcccgcgcggcgctggccacggcggccttctgcgagggcaactacgcgctgctgggtgtggcgaccaaggacgtgctgcaccagaagtaccgcctgccgctgatcgagggcggtgacgacgtctttgagctggcgcaggacctgggtgcgcaggccgtttacatctcgggcgccgggccgaccatcatggccgttgtgcacaaggacgacaccgagtttttcacccgcgcagaggcagcgctggctgcggacagcccgctgcgccattttaccgtgcatcgtctgctggccgacaatgtcggcgcagtggtgagctgatacaggaacaggggagagagtacaccaatgggcttgatcgtacaaaaattcggcggctcctcggtcaaggaccgggaccgcatcttcaacgtggcgcgcatcgtcatgaacacccgcaacgccggcaacgacgttgtcgtggtcgtctcggcgcagggcgacaccaccgacgacctgatcgccaaggcggcggagatcacctccgacccgtcccaccgcgagatggatatgctgctggccgcaggcgaggagatttcgatttccctgctgacgatggccttgcaggagctgggcgtctccgccatcagcctgacgggctggcaggcgggcttcaacacagaccgcgcctactccaaggcgcgcatcaagcgcctggacaccgagcgtgtcgagagtgagctggcgcgcaaccgtgtggtcgtcgtggcaggcttccagggcctgaaccgctccgacgacatcacgacgctgggccgcggcggcagcgatacctccgccgtggcgctggccgctgcgctgcacgcggaccgctgccagatcttcaccgacgtcgagggcgtctacaccgcagacccgcgcaagatccccaaggcaaccaagctcaaggagatcacgtttgacgagatgctcgagctggcgtccctgggcgcgcaggtgctgaacaaccgcagcgtcgagctggccaaaaagtacaatgtcgagctggaggtcatctccagcatcaatccggtgcccggcaccgttgttaaggaggagaccaaagtggaaggtatgctcatcaagggtgttgcaaaggacaccgacgtcgccgttttgaccgtgaaggacgtgccggatgtgcccggtatgtcgttcaaaattttcagcctgctggcccagaagaacatcaacgttgacatcattctgcagaccacgggccgcgacggcaagaaggacatgagcttcaccgtgcccctgggcgacgccgagagcgccgttgccgcgctgaaaaacgccacgcaccgcatcggcggcggcgacatcaccgttgacaagacctgcgcgaaggtctccatcgtcggcgcgggtatgcagagccactccggcgtggcctccacgatgttcgaggccctgttcaaccagaacatcaacatcaagatgatctccaccagtgagatcaagatcagcgtcatcatcgacgaggccgacgccgacaaggcagttgccgccatccacgacgcattcatcaactgattgtaaggtcttatatagagggaaatgggtcgtcccccgtgtacacgatggtgcacgggggacgttgtgtatttaatataaaggcaagcgggcagagcccctcagacctcgcaggctcggccagctcccctgaaaggggagcctttttgcgcgggcttcgccagcgagaaagcctcctcacgcagtggggaggtggtcgagcgtcagcgatgaccggaggggctctgcccgcttcctactattacaaaagcttctcacctgctgcaaacttcgccgtcagcttacccttgccaaggtacgcataccgctccaaacgctccgcagcgctgaacgcccgcatatttttaagcgggtcatcatccagcaccagcgcgtcaaacgcatagccgtcctcaaacaggccgaccttctcgccaaaatcggcccagaaatctccgccgccgacagtcgccatatacagcgcctccaccatcgtcagcggcttctcactctggtcgatataccgccagcgcagcttgctgacctgcacggcggtagccatgaccgtgaacaggtccagcgtctgaccgccggccacgtcgctgcccaggccgacgcgccagccgccgcgcaggtagtgcgccgcgggggcgatgcccgcaatgacattctcgttgctggtggggcagtgggcgatcatgacgcggttctgcttcatcagcgcggcctcgtcatcggggctgtagatgcagtgagccatgacggtgggcacgccgccgccgaacaggccgtaccggctgtagctctcgccgtagaattttgtgccggggcacagctcggcgacccacgcaatctcacccggattctcggacaggtgactctgcgcaggtacgttgtattctcttgccagttcgccgagaccgcgcatatactcgtcactcgtgctgagggtgaagcgcggcgtgatcatcgggcgcaccgggcccgcgtgcagggtgttttcggcgcggcaggtatccagccagcggcgcgtctcggccagacccgcggcggcggacggctcacggtagctgtcagggctgttgcggtccatgcccagcttgccgacaaaggcggaaagtcccgcgccgcgcagctggtgcatcagttcgagcgttgcgtcggtgtgcagcgtcgcaaagatgcaggcgcgcgttgtggcgctgtttttcaggtcgcgcacaaaataggagtagcccagcttggcgtaggccgggtcggcgtagtgggcttcctcggggtaggtgtactgctgcagccagtccagcagctccagatccatcgccgtgccgcaatagctgtactgcggcgcgtgcagatgcaggtccacaagacccggcgtgatgattttacccgtatagtcgagaacttccaccccggcgggggcagtctcgctgaatccggcgcacaggccgttttcacacagcagatagccctcgcggacgcggaaggtgtccggggcgggggtgtcgaggaaggtgcctttcagggtgaaagtgttcatatagtatacctctttatatagaattgctctgtaggggccgggcatgcccggcccgcaagtttacggcaggtgtctgcccacccgcggggcgtcggggacgccgccccctacaaagcggcgattccagactctattataaacaatccaccccatctgttgcaagttttttatttactttacgtcgctaaagcggtataatactaatatctattgatgtttgaaaggaataacgatttggaacgtaaacaacttgcgcccggcgtttgcattacaacgctggatgcttctaaattcaaccgctgccgcatcacgctgcatctgcgctttccggcaaagcgggaatctgccaccgacgccgcggtgctggcccttgtgctggaacgcggctacgcggcctgccccgatatgaccgcgctgtcccgccgcctggccgagctgtacggtgcggacctcggcgttgacctggccagcgcgggcacggaccgcgtgctctccgccgatatctgcggcatcaaggacgcttacgcgctggcgggggagaacctgaccgccgcctacgccgacattgtgttcggcacgatctttgacccgtatctcgtggacggcgcgttcgaccccgaggccgtgcgcatcgagaccgagacccaggcccgccgccttgaggccgagttcaactcgaagcgtctctactgcgtgcggcaggcccgccgcaaattctacggcgacacccccgcgggcatcgagctgggcggctaccccggcgagctcgtcaatgtgacgccgcagagcctcaaggccgagtatgaccgcatcctctccaccgcgtacatcgacgtgatggtgcagggcgtcgatgaggcccgcgtggccgatatgctgctgaaaaagctcgacggcatccgccgcgacccgcgcccgtttgccgcgcccgtcgccatgcccgccacgccgctgcgccattttaaagaggagatccccggcctgacccaggccaagctctgtatgctgttcaccacgggcgaagccaaccccaacccgccaagtgtcagcatcctgcgcgtcgccatgagcgtgctgggcggctctgccaccagccgtttgttccgcaacgtgcgcgagaagcagtccctttgctactactgcggttctgccgcccagcgcgccaccggcgtcatgatgatcgactccggcgtcgagccgggcaaggagcagcaggccgaggccgccatcattgccgagctggagggcctgaaaaacggccccatcacccaggaagaagtggacgactgccgccgcggtcttttgtccagcatggacgcactcggcgacagcctggccgcgctggaaaactggtactacggccagatcacacgcggcgagccgctctacccgccggagtacggcaaggtgctgaccagcgccgtcagtttggacgaggtgcgccagacgctgcagagctacagctattcggtctgctacgccgtgaccgccgagccgggcacgcaggggaagggaggcagcgaggatgttgaataacgatcacgagagcttcgccgctgcccaggcgcgcgccgctgccgccgtcagctgtgaaagcgtcgtgctgcccagcggcctgaccgtgctctgccgcacgatgccgggctacagcagcgtccacgcgatttacgccacgggcttcggctccgtccaccgcgcgttcaggctggacggcaaacaggtcacgctgcccgccggtacggcgcatttcctggagcacaaaatgtgcgagacgcccaagggcgactccttcaccttctacgccaagaccggcgcgtcggccaacgcctttaccagctatgaccgcacctgctacctgttctcggcgacccagaaaattgacgagaaccttgacattctgctgggcatggtcggcaagccgtggttcaccaaggccacgattgccaaggagcagggcatcatcgggcaggagatcaaaatgtacgacgacagccccgactggcggctgctgaacgcgctgttccgctgcctctacgccgaccacccgctgcgcgacgacatcgcgggcacggtggagagcattgccgagctgacgccccagatgctctacagctgcaccagggggttctacgcgccgtccaatatggtgctgagcgtcgcgggcaagatcacgctggcgcaggctgtggacgcctgcaagcgcaacggcctgtaccgcgcccgcgccccgcatgaggtcgagtgggacatcccggcgcagaccggcccgctgccccacaaggaagcgttcttcacgatgcctgtcacgaagccctgcttcggcgtggcctaccgcgaggagccgctggccgagggtgacctgaagcgcgagctgctgctggacatgctgggcgatctggtcgtcggcggtctgacgaagctctaccgccgtctgtacgatgaagcgctggtcaaccccgagttctccggtgactttatcgccgtgcgcggcgcctgcaccgtggcctttaccggcgagagcgacaccccgcgccaggtcgtggaccttttacaggaggagatcgagcggatgcgccgcgagggcgttgaccccgaggtctttatgcttgtgaaaaaccagatgtacggcgagctgctgggcgacgtggaggccgtggacgatgccgccgaggaggccgccgcggcctgcctgaagggccgcacgctggcggacgagatcgccgcgctggccgcgctgaccgtggaggacgccaacgccctgctgcagacggccctgcgggaggaaaaccgcgcctacgtgcagatcgacccggcggaaaaataacgaggttaagttgaaaatggtctatcatgtacaatttcccgggttgggcctggatctgacggtcaaccgcgtggcgctggccatcggtgggttcaacatttactggtacggcgtcatcatcgcggcgggcatgctgctggcgatgctctacgccttccgcaatgccgtggactacggcatcgactcggaccgtctggtggacgttgtggccatcggcacggtcatggccatcgtctgtgcccgtatttattacgtagctatggcaccatttgagtatcaaagcctctgggagatgatcgacatccgcaagggcggcatcgccatctatggcgcggtcatcggcgcgtttgtgttcggcgccctggccgccaaatggcgcaaggtgccgctgctgccgttgtttgatctggtgtcgctgggctttctgatcgggcagggcattggccgctggggcaacttcgtcaatcaggaggccttcggtacgaacacgacgctgccctggggcatgtacagcgagggcacggaggcgtatctcaaatccgtgcaggtcacgctgcccgcgggcgtgaccgtggaccccgccgcgccggtgcacccgacgtttttgtatgagagcatctggtgtctggttggcttcgccgtgctggcttcgttttacaaaaaacggcggttcaacggacaaatcttcctgggctatatcatctggtacggcctgggccgcgcctggatcgaggggctgcgcaccgactcgctgctgatcggcaataccggtctgcgcgccagccagctggtggcgattgggtcggttattgtggccgccgcgcttatggtcatcggtctgcgcaatgccaagggtaagccgctcatggtgccgctggctgtgaaggacctgaaaaagcaggccgaggcaggggaccgcttcacgccggacaccctgcccgccggcgcaccccacgccgagtttgtcaaggccaccgatgccatgaatgcgcgtctggatgcgctggatttgagtgaggtcgagatcgaggagattgaggatccgaaggagtaaaaaaggaaccgtttcggataatggcaaggctctctccttccgccgcagcggatgggggagagaacctcaccaaaacccgaaatctgccctaacatagagaggagaacctatatgccagcaactgtcattgacggcaaggcattggccgcagccacgaaggccgaggccgcagaaaaggtcaaagcgctgaaagcgcagggcatcaacccctgcctggcggtcattctggtgggcgagaaccccgccagccaggtctacgtccgcggtaagatcaacgactgtgcgcagtgcggcatcgagagccgcagcatcaacctgcccgccgacaccacgcaggacgccctgctggccgaggtgaagaagctggcggatgactccgctgtgcacggcattctggtgcagctgccgctgcccgcccagatcgacgagaaggctgtcatcgacgccatcccgcccgagaaggacgtggacggcttctcgcccgtcaacgtgggccgtatgcagatcggcgagccgtgctacctgccctgcaccccggcgggctgcatccgcatgatcgagtccacgggcaccgacattgcgggcaagaacgccgtcgtcattggccgatcgaacatcgtgggcaagcccgcggcgctgctgctgctggcgaagaatgccacggtcacgatctgccattccaggacgaagaacctgaaagaagtctgcgccgccgcggatattctcgtggccgccgtgggccgcgagggctttgtgaccggcgacatggtcaagcccggtgccgtcgtcattgatgtgggcattaaccgcggtgcggacggcaagctgcacggcgacgtgaactttgccgaggccgccgaaaaggccgcctacatcacccccgtccccggcggcgtcggcctcatgacccgcgccatgctcatgctgaacacggtggaggcggcagagcggcagggccgctaataaaggcttcccccttgggggaagctgtccgcgaagcggactgatgaggggcaaccttgccattgcagcccacagatgggatacaaccgcagacttgcccctcatccggccctgcggggccaccttcagtctacgcgctaagagccgcctacggcggttgcgctccgacacgcgcctgcgggcgcagccccttggggggaaggcaaaagaaattctaaaattttaaccttcccacgcccgaaaaccccttgacaagccctgctcctatatggtatgatactagagccgcatggtatgggctctataagtgtgcgcttttatcggtgcaacgccctacagaccagcgagacttattgaaagaggttatccactatgtacgcagttatcaaaaccggtggcaagcagtacagcgttaaggtcggcgacgtcgtctacgtcgagaagctgaacgctgaggacaacagcgaagtcaccttcgatcaggttctcgccgttggcgaggagggctctgtcaaggtcggcgctcccgttgttgagggcgcttccgttgttgccaaggtcgtcaagaccggcaagggcaagaagctcaacatcctgacctatcgtcccaagaagggcagcatggtccgcaagggtcatcgtcagccctacaccaaggtggaaatcaccgcgatcaacggctaaggaggtaaatcacaatggcacataaaaaaggcgtaggttctaccaagaacggtcgtgattccgagtccaagcgcctcggcgtcaagcgcggcgacggtcagtttgttctggccggcaacatcctggtccgtcagcgcggcacccacatccatgcgggtgagggcgtcggcatcggcagcgatgacaccctgttcgctctggtcgatggccgcgttcacttcgagcgcatgggccgtgaccgcaagcgctgcacggtcaagcagtaaaaaaaccggtacgggcgggcctttgcggctcgctcgttttttgtgattttttgtaaatgaggtaccacatggcaaccagtaattttattgataccgccacgatctggctgcacgccggcaagggcggcgacggtgcggtgacgttccaccgcgaaaaattcgtggcggcgggcggccccgacggcggtgacggcgggcgcggcggcgacatcatctttgtggccgacgacaacctgtccaccctgatggacttccgctacaagcgcaagtacaccgcgcccgacggcgagaatggccgcgccaagcggatgagcggcgcagacggtgacgacctggtcatccgcgtgccccgcggcactgtgctgaaggaggctgagaccgacctcgtcgtggccgatctgacgggcagtgagcctgttgtcgtggccaagggcggacgcggcggctggggcaacagccattttgcgaccccgacccgccagatccccaagtttgccaagcccggtctgcccggcgaggatatgcacctcaagctcgagctgaaggtcattgcggacgtgggcctgatcggcttcccgaacgtcggcaaatcgacgctcatcagcattatttctgccgcgcgtcccaagatcgccaactaccacttcacgacgctgacccccgtgctgggcgtcgtccgcgtcggcccggagcagagctttgtctgcgccgacatccccggtctgatcgagggtgctgcggagggcgtcggcctcggccacgacttcctgcgccatgttgagcgctgccgcctgctgctgcacgtcgttgacgtctccggctgcgagggccgcgaccccaaggcggactttgagcagatcaaccacgagctggccgggttcagtgccgagctggcggaccgtccgcagatcgtgctgggcaacaagtgcgacattgcaagccccgagcaggtcgaggagttcaagcagtacgtcgaggccaagggtctgaccttcctgcccatctccgcggcgacccgtcagggtgtggacaacctgcccgcgctggtctacaaccgcctgaaggatctgcccccggtcaaggtctatgaggccgagtacaagcgccccgacaagaacgcccagccgacccgcccgttcacggtggagcgcaccggcgaccacgagttcaccgtcgatgccccgtggctggagcgtatcctcgccggtacgaacgtcgaggactacgagagcctgcagtatttccagacgcagctgggtgattccggcattctggacgagctggtcgcccagggcgttgaggaagatgacacgatcaagatcggcgagtacgaattcgattatctgtactaagtagtagaaaatatgctgtttacacaaaaatccgaaatcgacattcacgaaatgtcgccgctggcgctggcctttgtgggcgacgctgtgctggagctgctcgtccgcgcccgcctggtgggcacgacgcgcttgcagcctaatcgtctgcataccgtggcgacgcattacgtcagcgcccacgcgcagaacctggagctggacatcatcgagccgatgctgaccgacgccgaggccgccgtgctgcgccgcggcaaaaacgccagcaaggccactgtagccaagcacgccaccgtgcaggagtaccgcgcttccaccggctttgagtgcctgctgggctggctgtacctgcaaggcaggaacgaccgcattgaggaattgttcaacgcgatgtgggacgggtataagccggagtaataagtaaaaagccttcccccgagggggaaggtggccgaggccccgcccgagggcggatgagggaaaagcctccgcaatttgcccggtaacgggttgtagtggcaaggccgcccctcatcagccgcctgcgggcggcagcttccccccaaggagggaagccttaggaaacccgcctcacttgtagttcttgctgtcggtggtgttggtggtgcggttggtggttttctgctgggtacggttcgtggttttctgggtcgtgtccgtcgtgcgattggtcgtgcggttcgtcgaattgttagtctggttcttagccataggtggtaagctcctttcgcaagtaaaaacgatctacagtcgttttcggactgcaaaggtagtttgcccgcccatggcttttttatgcagagggggctgctatggaatttccacaggattttaccgcgcgggagcgggcactgctgggggcgcgctttgacgagctgtacgcctacgccacgccgcagcctgcccgcggcgtaacggtcaacgcgctgcgctgcacgccggaatggttcgcgcagcatgcggattttgacgcaaagccgtccccattctgccccacggcctttacgacggcggcggacttccgcccggggcggcacgcctggcaccacgcgggcgtgctctatgcacaggagccgagtgcctcggcccccgctgcgctgctggacgtgcagcccggtatgcgggtggccgacctctgcgccgcgccgggaggtaagaccagccagctggcggcggctctgcaggggcagggcctgctgctggccaatgaattcgtcgccgctcgcgctgacattctgcgccagaatctcgagcgaatgggcgtgacgaacgccgtcatcacgaacgaggacaccgcccgcctggccgcggcgatgcccgggcagtttgaccgggtgctcgtcgacgcgccctgctcgggcgagggtatgttccgcaaggaggccgtcgccgccgcccagcacaataacgccttagtggcgcactgtgcggagctgggggccgaaattctcgaaaacgcggcggcgctgctggctccgggcggcgtgctcgtctactcgacctgcacatttgccccggcagaggacgaggaacagatcgcggccttcctcgcaaagcaccccgcgttcacgctctgcgacctgtccgactgcggctttggccgcccgggcgaggccaaccgcgcccctgactacccggatttccgcgccggatacacccgccgcatctggcccgccgacggcggcgagggccactttatggcgaagctgcaaaaggcagccgacgccgacgcgcccaccccgccgaagggcaagccgcccaaggtgccgaaagctccggcggagtggctcgattttgccaaaacctatttcccggcgctggcttcccgcccgctggccggggcgggggagtggctgctgctgcccgcgccgggcagcgagacgctgaacaccgcgaagctgcgcgtcgtgcgcggcggcgttctggcgggcagcgtgctgaaaaagcggttccagcccgcccatgcgcttttcatggcctacggcgcacagtgcacgaaccgcgaggagctgacgctgaccgacccgcgcaccgccgcctggctgcggggcgaggagatcgacgccgccaccgcgcaaaacggctggtgcgccgtgctcgtagacgggttcccgctcggcggcggcaaggtcagcggcggacgcatcaaaaaccattacccgaagggcctgcgcaatctgcaataaagcgggcggcccctcttgaaaagaacgatttattgtgctataatagtttactggtaattatcggctgcaatgccgctgcctgtgtgaatacaaattagggggatttttccatgtccggacatagcaaatggaataacatcaagcgtaaaaaggaaaagaccgacggcgcccgcgccaaggttttcactaagatcggccgcgagatcgccgtggccgttaaggagggcggcggcaatcccgcttccaactccaagctggcggctctgattgccaaggccaaggccaacagcgtgcccaacgataacatccagcgcattatcaagcgcgccgagggcggcgacaagaccgagtatgaggcaatcacctatgagggttacggccccggcggcatcgccgtcatggtcgagaccctgaccgacaaccgcaaccgcaccgcggccaatatgcgccattactttgacaagttcggcggcaacctgggccagatgggctgcgtcggcttcatgttcacccagaagggcgtcatcgtcgtcgatctcgaggacaaggatcccgatgagctgatgatggatgcgctggacgccggtgccgatgacttcgatgcaggcgaggacgccgccgaggtcaccaccagccccgagaacttcaccgccgtctgcgaagcgctggaaaagaagggctacaagttcatctccgccgacgtggcgcaggtgccttccaccaccaccgcgctgaccgaccccgatcagctcgtccagatgggcaagctgctggacgccttggacgacgatgatgatgtccagaacgcctggcacaccctcgagaacgaggaagacctggatcgctaaaccacaagaatgccaaaagagagtgaagggcgacttttgctctctttttttgtacggcagaacggtaggggccgggcatgcccggcccgcagcgtagaaatgacccgagattttcgggctgccgcaaagttcagggccggacatgtccggcccctacaagcatgtttttaattgaaaaggagcgttactatgccaaaactcctttgcccgcactgcctgcagccgctggatggcgggtaccgcggcgagtgcccccactgcgggcgttcgctggaaaaccgcaaccccgagggcgcgctgcctctgggcacccagctgggcggcaggtacacggtgggcacttatttgagcgccgacggtgacggtcttgcctaccgcggcgtgctgaacgacgaaaagaaattcgtcctcatcaaggaatatttcccggtcacactctgcaatggccgcagcgccgacggtgcgctgatgcccaaggaggagaaggaggtcctgttcaagacgagccggatggacttcaaggacctgtacgatgacctgaaaaacctgaccccggccaccggcctgtccacgattctggacgttatggaggaaaacaacacggtctacgccgtggaggagagcgagaagggcatgaccctgtcgcattacctgcacctgcgcagccgcacgctgacccccgccgaggcccgcacactgctgcagcccatcatggagggcgtggccctgctgcacaagtcggggctgatccaccgcggcatctgcccggacaacatcgtgctgcccatcgacggcacggcccgcctgaccggttacggcacgctggcgctgcgcaccggcggcagcgagctgaagagccagctctacccgggctacgccgcgccggagcagtactctgccgccgagttcagcgggcgctacaccgatgtttacgcgctggccgcggtctgctacaggatggtcacagggcagacgcccgtcgccgcgccccagcgcaaagtacgggacagcctcgagtcggcgcacagcctcgaggcgggtgtgcctacatggttctcgcaggtgctggcctgcgcgctgcggctggaccctgccaagcggatgcagaccgtgcccgagctgatgagtgccctgaccgacccgaatgtcgcaaacgcgatgtttgagaagggcgacaaccagatcagcacccgcaagatcatggccgtgtcgctcgtcgtcatctttgtgctggtcgtgctgctgctctggagcctgataggcggcagcaaggctgacagcaccccggtctcaacgccgcagccgacagcagccggcacggcgggggagaccaccgccgagaccgtgccgaacctggtcggcctgcgctacactactgacatcaagggcaacagcgcctacgacgactaccgcatcgtgatggtggagcaaagctccgacaccgtggcgcagggcgtggtcatcagccaggatccgccggcgggcagtgagaagctgatggacgaccaaatcatccagatcacggtcagcagcggcccgagccttgtggagatgccggatatcatcggttttacccaggccaatgccagcaaaaagctggacgcgctgggcatccagtacaagatggtcatggtggataacgacggtacgatggccgcgggctgtgtggcgagcactgactacaaggccggaacgaagataaacaccgagaatgtgactgtcatcgtcagcatcgccggggagcgggatgacacgctggtggcgcagacggggaatgcgggggagagtacacccgaaccgaccccgcagccggaagagtgagtgatagcggcaggtgggaaaagcccctccggtcatcgcttcgctcgaccacctccccactgcgtgaggaggctttttgaggcggccaaaggccgccgccagaaaggctccccgccatgcggggagctggccgagcctgcgaggcctgaggggctcttcccgtttgcggtgtaagaaacaaaaaagagcagtctcttgcgagactgctctttttcagtgcatttcaggcaatgctgacgcggcgagattagtcgctgacgtagggcatcagagccatgtagcgggcacgcttgatggcaaccgtcagctcacgctgatgaaaagcgcaggtaccggtaacacggcggggaatgatcttggcgcgctcgctcacgtacttgcgcaggcggggcagatccttgtaatcgatgtgctcgacgcggtcaacgcagaaggagcaaaccttcttgcggccacgatgcatcggacgagaagaacgatccatagccattgtggaaacctccttgttagaatgatactttcgattttagaacggcaggtcgccctcatcctcgatcagtgcaaagtcgtcattgctgccggcagaatagctcggcgcaggagcggcctgtgcggcgggacggggagcgggggctgccgtgggtgcgccgtaaccggcatcacccatcggtgcggcgtttgcggatttgggagcggcaaagttgacgttgttggccacgatctcaatcgcggtgcggttgttgccgttcttgtcctgatagctgcggctctgcagacggccgtcaatggcgatcagagaacccttctggaaatacttgcagacaaactctgccgtgcggtcccaggcgacaacatccagccagtcagcctgactctggccgttggcgtcacggcgtccgcgatcacaagcgatgcggaacgacgcaacgttcttgcccgtcgtagtctggcgcagctgcgggtccgcggcaaggcggcccatgattgcaacaacattcagcattggtttactccttactcctcaacagcaagagtcatgctgcgaagaacgccctcggtgatcttgaaaacgcggtccagctcagccgggaaatcgggctcgctggtgaagctgatcaccgtgtacacaccctcggtctcatcgttgatggggtaagcaagacgcttcttgccccaatcatcaacagaatcgatcgtaccattcgctgcgatcaggttcttgaacttgttgatcagagcgttggaagcctcttcgtcgaggttcgcggtggtaaccatcatggtttcgtacttagccatattctgtgcacctccttttggacattaggccttctcttttaacggaaaagacaaggataaccgtgtgatttcacacagcatctaattataacaagtaaatccgcgtttgtcaacgcaaaatttgccctgcacagcacaaaattgcggattttttaaaaaaacctggacgttccgtaaaagtgtcctattgctttttctgcccgctttgctataatgggcttaataatgtacaagtcttgcttgcatagccggacgcggcgctagtaggggcgagcattgctcgcccgctgcccgcttgccatgcaggaaacgatgggggaacgcagggcagcgataaggctgcgcgggcgaccaatggtcgcccctacatgtgttcccgctttgaaaaagagaaatggagcgttcgtatgagaatcgtggtcgtcggcctcggcaaggttggccgtgccctgaccgcccagcttacggcggaaaataacgacattgtcgtcatcgaccaaaaccctgacctgatcgaggacattgtcaatatttatgacgtgcgcggtctggccggcaacggcggctgctatgacgtgcagaaggaggcgtttgaggacggcgcagacctgctgatcgccacaacgtccagtgatgagagcaacatcctggcctgcctcgtcgccaaaaagctgggcacgcagcacacgattgcgcgtatccgcaacccggagtatgagaagcagctgcgctttatgcgcgatgaccttggtctgtcgatgttcgtcaacccggaaaaagccacggcgcgcgagatcgcccgcgtgctgcgtttcccgtctgccatcaagcgtgagcagttctgccgccagcggtttgagctgatcgagtaccgcctggccgacgacaacccgctggtgggcttgcagctgtcggatttgtaccgcaacatccgggtcaaaattctgatctgcgctgtcgcccgcggcagcgagacgatcatccccacgggtatgtttacgctgcgggccggggacaagatctacctgacggcctcggcccgggatttggaatccttcttccgcaagctgaacctgttcaaggccaaggccagcaacgtcatgatcgtcggtgcaagccggatgacctactatctggtcaaggagctgcaggacatccagaagcgggtgaccgtcatcgacagcgatgcggcccgctgccaggagatgagcgagaagttccccggcgtgctggtcatccacggcgacggtgcggatgccgagctgctgagcgaggagcgcatcaccgatatggacgcctttgtggcgctgaccggcctggacgaaacaaacatcattctggcgatgtacgcctcccagataaactcctgcaaggtcgtggccaagatcaaccgcgagtccttcgccgagctggccgctgccaaggggatggtggacagcgtcgtctccacggcgtcggtcacgtcggagtccattgccatgtacgtccgcgccatgcagaacagctttgagtcggagaacatcaagacgctgcaccgtctggtgggcgggcgcgtggaggcgctggaattcaacgttgcgccgggtttgccgttcatcggcgtaccgctgaaggatctgaccctgcgcaaggggctgctggtggcgggcatcgtgcgccgcaatggccagacggtcatcccgtccggcaacgatgccctgcaggagggcgacgatgtcgtcatcgtcaccaccgacacaacgctgcactcgctgcgcgacattgtaaagtgagggcgcggccatgaactataaaatggtagggtttgtgctggggcgcatcttcctgatcgaagcagccctcatgctctttcccatgggctgcgccgccatctacggcgagtggagcgttgtgctttccttcctgtggccgacgctgatcgtgctggcgctgggcctgataaccagcctgcgcaccccccaaaacacgaaaatctacgcccgcgacggcctggccatcgtggcgcttgtctgggtgctgatgtcggttttcggcgcactgccgtttgtcatctccggcgagataccgtcctttgtcgatgccttttttgagacggtctcgggctttacgacgacaggctcgacaattctgaccgacgtcgaggcgctgagccacggcacgctgttctggcgcagcttttcccactggatcggcggcatgggcgtgctggtctttgccatggccgtgctgcccatgaccgatggccgtgccatgcacctgatgcgcgccgaggtccccggcccgacctgcggaaaaatttccagcaagctgagcgacagcgcaaagattctgtacgcgatctacttcgtgatgaccgtcatcgagatgattctgctctgcgcgggcggtatgccgctgtttgacgcgctcattcatgcgttcggcacggcgggcacgggcggcttcagcaacaaggcgctgagcgtcggcgcgtacaacagcccgtattttgagatcgtcatcggcgtgttcatgctgctgttcggcattaactttaacctgtattatttcctgctgctgcgtcatttccgtgaggcgttcgcctccgaggagatgcacgtctacttaggcatcgtcgcgttctcgacgctgacgatcacggcgaacatcgcgagtatgtacgacagtgtcggcacggcgctgcgcacggcgttcttccaggtgtcatccatcgtcacgaccaccggctacgccacggcggacttcaacctctggccgacctactcccgcatcgtgattgtgatcctgacgtttgtgggcgcatgcgcgggctcgacggcgggcggcttgaaagtatcgcgcgtcatcatccttttcaaggcggcacggcaggacctgaacaagatgctgcacagccatgccgtgacgacggtccgctttgagggcaaaccgctggacgaaaagacgctgcgcggtgtgcacaactatttcaacatttatatgctgctgctgacgctgtcggtgctgctgctctcgctggacgggttcgatctggtgacgacgtttacatccgtcgcgacctgcctgaacaacgtcggtcccggccttgagatggtcggcccgatgggcagctttgcggatttctccgctccggccaagctgctgctggcctttgacatgctggcgggccgtctggagctctacccgatgctggccctttttgccccgcgcctgtggcgcaagcgcatcaatgcgatgcatgaggcaagagcgaaataagtacgagagttttatttcttttcttgcaagaaaaggaaccgaaaagaactccaaacaaataaagaaaaatgcgggagactgccggtaaaagggcagtttcccgcgttttgttacttactctacgaatagagaatcgtccccataccgcccaatatgggatgggtctttctcggaataatacaaattgcccagcacttcttccggggcgttgtcggccaggtagcgcgcgtgcagctcggtggcaaaatgggtgccctgcaaaatttgcagtgtgtccgtgtagctggttccgtcgatctcatacttgaccgtgatgaggtagacgtaatcggtgttgctcccattgacagagtaggaggtgtgcgccgtcgctttcatgtcggtaatgcggtaggcgtccggcaaaatcacgctggtgtaggtatgcttgcggtaaatatccatccccagcacaataaggatggaaaacagtatgccgatcccgcagacggccagcgccgccagcagcgccttcttgtcggatttggtaattttcagcttcatgcggcgggcctcccacagtgttttctctattataccatacaccgctgcttatgtctacttgccgccgcgcccgcataccttgtaccagaccaaaacagaggaggggcttgccatgcggcgggatgcagacagagaggaacgaaacgcaagattgctggcgggcgtggtgctggcggctatgttggtgatgctgtccggcatcatccatctgctgtaccaccgggagtacgccgagaccgacacccccaacgactgctttgcggtgtcggcggcgacgggggagacggcgctgcccaaaatcgtctgcctgacctttgacgacggccccagcaaaaacacccggccaattctggaaattctcgataaggagcaggtcccggccaccttctttgtctgcgcgcaggacgccaacgaaaaatatctgccccttgtggcggacatcgcggcggcggggcatcagatcgcgctgcacagcgcgacgcatcaatactccaaaatttatgcgagcacggacgcattctggcaggacatcagaacgctgcgccaggcgttggagccgtatgtggatgtggcggccatcgactggctgcgtttccccggcggcagcacaaacacagtcagccaccgctacggcggaaacggcatcatgaaggccctgaaggcccaggccgaggacaagggctaccactggatcgactggaacgtctgcgccgaggacgccaccgctagccacccggatgccgcgcagattttgcgcaacattcgccgtgatgccgatggtcaggacacctgtgtcgtcctgctgcatgatacaaaagcaacaggtcagaccgtcaaggccctgcccgatatgatcgcctatttccgggagcagggctacaatttttgtacggttgcacagatggatgccttgcaatgtgaaacaaaatagggtataatgtacaagaatcgaaaagcggtgggaggcggaacgatgcgcaaaacggaaagccagaagatagccctctgcggtatgctgggggcgctttcggtggtgcttttgctgctgggcagtgcactgcagatcggcacctatgccgcgccgatgctggcggcgttcctgctcatcccggtgctcgaggaatacggcacgcgctacgcgctgaccctctacgtctgcgtggcaattctggccgtgctctttgtgccggagaccgaactggcgctgttttacgtgctggtcatggggtattaccccgtgctgcgcgtcaagatgaacggcgtaaaaagcacgctcctgcgctgggtgctgaagttcgcggtgttcaacgcgggcacggtgctggtgtatcttttactgtttgcgctgctcgggcctgccgtgctggacgagctgctggccgacggcgtcgggatgctggcagcactgctggccgcgggcaacctgtcgttctggctgtgtgaccgcgcactggcggcactgacgcggtattaccacgtcatactcaagccaaagctgaaaaagaagttttaattcggggaggaaaacaacatgtggtacgatgaggcagtagtttatcagatctacccgctggggctttgcggcgcaccgctgcaaaacgacggtgaccaggcgcaggcgggcgagcaccgcattctgcgggtgctggactgggtggagcacatcaagcgcctgggcgcgacctgcgtgctgttcaacccgctgttcgagagcgacgcccacggctatgacacccgcgactacaataaggtggactgccgcctgggcacaaacgacgacctcaggcaggtctgcgcggcgctgcacgcggcgggcataaaaatcctgtttgacggcgtgttcaaccatgtgggccgtggcttctgggcgttcaaggacgtgcaggagaagcgctgggacagcccgtacaaggactggttccacatcagctttgacggcaacaccaactacaacgacggcttctggtatgaagcgtgggagggctgcaacgagctggtcaagctgaatctgcagaacccggcggtgaaaaattacctgtttgacgttgtgcgcggctgggtgcgggactacgacatcgacggcctgcgtttggatgttgcctactgcctcgaccttggctttttggccgagctgcgcgggctggccgacagcatcaagccggagttcgcactggtgggtgagacgctgcacggagactacaaccgctggatgaacgaccacgcctgccacagcgtaacgaactacgagtgctacaagggcctgtattcgagcttcaacacgggcaacatgcacgagatcagctacagcctgaaccgccagttcggctccgagcagtggtgcctgtacacgggcaagcacctgctgagctttgtagataaccacgatgtaacgcgcattgcgacgattttgacggacaagggctgcctacgccccatctacggtctgctgttcggtatgcccggtgtgccgtcggtctactacggcagtgaatggggcatggagggcgacaagcgcaacggcgacccgacgctgcgcccggcggtggagaagcccgaagaaaacgacctgaccgcttggatcgcggcgctggcccacgcccacacgggcagcaaggcgctgtgccggggcagctaccgcaatgtgctggtccagcctaagcagctgatttttgagcgctatgccgacggtgagcgggtgctggtggccatcaacgcggacggcaatccgtttgacgcccactttgacgcgggctgcggccgcgcggtggacctcatcacaggcgccgaccacgacttcggcggcggcagcacgctggagccgtacagctgccacttctggaaatgtgagcgataatacgatataaaaaggcacctgtccgtgtgggcaggtgcctttttgtgctatgctgtatgttgtaggggggggcggcgtcctcgacgccccgcagggcagtatgcagggcggcctgccctcaggccgccgcagcggggtgagggtgccctgccctacaatgtatgggttaaaggggcagcccctgtaaaccctacggggcggcccatgtatgggttaaggttttaaagtttctttgcctactttcttttcaaagaaagtaggtcacaggttcgtatatcccatcagcttttcatccacgacggcggcggtgtcgcggccctcgcgcagcgcccagacgacaaggctctggccgcggcgcatatcgccgcaggcgaacaccttcgggtcggcagtggcgtacttcacatcggccacggtgccgcgcttcgtgcgctcgacgccgaacgcatcggccacatagggctcgcagcccgtaaagcctgccgcgatcagcacaaggtcgcagtccacggtgaactcctcgccggtgggcaccatctggcggcgtccgtccgcgacctcgcttttcagcttggagatcagcgcgccgcagacctgcccggcctcgttcttgtagaactccttgaccgtcgtctggtagacgcgggggtcaaagccgaatttggcgatggcctcctgctggccgtagtcggttttcagcacgcggggccactcgggccaatcgttgccgggggcgcgggccgcgggcgggcagggcatcatttccagctgcatgacgctctcgcagccctggcggatggccgtgccgacgcagtcgttgccggtgtcgccgccgccgatgaccagcacgcgcttgcccgcggcggaaaccgccttgccgtccgcaaagttggaatccagcagactgcgggtcacgctggtcaggtaatccaccgcaaagaagatgccctgcgcgtcgcggcccggggcctggatgtcgcgggcctgcttcgcgccgcagcacagcaccacggcgtcatagcgggccttcagctcctcggcgctgaccgtattgccgacgtcggcgttaaaaacaaactcaatgccctcgtcctgcaaaattttcacgcggcggtcaatgacccacttttccagcttcatgttggggatgccgtacatcaaaaggccgcccgcgcggtcctcgcgctcatagatggtcacgcgatggccgcgcttgttgagcaggtcggccacggacaggcccgcgggacccgcgccgatgaccgccacggtcttgcccgtgcgggccgggggcggcacggcatgaatggcgccgctctcgtaaccgtattccacgatggcgcgctcgttttccttgaccgtgaccgggccacccgtgacgttgccgcaggtgcaggccgcctcgcacagggcggggcagacccggctcgtgaactccgggtatcggttcgtggcgatcagccggtgcacggccagatcccacttgccctgatagaccaggtcgttccactcggggatcaggttgttcagcgggcagccgctgaacatgccgcccagctgaacgccgctctggcagaaggggacgccgcagtccatgcagcgtgcgccctgggcctgctgctcgtcggtgtgcagcgggacgtgaaactcgttaaaattccggatgcgctcctcgggcggcagctctaaactggtctgccgcgtaatttccataaatcctgtcggtttgcccatggtactctgcctcccttactttgcgcttttcatagcgtagaacgcctcgatctgggcctgctcgctgtcctcgcccttttcctccatctgggcgatcaggcgcagcatcttgtcgtagtcgtggggcaggaccttcttgaacttgggcagatactcgccgaagttgtcaaggatttccttgccgcgcggcgacccggtcagctccacatgctcacggatcaggtctttcaacagcgatacatcgtacttgtgctccacaggctccagactgaccatgtccttgttgacgcgctggtagaagtcccagtcctcgtccagcacgtaggcgatgccgccgctcatgccggctgcaaagttcttgccggtcttgccaagcacgaccaccgtgccgccggtcatgtactcgcagccatggtcgcccacgccctccacaacggcagttgcgccggagttgcgcacgcagaagcgctcaccggccacgccgttgatgaacgctgtgccgcccgtagcaccgtacagtgccacgttgccgatgacgatgttctcgctgcggtcaaaggcggcgtccttcggcgggtagacgatgagcttgccgccggacagacccttgccgatgtagtcattcgcgtcgccgaccagctcgagcgtcaggcccttggggatgaacgcgccgaagctctggccgccgtagccgtggcagacgacatggaacgtgtcgtcgggcagcgtgttgccgaacctggcggtgatctcgctgccaatgatcgtgccgaacgcgcggtccgtgttgccgacgtccagcgtgacggtgctgggcttcggctcggcggagtcgaagctctttttgaacttcttcatcaggatgcgcatatcgggggtcttttccagctggaagttgtaaacatccttcgcgttgaagtgtacgttggagttctcgaccagcgggttctgcaaaagcgcggtcaggtccatctcgccggcgcgggagcctgcgggcgcggccttgaccttgagcaggtcggtgcggcccaccagctcatcgacggtgcgcacgccgagctttgccatgtactcgcgcaggtcctcggccatgaagcgcataaagttcatgatgtactcgggcttgcccttgaaccgcttgcgcagctcggggttctgggtgcagatgcccatggggcaggtgtcaaggttgcagacgcgcatcatgacgcagcccatggccaccagcgggccggtgccgaagccgaattcctcggcacccagcagggcggcaatggcaacgtcgcggccactcatcagcttgctgtccgcctcgatgcggacgcggctgcgcagaccgttcatgatcaggcactggtgtgcctcggcaatgcccagctcccacggcagacctgcgttgtggatggagttgcggggggctgcgcccgtgccgccgtcaaagccggaaatcaggatgacctccgcaccggccttggcaacgcccgcggcaatcgtgccgacaccggcctcgctgacgagcttgacgttgatggctgccttgcggttggagcacttcaaatcgtagatcagctgcgccaggtcctcgatcgagtaaatatcgtggtggggcgggggagagatcaggccgacgccggtggtcgagttgcgggtcttggcgacccacgggtagaccttgccgccgggcagttggccgccctcgccgggcttcgcgccctgtgccatcttgatctgaatctcactggcggagaccagatacttgcttgtcacgccgaagcgggcggatgccacctgcttgatggcggagttgcgctcggtgccgaagcggtcctcggcctcgccgccctcgccggtgttggacttgccgcccagacggttcatggcgatagccatgcactcgtgggcctcctcggacagtgcgccgtagctcatggccgcggtcttgaagcgcttgacgatggagtcaacgctctcgacctcgttgaggggcacgccctgctcgggatagttgaagtccagcaggctgcgcaggtgcatcgcgtcgccgttctcattggcagcggcggcggtgtactgcttgaaggtatcgtaattgccggtccagcaggcctgctgcaaaaggtggatggtctgcgggttgtagaggtgctgctcggcagcggggccgccgcggaatttgtgcgcacccaggctcggcagctcgcggttgatgtccagacccagcgggtcgaatgcttcctgatggcgggcttccagatcattctggatgtcctggatcgtgatgccgcccacgcgggagacggtgttcgtaaagtatttgtcgatgacctctttcgagatgcccagcgcctcaaagatttggctgcccgcgtaggactggatcgtggaaatgcccatcttggacgcgattttgacaatgcccgccagcacggccttgttgtagtcgctgacagcggcgtagtagtccttgtcgagaaggccgtcggaaatcagctcaccgatagtctcctgcgccagatacgggttgatagcagctgcgccgtagcccagcagcgtggcgaagtcgtgtaccaggcgcggctcgccgctttccagaatcagcgccatggcggtgcgcttgcgggtgcggaccagatacttgctgaccgcgcccacagccagcaggctgggaatggcgacgtggtactcgtcaatgtcacggtccgacaaaatcaggatgttcgcgccgtcgcggtaggcgcggtccacatcgacaaacaggcgctcaatggccttttccaggtcggtgttcttgtagtagcagatggacagcgtcacgaccttgaagccgggcacgtccatggccttgatcttgagcagatcggtctcggtcaggatcgggttctcgattttcaggaccttgcagttgtcggcgtcctcctccagaagattgccctgcgcaccgacgtagacggtggtcgaggtgacgatcttctcgcgcagcgcgtcgatgggcgggttcgtgacctgcgcaaacatctgcttgaaatactcgctcagattagggcgggtgtggctcaaaacggccagcggagtatcgttgcccatggccccggcgggctcgccgccgttcttggccatcggcagaatgatcgtggagacgtcctcataccggtagccgaacgccttctgcagctggacaagctgatccttcgtgtagctgggcaccttcttgttgggcaccttcaggctggacagcgggacgaggttgcggtccagccactcgccgtagggctggcggctggcgtagtcggccttcagcttttcgtcgtcgaccagctcgcccctgacggtgtcgaccagcagcatcttgccggggcgcagacggtccttgcgcacgacctcgtcagcgggaatgtcgagcacgccgacctcgctggaaaggatcaggcggccatccttcgtgatgtagtagcggctcgggcgcagaccgttgcggtccagcactgcgcccatcacgtcgccgtcgctgaacaggatgctggcggggccgtcccacggctccagcatcgtggcatagtactggtagaagtcgcgcttcttcgggtccatcgacttgttgttgtcccacggctcggggatcgtgaccatgacggccagcggcagatccatgccgttcatgaccatgaattccagcgtgttatccagctgggcagagtcggagccgccctggttgacgatgggcaggaccttcgtcatatcgtcctttaaatacttggaaccgatggtttcctcgcgggcaagcatcgtgtccacgttgccgcggatcgtgttgatctcgccgttgtgcaggatgaagcggttggggtgggcgcggttccagctgggcgcggtgttcgtcgagaagcggctgtgcaccatgccgatggcggattcatagtcggcgtcctgcagatcgggatagaacaggcgcagctccttgacgaggaacatacctttatagacaatggtgcggctggacaggctgcaaacgtaggtgtcggggctggactgctcaaacacgcggcgcgccacatagaggcggcggtcaaaggcaatgccggcctcgacgcgctgcggcttgcccacaaagccctgccagatgctgggcatgcaggcaatggccttgtggccgagcacctcggggcaggtgggaacctcgcgccagcctaagaagggcagaccctcctttttgcagacgatctcaaacagcttcttggcctggttgcgcttgagctcatcctgcgggaaaaagaacatgccaatgccatattcccgctccgcgcccagggtcagcccttgctcggcagcggccttctggaagaatttgtcgctgatctgcgtcagaatgccgacgccgtcgccggtcttgccctcggcgtccttgcccgcgcggtgctccagatgctccacgatctgcagcgcgtcgtcaatggttttgtggctcttgcgccccttgatgtccaccacagcgccgatgccgcagttgtcatgctcaaaccgggggctgtacagcccggcgggggtcttgcgctcggtaaagttttccatacctcgtttgctcctttcccaatcccgttaaaccgcgcagcgtcgcacatttgccgcgcgggcgagataaacaaaaaagacgctcccaacagggcacacaggccccttgtgggaacgtctttgttcttgtctgcatcataccatagatgccgccgctttacaatcctgaagcagaagattttacggaaattaagcgaaaaacgtttagaaatttggtttagcaagcgtaaacttaataaaattaagcgacgtggactttctgccgctttgtaggggcggcatatatgccgcccgcggcctaacggcatctctcttttccggtttgcattgtagggaggggccttgacccctccgcggcggcctgtgggcaggccgccctacaatccccggaaaggtgccgccatgcggggcgtcggggacgccgccccctacaaggtgcgccgcgctgtaggggccgggcatgcccggcccgcggcctcccggaaccgcccgtttacggttgacccgcaggggagggattcatccctcccgcgccgtgtgccgctgccgcccaaacaaaaaccgcgcaaggcttttcgccctgcgcggtaaaaaacgttacgccgttttctcgccgttctgctttttcagctcgaccagaatctcggccagcagctcctcctgcgtgggggcggcgggggcagcaggctcctccgcggcgggctcctcgtgcttgcccatctccatcagcttgttcatggctttgacgatgcagaacagcacgaacgccatgatcaggaagttgatgacggcggtgatgaacgcgccgtacttaaagaccagcttgccgtcgccaaagacatcccacatcatggcgtcaaagttgaccttgcccagaatacccaaaatcgggctgatgaggttgtctgtcagggaggtgaccagcgtggagaacgcaccgccgatgataacaccgatggccatgtccatcatgttgcccttcaaggcgaaagctttgaattcctcaaagaactttttcataagtaacctcctcaaaacttaaaatgtcgatgcagcgttttactttttcagcagctttgccacggtctgggccgcattgtcaagatagtcgcccgcgaacatttcgatcatgcccgcatcggcctccttggccagctcggggtcgatgggcatcttcgccagcaccggcagcttgtatttgtcggcgatctcgtccacatggctgtcgccaaagacgttgatgtgcttgccgcagtcggggcagacggcgtagctcatgttctcgaccaggccgaggatgggcacatgcatcatctgggccatctggacggccttgccgacgatcatgccgaccagctcctgcgggctggacacgatgacgatgccgtccaccggcagcgtctggaacacggtcagcggcacgtcgccggtgcccgggggcatgtcaacgaacaggaaatcaacgtcccacacgacctcctgccagaactgcttgaccgcgcccgcaatgacggggccgcgccagacaacgggggcctcggggtcgtcgagcagcaggttgatgctcatgatttccacgccggtacggctggaaaccgggttgatgctctcgccgtcaccggtggccgggcccttcacgccgaacaggcgggggatggacgggccggtgatgtcggcgtccagcacgccggccttaaagccaaggcggcgcatcgagacagccagcatggcgctggtcatgcttttgccgacgccgcccttgccggaaacgacgccgatgactttttggatacggcttcttgcgtgcggcggctcatgctgcggcgcgcggtgatcgcagttggacttgcagctgctgcaatcatgggtacatgtttcgctcatttgtaaatgctcctttaaaaatgctcttgtaacagtgtaccaaaattcgcgcagctttgcaagatgctgcgcagcgaaaaggcttcccccagagggggaagctgtccgcgaagcggactgatgaggggcagactttccgtgattgcccggtaacgagtggccgcgataacgtcgcccctcatctggcctgcggccaccttcccccggagggggaaggcttcacgcgctggtatacccgccgcgccttccgcatacccatcagcaggggaagggggcggcgtatgagcaaacgcagaacgtacctacacaatgcggcgctgctcaccgggtcggggctggtgctgcgggcgctgggcatgggcttccgggtcgtgctggcggcgtatctgggcagcgagggcatgggtctttaccagctgattctggcgctgtacatggtgtttgtctcgttcgccacggcgggcgtcaatgtggcgtcggcgcggctggcggcgcagagcctggcccgcggcagcggcatggccgagaccctgcgcgggctgtgcatcacggcgctgggcttcggcacggcggccatgctgacccaaagcgtattggccgggccgtgcgcgcggtatctgctgcacgacgtccgggccgagaccgcgctgctgattttggcccccagtctgccgtttatggccgtgtcgggcgcggtgcgggggtgctttttggccgcgcggcgggtgcagccgaacatcacggcgcagctcatcgaacagctggtgcggatggccgtcgccgcggcgggtctgcgggcgctggcgcagtggggcgcgggctacggctgcgccgccgtgctgctgggcaacacggtcagcgagagcgtctcctgcggcattatgctggcttttgccgcacgcacgccggaatttgcaccccggcccggcgcgccgctgcacccctacacccgcaaggagctgtacgacatcctgtggcccgtcgagggcagccgtctgctggccagcgccctgcaggcggcggaaagcagcctgatcccctacacgctggcgatttacacgggcagccgcgccgaggccgtggcccagtacggcagcttaaagggtatggcgctcccgctgctgtttttcccgttttcggtgctgggggcgctgtccggcctgctgatgcccgagatcacccgcgcccacacaaagggcgacaccgccgccatgcgccgcctgatttttacgatgctgcgcatgaccggcgcgttctcgctggcggcgggggccgggtttgtgctgctcggcgcgccgctggccgggttcatctaccgggatgccaaggttgggcggtatgtgcagcttttgggcttcgtcgcgccgttcatgtatctggagagtatggtggacggcgtgttaaagggtctgggggagcagcttgcaacattccgatattcgctgtttgactcggtgttccgcattgcggcgatttggcttgtcgtgccgcagtacggcatgatggggttcctgggggtcatggccgtgtcgaatctgatgacctgcgggctgaatatgaggaggatgatgaaacaaataaaaaagccttccccctagggggaaggtggccgaggccccgtccgaggtcggatgagggggaggcttgcgggggtatcccgtgaacgggaaggtacggcagactctcccctcatcagtccgcttcgcggacagcttctcccccaggggagaagcttttggcgcgggttacagcgtttccccgctcaccagtccgttccacagccggtaatatacgccctgcttcgccagcagctcgtcgtggctgccctcctcctcgatgccgtcgcggcccagcaccagaatgcggtccgcatttttgatcgtcgtcaggcggtgggcaatcgtcagggtcgtgcggccctttgccagcttgtcaaggctctggcctaccaaaatctcgctctcgttgtccagggcacttgtggcctcgtccagcagcaggatgcgcgggttcttcaaaaagacgcgggcaatcgccaaacgttgcttctgcccgccggacagcttgacgccgcgctcaccgacgtaggtgtcgtagccgtccttcaaagcgcggacaaaggcatcggctccggccaggcgggcagcctcctcaatttcggcgcgggtcgcgccggggcggccataggcgatgttctccgccaccgtgccgctgaacaggtaaacgtcctgctgcacgacgccgatggccccgcgcaggctgtgcagcgtcacgccgcgcacgtcctggccgtcaatcaggatcttgccgcccgtcacatcatagaaacgggggatcaggctgcacagcgtcgtcttgccgccgccggaaggcccgatgagcgcgacattctcgcccgggcggatatgcagatcaacgtggcgcaggaccttgttgtggtcgtcggggtactcaaagctgacgtcgtcaaagtcgatgccgccgtccctcacgaccagcggcttcgcgtcgggggcatcggcgatggtgacgggcgtatccatgatctcggcaaagcgctcgatgccggtcatgccgcgctggaactgctcggcaaattcgacgatacggcgaatggtcgcgatcagcgtcgagacatacagtacatacgcgacaaggtcgcccgcgctgatggtcccgtacacaagggacaatccgcccgccagaatgacaacaaagtacatcagaccgtcaaaaaggcgcgtggacgtgttgaacgccgccatggcgtggtagcttaaggtcttgatctgttcaaaatcccggttgccctgcgcgaacttctcgcgctccatgtcctcggcggcaaacgccttgacgacgcgctgccccagcagactgtcctcgatcgtggcgttcagctcaccgatctgaaagcgctgctggcggaaccgctcccgcagcttgcggttgagcttgaccgagactacgcccatcagcggcacgcaggcaaagacgacgagcgtcagcggcacgctggcttggcagagaataacaaacgatgctgcgatctttattcctgcaatgaagaactcctccgggcagtggtgggcaaactcggtcacatcgaacaggtcgttggtgatgcggcccatgatctggccgaccttcgtgttgttgtagtaggtgtggtcgagccgcagcaggtggtcaaaggcgtcgcggcgcatgtcggtctcgatgtgtacgcccatgatgtgcccgatgccggacataaagtagcttgccgcgccgtcgatgatgcgcagcacaaagtagagcgcagccagccgcagcacggtgtccacggtcagcgcggcggcggagacggtgttcgtcagtgtgcgcatgatggagggcagggcgatgtcgcagagcgtcgtcagcgcggcgcagaacaaatcaaaggccagtacgccgcggtacttggccatatacggcaaaaaacggcgaatcagggtgctgtttttggggcgcgggttggtggcagcttcggacatgggaacctctttcgttttgatgatttttgcatgggaaatatcgcggtaggggccgggcatgcccggcccgcagccttacggaaaacgcctgcctgcgggcgcatatagaatgcgcccctacgttgaaatcgacattccccgtaggggcggattctatatccgcccgcagcaggtgtggcttattcggtaatttccgggtcgccggtcggctccgcggcgggggccggctcctccggcacagtgggctcgggtgcaggctccggctccgggtcgggcgccggcagggccgggagggtctcggtcttcgtctgaccgcagaccgagcaggtgtaaacgttgctgccgtccgcgccgacctgtgggtcggtgtggccggtcagctgccagctgtggctgccggtggcgggggatggttcggtcatctgctcaccgcagctgcactggtaggtctttacgccgtccgcggcgcaggtcgcggtatcgctgacgagctggaaattgtggacgtgctgctcgggcgtggctgtcggtgtcggcaccggcgagggcgacggcgtcggggtcgcctgcacggcctcggtgcgggtctcgccgcagccctcacggcggcaggcaaaggtgatgacgccgttgctgacgacaccgccatcccagtcgtggccgagtgcgggcagctccttctcgatgacttcgccgcagatcgtgcacttgtacttggccgagccgttgttggtgcaggtcgggttcacccgcgtatcctcgatctccgcatagttgtgctcatgggcgtcagccttgaaattggccgtcagcacgacgccgcccgcatcggcgttctggggcatcgtgaagctgatcgtcgcgctgctgtagctgccgccggagctggccgtccagcccgcaaagacaaagccctcgtcaggcactgcagtcacagctgccgccgtgccgccctttttgacgagctggctcgttgtgccggacagcttgccgccgtttgcagcaacaaattccagcgggaccttcgcgccgcgcacggcgatgggatccttgttgataaggttcgcgggcacgccgtccggtgtcgggatcgtgcccagcggctgcgggcggcggtcctcggcggcataagcatgggtgcgcacgtaggtaaaatacgcggtaacggcctctttcgagaggtgcacgccgtcggacagcgtgtagtcctttttggcccagcctgtggcatcgtcgcgcaggacctcggcgctgttcaaaaacttaaagccgttttcctcgcacatctgcacaagcgcggcgttgtaggcatcgacctgggtcatcgtcaggttcgtgttctcgcgctgccggtccagcgggggaatggcgctgacgatgatgtcacagtagggccacgcggtctggatggcctgcaacccttgcagataggtctttatgtagttcgtcgcgtccgtcgacgagccggacaggttgttggtgccgtagcagatgatgatgcgcttgggcttgagcatggccacggcgtccggtacggtgtacatcgcggatgagcccttgaacttttcgcatttcagggaggtgatcgaccccacgcccatgctgacaacaccgatgttgttgttcaggcttgtgaatgccgtgccggtctcgttggcgtacagcaggtagcgtgctgtgtttgaatcaccgatgaaaagcgtctcatcaacatagctgcggcctgcgtcggcggtctcgggcaggatggtgccgacctcggcacagacaggctctgccgatgtggcaggcgtggccgcgggcgccgctgtggcggcggcttcggcagtctcggaagtggcggacggtgtggcgtccgtctgggcatggctgcacccggtcaggcagatagtcagcgccgcggcggccagcaggacaggtaatttcatgcggtacacctcttaaacttgatgctatacactgctatgatacaccattttgcggcgcggtgcaaatgtttccgtcagactctacaaaattatcgaaaaacgataaaaaatacttgcaaaacgatatgcggtgtggtatactgcaagcgtcacgaaccatgggggagagccttgcggcgatccgaaaccgttcgggcacgcaatcaggaggtatacaaatgaaatttacctggagcgaccagaaaagcatcattctgactcgcgtcgttgtggcggggacaatagcgggctgcggcatcatgacggtaagcggcccgtggctgacccgttggatggtatccgcccacgccctgccgcctgccagcggcccggtgctgctgggcatggggtacgtctgcgcggtgctggcgttcgtcatgctggtcagtctgtacaaattcctgcgccgcatcgaggcgggcgcggtctttgtgcccgccaacgtgacggccctgcggcgcatcagctggtgctgtgcgggggcggcggtggtctgcctggccgcggcgtacatctatctgccgtttgcgtttctgggcgtggccgcggcgttcatggcgctcattgtccgggtgctgaaaaacgcctttgcccaggccgtccacatgaaggacgagcttgactacacgatttaaggaggcggcacgatgcccattatggtcaatctggatgtgatgatggcgcgccgccacaaaggcgcgggcgagttggccgaggagatcggcatcacgccggcaaatctatccatcctgaaaaataacaaggccaaggctgtgcggttttcgacgctggaggctctctgccgggcgctggactgccagccgggggatattctggagtgtgtgccggacgagaatcggtaggggccgggcatgcccggcccgcggccttcccgcaggcaaacgtttattttacactgccgggccggacttgtccggcccctacgttgaggtgatggtatgctgtatgctgttttaatgtacccgctggcgtatttttatctgcgcggagtgatgtttccgcagtcatatccggattgggggatgccggtttttgcggcgctgttcattgtgtatgtggactgtgccgcccgcgccgcgcaccgcaccgccgctaaggaaacgccgctctgggccgtatgctggatggcgctggccgcggcgtatccgctgtacggctaccagccggggccgctgggggactggcagtggccggcatggcatctgttcgccgtctggtatgtgctggcacggtgcggaatgctggcgcaggggcagagcggcagcctggccccgctggacgcgctggccggattcgtcctcctgccgttcgggaatttcttcctgcgggcgcgcacggtctttgctgcgctgcacacccatctgcaggaccgcacgcggacacgaaaagttctgcacctcatcgttaccgcagcggtgacgctggcgctgtgcggtgtggcatgggggctgctggcagcagccgatgcgaactttgccgcgctggggcagcaggtgtccgactggtggagcaggctgctgaacaatgtgagattcattgaccggctgatgtatatcctgctctcactcccggtgggggcgtggctgtacgggctggtgggcggctccctgcgccgcaaagccccgcccgccacggcgcagcagtgtgccgctgtgctggaaaactgccgcattgtgccgcgcaccacggcggtggcggctgtaatggcgctgtgcggcgtctatgcgttgttctttgccgtgcaggcaggggagtggcttgccgctgcgccgctggggctggacgccccggacaccgccgcttttgcggtgaacggcttttgggaactgctgaaaatcctgctgctcaattttgcggtgctggcgggcatacagttctttggccgtgcgccgctgcccaaagcgttggccgccgtgttctgcgggttcggcgtggcttttgctgcgctggcagcgggcaagctggctgtctatgtgacgctctgcgccctgacgccccggcggttcacggcggcatggtgcctgtttgtgctggccgtctgtgcggtgctggcgctggtgcgggtgttcaagccgatcccggcggcgaagctcgccatttttgcggcagcagtcagctttacactgctctgctgcgtgaatgtgaagcagcgggtcattgatgtaaatctggcacggtatgaagccgggatagatgaggagctggattggggcgtgctgtgggagtgcgggtatcaggagaacgcaacgcggtaggggccgggcatgcccggcccgcgcgcgtaaggcaaacaggcgcttgcgggaaagccgcacggaggggtcaagacccctccctacaggatgacgataacgggtgctttgtagggagcggtcttgaccgctccgcgggatgtgcacggcaaacggctgcctcccggaaggccgcgggccgggcatgcccggcccctacaaggcaacgaaaacagggacaccggcccttgagggtcggtgtccctgcttcttatgcgattttacgccttcttaaagcccacgctctgcatgaacctgacaaaggcggcctgaccggcggcgtcctgcttaaagacaccggcgttctccaaaacatggctgaacacggcgccgatctcggccttgacggccttgttggcgtcctgcggcttcatgtgggtgccgtactttgcaatcagctcgtcgatccagtcggcatggacggccagcgtgtcgcccgcctcgcggctggtgttcgggcgctgcccggccagaatttccgcgatttgcgcgccctgatccttcaggcgggcgggcaggatagccagacccatgacctcgatcaggccgatattttcctttttaatgttgtggtattccttatgcgggtggaagataccgtcggggtactcctcgctcgtgcggttgttgcgcagggccaggtcaaggatgtagccctcggtctcgtcgtagtgaaggatcggcgtcacggtgttgtggggcgtgccgtcggtctcggccaggatgccgacgctctcgtcggtgtagctgcgccaggcggacaggatgttgttggcaacattctgcatctgctggctgctgcggcccaccagacgcacggcggagacaggccagttcaggatgcccgccttgacgccggggtagcggatgtcggtcatcggcacggcgatgtcagccttctgcatcgggaaaacataccgcccgccctggaagtggctgtggctcaggatgctgccgccgacgatgggcagatcggcgttggagccgcaggtgtagtgggggaactgtccgacgaagtcgaaaatttccgccagcgtctgcttgttcatctccatcggcttgtgctgctcgtgcagcatgatgcagtgctcatggaagtaggcgtaggggctgtactgcagatagaactgctcacccgccagcgtgatgggcacaatgcggtgggtctggcgcgccgggaagttgatgcggcccgcgtagccgatgttctccttgcagagcatgcaggcggggtagccggatttgggctgcaggcgctcgagggcaatcgtcttggggtccttctcgggcttcgtcaggttgatggtgatctccagctcgccgtagggggtggcggtgttccactggatgttcttggcgatctgcgcggtgcggatatagttcgtgtcgacgcagagctgatagaaccagtcggtagcggccttggcgccctgcttgacgtagagcttgcggaacttcttgcagacctcgctctcgcggggcatcagggcgcccatcaggcgggtctcaaagttgatgcggtactggttgaccgcgccgtcgaacagctccttctgcgcggccagctcgaccatctcgtccagcagggcagcgggggtctcggggtcctccttcgggggcttggcctcgctgggggcggccagggccagcagatccagcagggtattgcgcgccaccagaatgtccagatctttgatgagcttgtgcttacggccaaagcgcagcagacgctccacgtccagcgccaggcgtgcgtcgcgctgctccggggtcagggatgttatgtcaaattcattctttgccatgattgccctcctgtaacggtgtatgcggtgtgattctgcttctgttatagtaaccataccgcgttttgcctccgctttccatagcgttgtgtgccagtcttttgcaattttcaaccaaaagcgaagccccgctgtgctgtccgtcaggacctgccgcagcggggcgtttttggctgttttacttcttcagatcgctgaacagatccttcttgtacacaccgtcggcgacgagccgggcaaagctgtcaatgacagtctgcttatcctcggcgtaggtgacaccgaaccacttgtcgtgggtgggcagcaccttgacgctgaccttgtcggcgtgcagcagttcatcaatgtagatgggcagcaggtactcggccttcagcgggttggcgggggcggccttctcgaagaactccacaaagccggatcccagcagctccacgaactcgggggtcagcgcccacatgttcatcgaaacaaggctgtcgatgtcgatgcttttgccgcctgcggctgcgccgtcggcggtcttttcaatgccgccggtctccagcacgccggtcaggtagtgggcgtcgttcatctggcagatgccgcgggtgaccgcgccgttgtcgctcagggtgtttttcagcacaaagcccgccatggcaaggtcgcccggcttgtcgggcgtgtagccctgcaggaagtcgtgcagctggacgaacgcctccttgccgtagtagtcgtcggcgttgatgacggcgaacggctccttaataatgcccttgcaggccagcacggcctggccggtgccccagggcttggagcggccctcgggcacggagaagccctccggcacgttctcgagtgcctggaacgcatagtcgatctcgacgcccagcccggcgcagatcttctcaatgcggtcaccgatggcctctttaaacgcctcctcaatgtcgtggcggatgataaagacgatcttgtcaaaaccggcctcgatggcgtcatgaatggaatagtccatgatgatctcgccgttgggaccgacggcagccagctgtttgatgccgccgccgaagcgggagccgataccggcggccataatcaccagtgcagttttcatagtttcctcctaaattaaacaccctgcgtcggggtgtggtagcaaattaatatccggccatggccatggcgtactgaacaaagcccggcccggccagattgatgaccagcgaggagagcagcagcacgatgccaaagtagagcagcgccgcccagatgctggtgccgcccttttgcagcagggcatcggtgcgggcgtcgccctcggggtattcgctgtagattttatcaatatttttctttgaggtgttgcggtacagccagaccgagaaaagccccagcaaaatcctgacgatccagtccgcaatggcacagacgtcggcggccacgggcacccaatgcagcggcatactgccgaacagcgacgggttgaaggtcgccacaatggcgatgagcgacggcacgctcaaaacgatggacagcagggctgtcagcagaccctccttccacatcttgcggtaaagcagataggcaggcccgaacaggaatgccgacaggcagactgtgaccttctgcttcgtcatgctcatgcggaagaactgcatcaggtaatacatcgggctgcggcccacgtaggcggcccagtccttggccttgatgccgtcgatggtatcctcggggccgatctcgcggcggcagatgccgccgttgtcgtcggcggtgtaggtgtcgatgcgggggccggggggcgtgcggctgtcgtcgggcttatgcacggtggacgggtcgcgggcgtagatcggcacctgcgcgtcctcgtccttcgggtcgggtcgggggccgtcgtccttcggcaggggacagccgcagtggctgcactgcgccgcgcccggctggttgtgggtgccgcagttcgggcaggtggcctcgtgcgcggctttttcggcctcgggaccgaactcgggctgccattcaaacccggcggcgtgctccgacttgtgcatacaggccccgaccttctgccagcaggcccggtggtagggcgtgccgcagtcggggcagacgacgatgtcatcctcgtcggtaaatgcctgttcacagacagggcaatgatttcctgtgtaacgtgtcatgtgtggtatcctttccgtaacataaggccattataccgcatcaaatggataaatgcaaagaaaacataaaaactttacaagataaaaggaaaaacgggcttttacggcggagttgtagggaggggtcttgacccctccgcggaacctgacggctgtcgcaggcttgtaggggacgcatatatgcgtcccctacaagcctgcggaaggtccgtaggggcggcatatatgctgcccggaaacctcgccgctgccgataacggcccggaggggtcaagacccctccctacgaaccttcattatatatgatttcccctctttacaacgcccgccaattcgcttataatggtactatgtaattttatgccaacttatgtgtgacgagggaaacaatatatgattacgattgacgaactgaaagcaaagctcggcggcatgaagaccgccgtggatgacctgcgcgacgcattgtccatcgaggccagcgaaaagcgcctggccgagctggagcaccagatgacgatgcccggcttctacgatgaccaggcccgcagccagaaggtcatcagcgagatgggcgaggttaagaacaagctcgagcgcttcggcaagctgtccacccagtatgaggaggccgagacgctgctgctcatgatcgaggaggagaacgacccgtctctggccgccgagggtgaggaggccgtcaacggcgtcgagaagtccatcgacgagctgcagctcatgacgatgctcaacggcgagtacgaccacaacaacgccatcctgaccttccacgccggtaccggcggtaccgaggcccaggactgggccgagatgctctaccgtatgtacacccgctgggccgaggcccacggctacagcgtcgaggtgctcgacgtgctggacggcgatgaggccggcatcaagtccgcgtcgatgatggtcaagggccccaacgcctacggcatgctcaagagcgagcacggcgtccaccgtctggtgcgcatcagcccgtttgatgccaacgcccgccgccagaccagcttctccagccttgaggtcatgcccgagctggacaacaacatcaacattgaaatcaaccccgccgacatcgagatgcaggtctaccgctcctccggcgcaggcggccagcacatcaacaagacgtcctccgccgtccgcctgattcacaagcccaccggcatcgtgacgacctgccagacccagcgcagccagctgcagaaccgcgagtacgccatggagatgatgaaggctaagctgtaccagatcgctttgcagcagcacaaggacaagatcgacgacatcaagggcgtgcagaatgagatcgcctggggccaccagatccgcagctacgtctttatgccctacacgctggtcaaggacaaccgcaccggctacgagagcagcaacgtacaggctgtcatggacggcgacctggacggcttcatctttgcctacctgaaggcggcctcccgcggcgaactgaaggaagattgatatgaatgaccgttttatccggctgtccatctcgctggcccggctgcaaaaggtcatccagcgcatcaaggcgagcggcatgagccgcattgagctgaaggccgggcacacgctggtgctctgccggctggccgccgcgtcggagggcctgcacttctcggagctgacagaacggtgcggtctggacccggccatgatctcccgcgtgctggcagaactggtgcgcagcggcctggtggaaaagcgcgccgagagcggcaagtacaatgccctctacctgctgaccaacgcaggccatgaccgcgctgcccgcgtgggggctgttgtggccgacgtagagcgccgcgccgacgaggggatagacccagacgatttagcgacattttataaggtgctcgaccagctgacgaggaatcttgaggctgtcgatgccgacccggcggaggcgtttgagccgctggaaattcaataatgtacaaaactgcccggctgccccaaaacgcagccgggcacttgttttgttcatatttggtgggtatactgaggaaaatataagcagcgggcgttataataggctgccgtaaatcgtctgtactgtagggaggggtcttgacccctccgcggagctgtgcggctgccgcatagttgcgcggaatgtatatatgccgtctggtgcagtttccgtcgcccgcaaccttcccggagcggtcaagaccgctccctacaagccgttttaaaacaattccgccgccctgtaggggccgggcatgcccggcccgcggccttcccataaccgcccatataccatacacgtccgggccggatatgtccggcccctgccgccatttgatctacccccgaaaggagcaccccttactatgccatccatcaccggcctgaccgccgccgaggtcgaagcgcgccgcgcggcggggcagacgaaccagccgcccaaatcacagaccaaaaccaccggcgagatcgtgcgggataacgtctgtacctacttcaaccttgtgtttctggtgctggccgtcatgctggcgctcgtgcattcctggttgaatatgggatttctgggcatcgtgttctggaataccctcatcggcattgtgcagcagcttcgcgccaagcgtaccatcgacaagctgacgcttgtctcagcgcagaagctccgctgcctgcgcgacggacggtggtgcgaggtgctgtccgacgaccttgtgcaggacgatgttgtcgagttcggcgcgggcgaccagatcgcagcggacgccgtcgtgctggacggcagcgcccaggcaaacgaatccctcatcacgggcgaagcgcgggccgttcccaaggagtgcggcgcggagctgaaatccggcagctttctgatggcgggccgctgcgtggcgcggctgacccgtgtcggggccgagagctacgccagccgcctgaccgctgaggcgcaggtcgacggtcacagggtcgcgcgcggcgagatgatgcgcagcctggacaggctgataaaattcatcggtgtggcgctgatcccaatcggcgcggtgctgatctggaagcagcattgggtactggagctttccatgaaggagactgtcgacgccacggtggcagcactcatcggtatgatcccggagggactgtacctgctgacgagcgttgcgctggccgtgagcatgatgcggctggctcgccgcaaggtgctgacccgcgacatgaactgcattgaaacgctggcccgggtggacaccctctgcgtggacaagaccggcacgatcaccgagagcaccatgcaggcggacgacccgctgccgctggcggaaaatacacccatcaccgagattttatcggcgttctacgcgggagggcagcctgataacgacacggcccgcgccctgacagcccgcttcgggcagggcggcacggcatgggctgccgtgcgcaccatcccgttcaacacggcgtacaagtacagtgccaaagactttggcgcgcaggggtgctacgtcgtcggtgcgcccgacgtgctggcgggcagccgggcgggggagcttgccgacaggctgaccccgctgctggcccagggccgccgcgtgctgctgctggcaaaatataacggcacactgccggatccgcccgcggcgctcgaccccgcacagctggaatttttggctctgctgccgttgcagaaccgcatccgcgagagtgcgcccaagacgttccgcttctttgcgaagcagggcgtgaagatcaaggtcatctcgggcgacgacccgcaggctgtcagccatgtggccgccaacgcgggcattgccggggccgagcactgggtcgatgccgccacgctgcaaagtgaggcggcgctggccgaggctgccgaaaaatgcacggtctttggccgcgtcacgcccgagcagaagcgccagctcgtccatgctttgcaggcaaagggccacacggtagccatgaccggagatggcgtaaatgacgtactggcgttaaaagatgccgactgcggcatcgcgatggcgtcgggcgcgcaggcggccagccaggtcgcgcagcttgtgctgctggattcggattttgccgcgctgcccggcgttgtggccgaggggcggcgggtcatcaacaacatccagcgctcggcgtcgctgtttctggtcaagaacatcttctcgtttttgctcagcatcgtcgcgctggccctgccgctggcctacccgttccagccgctgcagctgtcgctcgtcacgtttgccaccatcggcgcaccggcgttctttctggcgcttgagccgaaccacgagcttgtccacggcaaattcatgcggaacgtgctgcgcaaggcgctgcccggcgggctgacggatttcctgcttgtgttctgcgcacaggggttcggctatgcgttcgacatcccgtccgacatggtcggtacgatctgcacgttggtgattttgtgcgtgggcttgcagattttgtggggtgtctgcatcccgttcacgccgctgcactgggccatctggggcagtatgaccgtggcgggcgtcggcggggtgttcctgctggcgcgctggctgccgctggtgcggctggatctgggcggcacgctggtgctggtcgttctgctggccctgagcgccccgactctggccgggcttgtctttatgggcgagcggctgcgcggcatggtcaacgattggaaaaataagaaagcacgaaaacacgtataaaacgacagccccgcccgcagaaaaacgggtggggctgtcgttttatcaaaattataattgtaataggggaattatgagaaatggaaatcgcagggaggggtcttgacccctccgcggggcctggcggcggccacggtgttcccgggcggatatgtccggtccctacagccattccggcagggaagatgcgttattttttcagctcctcctcgatctccggcagatcctctttgataaacataaagcacaggctcaccagcagcagcgcgcaggaaagccagatcgtcctctcgccgaagatgccgacgcactgtgtgccgatgcccgcacccagcgcaaagataaagataatggcaaagtactgcagggacttccacagcgcgtttttatcgtgggtgtgtccgaatgcgaccagcgcgtccatgccgctgcgcaggttgccgatgcacatggtactggcaaacgggtagccatgcaccttgcggaacgcctgcacctgcatggcgcaggaaaacgagaccagcgcgtttgcgccaatatcccacgcggcagggaagaagcccaccgcgaacagcagcacgatctcggtcagcacgacgagctgacgccagtggatgcggcgggcctgccgccagcgcaggcggatgcactccgccgcggccacacccagcgcaaaggacagaacggggataaaatagtgggcaaaccgcgataaatcgccatcaaacaggctctggctcatcagcacgatgttgccggtctgggcgttggcaaacaccttgccgcgcccaatgtaggtgtaggcgtcctgcaggccgcccgacgccgataagaacatgaccgtgcggaatgcctccgacatctggccgcggtgatgcgggaataattttgacatgactttccgacctctctattacgtataaacaccgccattatagcgcgccgcgccgccgctgtaaagtttgcagcaacacatgcggcgttttgtaccaaattgacgctgcaaaacggagaaaaattttatacaaagtgcagaaatttgtgcaggagtattacatgagcgcaacttttgcggtatactgacttcactttccaacgcagtgagacaacagccgtagggcgtcgcaacgagttgagcgacaccctgcggctgtttttgtttgggagaaaataacgtatatatgaggagtaattacaatgccgcaaacaaagaaacaggaaatcgtctacaccgtcatgatggtctgcgtcatggtctacggaatggtctgctacaatatcgcactggatgtgggcgggatgcagaatttcatcttcgccgctgcccttagtgagctgcccatcatgggcgtcattggctttttgctggacacgttcctggtcggccccacggccatgcgcatcgccacgagctggttcaccccaggcgaggacaagcaggtgttcctggtggccgctatctcctgtctgtctgcgtggatgatgtgcccgttgatgagctttttcgccacgctgctcttcaaggacagccacaacgcgaactttttcgccatgtgggtgcagaccacggcgatgaactatcccacggcatttttgtggcagctgtgcggcgcgggcccgctggtgcggttcgtgtttggcaagggtctggccgctatgaaaaagaagtgataacgatttcataatacatctaatacatcgacagaaaaaacacaaacccaattttgtaccaataaaactgcacaaaaaccacttgctatatttggtaatagtgctataatacggctgaacctgaaagttgggtgtacctatttatatagagaaaagccccttggccccctcgcagagggaggcagggaacccaacccaggtaaagctcccaaagagtgaggtgcattgcatgaaagatgtcaacgacctgatgcaggccattttggagatggatgccgcccagcgccgcgaaagcgagaaggcccggctcgagcgctctgcccggctggctgctctggacgagcagaagcagaagatcatcgcggagtgtgacgcccgcgagaagtccgagtccgacgccgccgctaaagctgccgaggagggcaacgccgccgcgctggccgcgctggagacccagcgcagccaggcagccgaggccatgaccgccgccgcaaaggcccatgaggccgaatggtgcgctgcgcttgtacagcgcaccctgggcggggaggccgcacaatgatgcccacgggcaaggcaagcggcaacgccgtgctggccaaggcccgcgccctgtacggcagccgcctgcgggccgacgattaccgccgcctgatggcctgccgcacaatgaccgagctggccgcggccttgaaagaatacccgctgtacagcgaagcgctgggcgaggtcaacccccagtacgcccgccgcgtccagctggaaaacctgctgcgccagagcctgtacacccggtacgacagcctttgccgctatgaccgcagcgcgggcagcaaagtgtatgagtatttcactctctgctgtgaggtcgatgagctgactgccgccatgcggtgcctggacgcaggccgcccgggcgattacctgttccgcctgccggagttcttgcagcagcgctgctgcatcgacctctacgcgctggccaaggccacgagtttggacggtatcctggccgctgtggccggtacgcggtgggaaaaggtcctggcaccgctgcagagcgccaagccggaccgcggtctgaccgctcaggccgagccgcttctgcaggacttccgccaccgcgcactggtggcgctggcccccgctaagggcggcacaagcgctgcgccgaacctgcgcgacctcgtcgagctggaatgtgacacctccgctgtttccaacgccgcgcggctcatccgcatcggcgcgccggactcggtggtgcgcaccaacgcccgccgcgactgcacggccctgacgaacgacgagtgggaatacctgctcgccgcccgcgatctggacacgttcaaggcgcggttcgccgggacgaagtacggcccgctgctgggacaccatgagtacagcgttttgaaggagggcttcttccactaccgatgcgactggtgccgcaagtggctgcggttctccaccgacccgacgctggtcatgctgtgctacgtctggctggcccggtgtgaggtgcaggatctggatcacatcatagagagcgtgcattacaagctgccgcccgaggatgtccagccgctgctggtggggtttgatgagaaggattgagtgacccttggccccctctgggagggggctccgcccgcaggcggtgggggagagagcttcgcggcagcccgaaatatttcgggtgatggcaaggttcgctccctccgcccctgcggggcaccgtccccctctggcgcaagcgccacctccccccgtgtcgggggagtctgtctcgccgagggaggcaagctgaaacaaggagtgtgaactgattggttgaaaagatgaaactggtgcgggtgcagggcacgatgccccagctgaacgagtttatcggctcgtgctgcatggacggacgctttgaccttgagcccgcaaccagatatatgtcggaatcgctgggatacggcgctctgaatgaggagaacccccacaccgcgatccgcgaccagatcgagacgatggccaaagaggccaatattgagctgcacgaggggcagcagcacagcgacccggtggatgccgagggccgcagctatctgagcgacctgctggaaaagatcgacgacctctgcgccgagcgcaaggtcctgctggaccagaagaagctctgcgaggacggcatcgagcagtacagccactttaccggcctgaaggtcaacgtggacgacattctcgactgcgctcacgtcaagatccgcttcggcttcctgccgacggagggctacaacaagctgatgaacaactacggcgacgacccgtacatcctgttcaccccctgcaaccagacgaaggccggttactggggcgtctacatgaccccgcgggagcacgcgctggagaccgacggcatcttctcgatgctctactttgagccggtgcatgtgcccggcgcggctggctcgcccgccgagatcatcgagcactttaaagagaacctcgacgttgtcaacaagagcgtcgaggacgtcaacgcccgcattgccaccctgtggcagcaaaacgccgacaaggtccagctgctgtacaacacagcctgctactacgcggcggtctacgacctgcgccgcatggccgcggtcaagggcgagcacttcttctgcgtcggctgggtcccggcgtcggaggtggacgaggtcgcgggcaaggcccgcggcatccatgggctgcgcgtcacggtggacggaccggaatccgccggtaagatgacgccccccaccaagctgaaaaacccctggtggagccgcccttttgagtttttcgtcgaaatgtacggtctgcccgcctacggcgagacagatgtcaccggctttgtagcgatcacattcaccgtgctgttcggcatgatgtttggcgacgtcgggcagggtattgtgctggcactgttcagcacattcatgtggaaggtcaagcacaatgacctgttccatctgatgatcccctgcggcatttcgagcacgatcttcggcctggtctacggttctctctttggctacgaggaggcccttgacccgctctaccatgcgcttggcatggcaggcaagcccgtttccgttatggattccatcaccggcatcctgatggtggctgtctacatcggcattgtgctggtgctggccgccatggcactgaatatgtacacccacgcccgccacagggagtggggcgagttcatcttctcgcccaacggccttgtcggcatggtgacctacctgtgcggcgttgatctggcgtccgcttatatgggtgctgtcacgtttatgccgcaggtgctggcggtggtcggcatggtcgtcggtctggtggtgctgctctttgcggagctgctggccccgatggtcgagggcaagccctggaagcctgcgggcggtatgggcaactacctgatgcagagcgtatttgagctgctggaaacggtgctgagctacctgtccaacacgatctcgtttttgcgtgtcggtgcgttcgtcatcgtccacgccagcatgatgatggtcgtctttacactggccggtacgccgaacaacattgttgtggtcatcctgggcaacctcgtggtcatctgcctcgaggcactgctctccgccattcagggcatccgtctggagttctacgagatgttcagccgctgctacaagggcggtggccgcaagttcgtagcctttgatttgaagaaagcgaaagcgtaagatgcgccgtaggggccggatatgtccggcccgcaaccatcccacaatcggacgatagaatcgaagccgcgggccgggcatgcccggcccctacaaaagcgccttgacagaggggcgcggaataaaacaaaaaattacggagggttccattatgaaaaccaagttcagcaaactgttcgttaccatcctgatcgtggccgctgtgacctgctgcggcgcactgggcgtctttgccgcggatgatgccaatgccgacaccaccgctgccaccaccgcttccgagaccgtcaacaccgacaatgaccacaacagctctttgagcatcggcttggtcgctgccgctctggctacgggtcttgccggtatcggcggcggcatggccgtcgcttccgctgcgcctgccgctatcgcagccaacagcgagaacgaaaagaccttcggcaagagcctgatcttcgtcgccctgggcgagtccatcgctctgtacggcctggtcatctccatcatgatcctgtccaagctggtgtaacgccatgcggttctttctcatcagcgacaactccgacgccatgaacggtctgcgccttgcgggtattgagggcaccgtcgcccgcagcgaggccgacctgcgcaacgcgctggaaatggcagcccagcagcccgacatcgccgtgctgcttgtgaccgagaagatcgccgagacctacacggccacgctggacagcgcccgcgctgccggtgggccgctgctcatcacggtgccctccaccggcggcggtgctgccggtaaggaccgcctgacccgctatatccgcgaggccatcggcgtcaagatttaagaggtgtgaccatgaacgaattagatacccgcgccgagcgattcctcgagtccatccgcgccgagggcgaggctgcctgcgccgccatccgtgaggagacggagcgcgcgatcaacacccagctggacgagacgcgcaggaccgagaacgcccgcgtggagcgcaccctgcgctttgagaccgagcgcgccaagacccgcgccaaccgcgatttgagcgcggcccgcatggccgcccgcgccacgctggctgcccagcgccagaaaatcgccgacgagaccttctcgaaggcccgtgagcagctggctgcctttgtggccggcaaggactacgccgcctggctgcagaaagaggccgcttctctggcggagaccttaggcgagaacgccaagatcacggcccgcgccgccgacctgccgctgctgaaaaacgttgaactgcccgcaggcaccgttctggaggccgacgacagcatcacgctgggcggcctgaagggcgcaaaccccgcgaagggcgtggctgccgacgatacgctggaggcccgtctggaggcccagcacgactggttcctggaaaacgccggtctggaaattaacatttgaggggcaaagctatgaaaaatacaatttacagcatcaacggccccgttgtcaccatcaagggcaagactgatctggaaatgatggagatggtctatgtcggcaaggcacgccttgtcggcgaggtcatccgcatgaacgacaaggaaaccaccatccaggtctatgaggagaccggcggcctgaaggcaggcgagcctgtcgagagcacgggcggcccgctgtccgtgaccctcggccccggcatcctgcgcaatatctatgacggtatccagcgtccgctgcccgccatcgaacagcacatgggcagcttcattgagcgcggtgcgcatgagccgtctctggacgaggccgccaagtgggacgtgaccgtgactgtacggcagggggacaccctgaccgcgggccagatctacgccacctgccccgagaccccggccatcgagcaccgctgcatggtgccgccgacggtctccggtacggttacctgggtggccgacaacggcagctacaccgtcaacgagcctatcgtcaagctgaccgatgccaagggtaaggagcacacgctgaccctctgccagaagtggcctatccgcaccccgcgcccgtctgccgagcgcatgacctcgccccgcccgctgatcacgggtcagcgtgtcatcgatacgatgttcccgctggccaagggcggcgctgcggccatccccggcggcttcggtaccggcaagacgatgacccagcaccagatcgcaaaatggtgcgacgccgacatcatcatctacgtcggctgcggcgaacgcggcaacgagatgacgcaggctttgcaggagttcagcgagctggtcgacccccgcacgggcaagagcctgatggaccgtaccgtcctgatcgcgaacacgtccaacatgcctgtcgccgcccgtgaggcttctatctacaccggcatcacgctggctgagtattaccgcgacatgggctaccacgccgccatgatggccgactccacctcccgctgggccgaggctctgcgtgagatcagcggacgtctggaggagatgcccgccgacgagggctaccccgcgtacctgcccagccgtctggccgagttctacgagcgcgccggttacgtcaggacgctgaacggcgcggaaggctctgtctccgtcatcggtgctgtcagcccgcagggcaacgacttctccgagcctgtcacccagaacacgaagcgcttcacccgctgcttctgggcgttggataagtcgctggcctacgcccgccactatcccgccatcaactggaacgactcctacagcgagtatctgggcgacctcggcggctggtactacgacaacgtcggccacgacttcatgtcctgccgtgagcgcatcgccaacctgctgctgcaggagaacaatctgatgcagatcgtcaagctgatcggctctgacgtgctgcccgacgaccagaagctgacgattgagatcgcccgcgtcattcgcgtcggatttttgcagcagaacgccttccacgcggttgacacctacgtcccgctggaaaagcagctgaaaatgatggaaaccattctgtacctgtacgacaagtgcgccgcactcgtcgccaagcaggtgcctgtcagccgtctgctggccaccggcctgtttgacgagctggtccagatgaagtataccgtgcccaacgacgatttgagcaagctggacgagctgcaaaaagcaatcgacaccaagctggccgccgtggcccagggctgatgaggagggaacaacatgattctggaacatatcggactttcccaaatcaacggcagtctggtcgtgctggacggcgtcaagggcgtccagtatgacgaaatggcagagctgcacctcgacgacggctcgacccgcgtgggccgtgttgtccgtgtcgatggtgaccgctgcgtcattcaggtgtttgagggcacccgcgggctgagccttgttaacaaccgcacggtgctgaccggccacccgatgatgatggatttaagccccgagctgctgggccgcgtgctggacggtctgggccgccccatcgacggcctcggtgacatttaccccgtcgcccgccgcgatgtcaacggcgcgcccatcaaccccgtcagccgtgtctacccccgcaactacatccacaccggcatttcttcgattgactgcctggccacgctgatccgcggccagaagctgccgatcttctccggctccggcatgaagcacaacgagctggccgtccagatcgtccgtcaggccagcgtggccgacgggtcggacttcgccatcgtgttcgccgccatgggcgtcaagaacgacgttgcgtcgtacttccgcgagagcttcgagagctgcggcgcgatggagcgcgtcgtcatgctgctgaacctcgccaacgaccccatcatcgagcgtatcatcaccccgcgtgccgcgctgacggtggcggaatatctggcgtttgacctgaacaagaacgtgctggtcatcctgaccgatatgacgagctactgcgaggccctgcgcgaattctcgtcctccaagggcgagatcccgggccgcaaaggcttccccggctacctgtattccgatctggccagcctgtacgagcgcgccggtatcatcaagggcagcaagggctctgtgacccagatcccgatcctgaccatgcccggcgacgacattacccaccccatccccgacctgacgggctacatcaccgaggggcagatcgtgctggaccgcggcatggatgccaccggcctgtatccgcctgtgtccgtgctgcccagcctgtcccgtctgatgaaggacggcatcggcgcgggctacacccgcgaggatcacgtcacactgtccaaccagctgttcgcctgctacgccaaggtgcaggacgccaaggcgctggccagcgtcatcggcgaggaggagctgtcccagagcgataagcagctgatggcctttggccgcgcgtttgagcaggagttcatcggccagggcaacaccgaccgcacgatggagcagaccctcgacctcggctgggagctgctggcgaccctgccccgcaacgctctggaccgctgcgacgccgcgacgctggataagtattacgaaccggcgaaggcgagaatcagtaaagcaaataataaataaaaaataataaataataaatgtggatgcgcggcagcacccccggcagggggaggtaggggcgaacattgttcgcccgcccgtttgccgctattgcacgattttcgggtttaccgtaggggcggattccatatccgcccgcattttgagccgcgcagcggcgatccactttcttttttatttattatttattctttattatttatcaaaggagtacccaatggcacagcaggtttttcccacaaaatcaaacctgatggcgacaaagcgcagtctggcgctggcgacccagggctatgacctgatggaccgcaagcgcaacatccttgtgcgcgagatgatgcagctgattgaccgcgccgcaggcattcaggaccgcatcagcgcggcctacgccgaggcgtatgaggcgctgaaaaaggccaacatcatgctgggttctgtcggcggctatgctgccggtgtgccggtggagcgcggcgtgcagatgtccacccgcagcgtcatgggcgttgagttgcccacgctgcgcctgaacaccacctcgcccatggggctgtactatgacctggaatccaccaacggcacgctggatgtggcctacctcaagttcaatgaggtcaagactctgaccgtcgagctggccgaggtcgagaccagcgtcatccgtctggccgaggccatccaaaagacccagaagcgcgccaacgccctgggcaacgtgcagatcccccagatgcaaaagaccatcaagtccatcgacgaggtcctgagcgagcgtgagcgcgaggaattcagccgtctgaaggtcatcaaggcacaaaaagagaaggaagaagcgtgaccttcaagccttctccctctgggggagaaggtggccccgcagggccggatgaggggagagcctatggcggttgcccgtctgtgggggcaccgtaggggcggattctatatccgcccgtggcgatttgcccgtttaagggcaataccgcataattctaagtgccgatacggcgagcgaggtgcggcagctgctaagccaaaagcgcagataatactggatgtcttatcgagcattttggcaacgcagatgccgtgccgcagccgccggagcggtgcttaagccgtaaggcgggaattgtgcggtgttgcctaagggctgcaatgacagactttgcccgcatcagtcaccttcgatgacagcttccccctcgggggaagcttttttgttgtggaattttcccaaacaccccgccacttttctaaatggcgctgtcaaaaaaataacggtataatagaggcagaacatgggaatcatcggcaaacagccgatacaataaaaggagagaatttctatggcaagtcgtattgtactgaacactatttcctaccacggccacggcgcaatcgagaacatcgttcccgagctgaccgcccgcggctacaagaaggctttcgtctgctctgaccccgatctgatcaagttcggcgtcaccaagaaggtcaccgacctgctggatgccgtcggctttgcctacagcgtttacagcgagatcaagcccaaccccaccatccagaacgttcaggacggcgttgccgcctttaaggctgccgaggctgactgcatcgtcaccatcggcggcggctcctccatggataccgccaaggccatcggcatcatcatcaacaaccctgagttcgcggacgtccgcagcctggagggcgttgcccccaccaagaagcacgctgtgttcaccattgcggtgcccaccaccgccggcaccgctgccgaggtcacgatcaactacgtcatcaccgacgtcgagaagaagcgcaagttcgtctgcgtggacaccaacgacatccccgagatcgccgttgtcgaccccgatatgatgtccagcatgcccaagggcctgaccgccgctaccggcatggacgccctgacccacgccatcgaaggctacatcaccaagggccactgcaccatctccgatatgttccatctcgaggccatcaagctgatttccgagaacctgcgcggcgctgtgcagaacaccccggagggccgcgagggcatggctctgggccagtacattgccggtatgggcttctccaacgtcggcctgggcatcgtccacagcatggcccacggcctgtccgccctgtatgacaccccccacggcgttgcctgtgccatcatcctgcccaccggtctggagtacaacaagaccgtggctggcgagcgttaccgtgccgtcggcaaggcgatgggcgtgaccggaattgatgagatgaacgacgtcgaggccgccgatgccacgattgccgccgtcaagaagctgagcgccgacgtgggcatccccgccgacctgaagggcatcctgaaggaggaggacgtccagttcctggccgagtccgcctttgccgacgcctgctgcccgggcaacccccgcgacaccagcgttgaggagatcaaggagctgtaccgtagcctgatgtaatttagtattacataatgtaagagggtatctgctgaaatggcaggtaccctcttttttgctgctatgttgttttatgggtggtccgtagggagcggtcttgaccgctccgggaacgtgacgatggccgcaaacagcccggaggggtcaagaccccaccctacaagcagggtaggggccgcacatgtgcggcccgcaaccttacggcaaaagcaattttaccggaaagccgcgggccgggcgtgcccggcccctaccaatattgtgattttgtttggaatttcttcggttccttctttgcaaagaaggaacaaacccccgttaagaatccgaatccagcttcagcaccgcggtaaacgcctcgctcggcagggtcacgctgcccagctggcgcatcttctttttgccttccttctgcttttccagcagcttcttcttacgggtgatgtcaccgccgtagcacttggccaacacgtccttgcgcatggccttgaccgtctcgcgggcaatgaccttgccgcccacagccgcctgcaccgggatctcaaacagcgcgcgggggatgttctccttcagcttctcgcagatgcggcggcccttcgcgtaggcgttgtctgcaaagacaatcatcgacagggcatcgacgacctcgccgttgagcaaaaagtccagacggacgagcttgctctcgtgccagccctcccactcgtagtcgtagctggcatagccgcggctgcgggacttgatggcatcaaagaagtcgtagacgatctcgcccagcgggatcaggtaatgcaggtcaacgcgcgtttcgtccatatacttcatgtcgaccagcacgccgcgcttcgtctggcacaggtccatcagcgggccgacgtaatcgttcggcgtgtagatgtgcgcgttgacgaacggctcctcctgcttgacgatgcgggtcgggtcggggtaggcggaggggttgtcgatgacctccaccgtgccgtcggtcagcgtcaggcggtactggacgcccggcgtcgtcgtgataaggtcaaggtcaaactcgcgctcaagacgctcggtgatgatctccatgtggagcaggcccagaaagccgcagcggaagccgaagcccagcgcggcactcgtctccggctcaaaggtcaggctcgcgtcgttgagctgcaatttctccagcgcgtccttcaggtcgggatagtccgcgccgtcggcggggtagatgccgcagaacaccatcggcgtgaccgtgcggaagccgggcatcggctccggtgtggggttggcggccagcgtgacggtatcgccgacgcgggtgtcgcgcacggtcttgatgctggccgtcaggtagccgacctcaccggcctcgagcttgtcacagggggtcaggctcgttgcgcccatgtggccgacctccaccagctggaactccgcgccggtgctcatcaggcggatggtatcgccgggcttgaccgtgccctcaaagatgcggacgtagacgatgacgcctttgtagctgtcgtagatggagtcgaagatcagcgccttcagcggtgcgtcggggtcgccggtgggggcgggaatatcccgcgcaacgctttccagcacctccttgacgccgatgcccagcttggccgagacgcgcggtgcctccatgcagggcaggccgatgacgtcctcgacctccttcgccacggcgtcggggtcggcactgggcaggtcgatcttgttcaaaatcggcacgacctccagattgtggtccagcgccagatagcagttcgccagcgtctgcgcctcaacgccctggctggcgtcgacgacgaggactgcgccctcgcaggcggccagactgcggctgacctcgtactggaagtccacatggcccggggtgtcgatgaggttgaactcataggtctcgccgtcgtcggccttgtagcgcatcgtgacggcgcgggccttgatggtgatgccgcgctccttctcaatgtccatgtcgtccagcacctggtcggtcatggtgcgcttgtcaacgctgtcggtcagctccagcatacggtccgacagagtggacttgccgtggtcgatgtgggcaataatgcaaaagttgcggatgttcttgcgggccatcaggtttcctccaaattgttccagatctcgcagatcttgccgttttccttatatacgcggggcacgcggcgggcaaggccgcacacgacctcatagttgatggtctgtgtcttggcggcaatcgtgtcagccgtgtcgccgccgtccgggccaaagaccgtgacctcgtcacccatcttcacgccgggaatgtccgtcacatcgaccattgtctggtccatgcagacgcgcccgaccacgggggcccgctggccgcggatggtcatgacgccccgatccggcccgccggacagcatccgcgggtagccgtcagcgtagcccacacagactgtggcgacgcgcatcggcttatcggcggtaaaggtgcgcccgtagctgacgctctggccgggctgcagctccttgacaaaggtcacgacggatttcagcgacatgacgggctgcagggcgggaaagtgtacctcattgctggggtcaagcccgtacaggatgatgcccgcgcgggtcatgtcgtgccgccactcggggtggcgcagctgtgcggcagagttggcgcagtgtaccgtgccgacggggcagccgtccgcacgcagccgctccacgacttgcgcgaacagcgcgtgctgctcgtcggtgtagcgctcatcgtcgggctcgacgctgtccgccaccgcaaagtgctgaaagacgccgcagatgtccagcccgggcagggcgtagagagcctccagctcgcggatggtctccgcaaagccggaacgcaccgcaaagccgatacggcccatgccggtgtcgatcttcaggtggaccttaaccttgacgcccgccttgacggcggcagcggagagcgcctgtgcgtattcggttgaatagcaggtggtgatcaggtcgttggcagccagcacagccgcataggtggggtcggcgtagcccagaatcaggatgggcgttgtgatgccgccgcggcgcaggtgccgcccctcgccaagggaactgaccgcgaagcccgcagcaccggcctcctgcaggacgcgggcgatgacgttatcgccgtggccgtaggcgtccgccttgacgacggcgcagaccggcccgcctacggtgcggcggatatattcataattttcacgcaaggccgtcaaatcaatctcggcccagcagtgcttttccaaggtaagtgtattcatagtgcgccatttcctccgtaacagtttattatagcatgaaaacagcgttcctgcaaccgattttctggttttctaattttctaattttcgccgtcgccgtttgtggtcaggtgtgcggcgtccgtctcggaccagtggccgtgtacccgctgcacgccgacgatgcgcagcttggaatgcaggaagtgctgctcgcggtaaaggctgaaatagctcgacagcatgtaggaaaccgcgcatgccagcgcaaacagcgagacgcactgcccgccgaatacctcgatggcaaggcagatggacgccagcgggctgttggtgcagccgcagaacagcgcaaccatgcccagcgcggcacccagctgcggcggcagacccagcagcggtgcggccacacagccgaacgtcgcgccggtgaagaagatcggcacgatctcgccgcccttgaagcctgcgcccagggtcagcgcggtgaacagcatctttaaaaggaaggcgtagggaacggcctcgccgtcgatggcagcctcgatgaccgccgcgcccgcgccgttgtagtcggtggtgcccagcagctttgtcaaggcgataatgagcacgccgcccgcggcgacgcgcaggtagatgttcggaaagaatttctggtacagcttcggcgtgacgtggagcagctcacagaagaagatgctcagcgcggccagcagcgcacccaggatgataacgcggacgagattgtccggcgtgggggcagcctcggcctgtaagacgaacgcctcgggtgccagccccattttgccgctgatgaaaacgcccagcagcgccgacaccagacagggaagcagtgccgcgtactgcatagagccgacatcgacgacctccagcgtgaagatcgttgcggccagcggcgtgccgaagatggccgagaacgcgcccgccataccgcacatcgtcattaagcggcagtcacggttttctaagcgcagcgccctgccgagctgcccggatacgctgccgcccagcagcagagccgcgccctcgcgtccgctggacccgccgaacagatgcgtggcgacggtggaaacaaagatgagcggcgcggtgcgcagtgtcagcggcttgtgctcccgcacggatacgaagatttggttcgtagagccgccgccatccgggtcaaagcggtgatacaaaaatacgataacaagaccggcaacaggcagcaggtaaagcagccacgggtgcgcgccgcgggtggcgttggcccagttgagcgccagcccgaatgcgccgcccaacgggcccaccacgcagcccaccagcgccgccagcaccagccacttggcgcacaccgcctgataccccgccgcgctgcgcagatgccgtttgatccgctccaaggcgacccctcctatgctatgcaaaatttgagattattatagcctttttgttgggaaaagacaacagaaaaatgaaccgcggcagcgccttttggcagagaaagccgaataacagaagcgccgcagatttcaatgaatctgcggcgcattccgatggtcgaggtgacaggactcgaacctgcggcctcgtggtcccaaaccacgcgcgctaccaactgcgcaacacctcgttcttataacttatccattataatacacaagcggtgcgggcgtcaagtcccggcgcggcaaaaatcatacagccaggcggagcagccccagcaccagcaggtgcgcggggtagaaggcatagaagaaccacttgtaaaacgtgcgcccgcgggcggcgcgccgaccgttgtacaggtacaggatcacaaacgcggagacaaggatcggtacggcgcagccgacggcctcccacacctgcccactgcccagcccggccatgccgccgtagagcagtgccgccgcgccgaacgcggctttctgccgcgtttggttccccccggcccaggcaaacagcagcgtgaacaccggggccagcagcgcccagtcacagaacagcgatgcgcagatcagcagcacgatgcagacgccgcgcagcacgcggtcctgaatcttctcctgcaccagcagcaccagaaagcagagcagcagcgtgaacagcatgttgaactgcacaaacccggcgatgccgtttgccggaaaggccagctgatacggcaactgcgccagcacggcaaaccccagcagccgcccggcgtagcggcgtttggagcgggtgcagccgtagccttcgacgagaaaaaagcacatcgtcacggcggtaaagtagccgatgcagaggcacagatttgtcagcggctgcccggcgggcagaaagacgttcgcaatgtggttgataagcatggtgagcatggcaaccatcttgatggaatcacgggacatggtaataacccctttcgtattcattgtaaagtacgagggagcgggcgtcaagattgcagcggcacggcaacatttttgcggctcgccctttcttttgccctgtgcctgcgctataatgaagtacaggaaagctatagggctgccgcaaggtgttctgcgcggggatgcagggcttttccctgtgccggtcatttgctgtgtgctggtgtttgtgatcgagctgtttgtgtgaggtactatgattgacgcaataaaaatccgcggtgcgcgggtacacaacctgaaaaacatcgacgtcgatgtccccttaaacaaaatcgtcggcattgcgggcgtgtccgggtcgggcaaatcgtcgctggcactcggcgtgctgtatgccgagggctcgcgccgctaccttgatgcgctgtccacctacacccgccgccgcatgacccaggccgccaaggcacaggtggatgaggtgctttacgtccccgccgcgctggcgctgcaccagcggcccggtgtgccgggcatccgcagcaccttcggcacgggtaccgagctgctgaacagtctgcggctcatgttctcccgcctggccagccaccgctgccccaacggccattacgtgccgccaacgctgaacgtcgccgccgagcagccgatttattgcccggaatgcggcgcacttgtgcgtgcgccgtcggcggaggagctggccttcaacagccagggcgcctgccgcacctgcgacggcacgggcctggtccgcaccgtggaccgtgccacgcttgtgcctgacgagagcatcagcattgacgacggggccgtcgcgccgtggaacagcctgatgtggtcgctcatgaccgatgtctgccgcgccatgggcgtgcgcaccaatgtgccgttccgtgaactgaccgacagggaaagagacatcgttttcaatggcccggcggagaaaaagcatatcttctacaaagccaaaagcacgcccgaggccggggaactggactttacctattacaatgcggtctacacggtggagaacgccctggccaaggtcaaggacgagaagggcatgaagcgtgtggaaaaattcctgcgcgtggatacctgcccggactgccgcggctcgcgcctgtcagaggccgcccgtgcgccgcggctgcggggcatcgggctggatgaggcgtgcaggatgacgctgacagcactctgcggctgggtggacggcgtgcccgccagcctgccgcccgagatgcgccccatggccgagagcatctgcgcctcgttccgcgagaccgcacgtcggctgctggatctggggctcggctacctgacgctggaccgcgcgtcgtcaacgctttccaccggtgagcgccagcggatgcagctggcccgcgccgtgcgcaaccgcaccacgggcgttttgtacgtgctggacgagccgtccatcgggctgcacccctccaacatcgtcggcctgaacggcgtcatgcacgacctgatcgccgacggcaactcggtggtgctcgttgatcacgacacacaggtgctggcggagtcggactggctcatcgagatgggccccgaggccggtgcgggcggcgggcacgtcattgccgagggcacggtggccgacctggccgggaacccggcgtcccaaatcggcccgtttctgggtgggcaggggagtgctgcgccccggaaccgcccggcggcggagctgtttgccgaggggcgcatccatctttcgacggacgccatccatacggtcaagccgctggaggtggacattcccaaggggcggctgaccgttgtcacgggtgtgtccggctccggcaagacgacgctgattctggaaagccttgtcccggcgctggcggcgcagacggcgggcaagccgctgccgccccacgtaagggccgtcgaggccgacggcatcgcgcaggtaaagctcatcgatgcaacgccgattggcatcaacgtgcgctccaccgtggcgacctacgccaatgtacacgatgagctgcgcaaggtctttgcccgcacgcccgatgccaaacggctgggctacaaggcgggcgacttctcctacaacacaggcaagctgcgctgcccggtctgtgacggcaccggcgtcatcagtctggacgtgcagtttttgcccgatgtggaaattccctgtaccgggtgccgtggctcccgctacagccgcgacgccgacgccgtgcggcacgagaacaggcacggcgggacctgcacgctgccgcagctcatggacatggacatcaacacggcgctgaccgtctgtacagacttgaaattggtgacacagcgcttaaaagtgctgcaggatctgggccttggctacctgacgctgggcgaagaaacgccgagcctgtctggcggcgaggcacagcggctgaagctggccagcgagatgggcagggcccagcatgacgcagtgtttgtctttgacgagccgaccatcggcctgcacccgctggacgtgcgcacgctgctgggcgtgttccgaaccctgatcgaaaacggcgcgacggtcatcgtcattgagcatgacctcgacgtcatccgcagcgcggactatctcatcgacatgggacccggcggcggtgaggagggcggacgtgtcgtcgcctgcggaacccccgccgaggtgaagcggaacccggagagcaggacggggaaatttatctgaaacgtatcatgccttcccccttgggggaaggtggccgtaggccggatgaggggcgagcttgccgtgattgcccgtaaaagggttgctgcgcaaactcgcccctcatcagtcaccttcggtgacagcttcccccgagggggaagccttttttgttttgtacatcctgcacaaaaactacccttcatttttggtgagtgaaaatgaccgaaactgattgattttgacggataatctgctataataaagctacagtcaatcagaaacatccacaaaacaccaaaatcggtcaaacaaagaccgggaaaggagcaaaaccctatgttagccgaggaacgctttgccctgatcctgaacctgctggcggaaaaacgcaccgccaccgtgcaggagctgtgcgaggcacttaacgccagtgaatccacgatccgccgcgacctgaccgagctggcgcggcagggccgtttgaataaggtccacggcggtgcgaccctgccggacggccagtttttggccgatgagccgacgatggccgccaaggaggcgcttgccgtcgggcagaagcgcagcatcgcgcaggccgcggcagacctgatccgggcggaggatttcatctacatcgacgccggtacaaccacactggccatggtccgggcgctgagcggccccgcgctggaggcccactacgtcaccaacggcatcgcccacgcgcggctgctggcacaaaaaagctgccacgtctgcgtgccgggcggtctgctgcgcccccggacagaggccatcatcggtgcggcggccatcacggcgctgcagcagttcaatttcaccaaggcgttcatcggggccaacggcgtggcgctgaacgtcggattcacaacgcccgacccggaggaggccgccgtcaaggccgctgccgtccgccgcgcgcgggagacctggtatctggtggatgacagcaaattcggccgggtctatccggccgtcatcggggagatttacagcggcgcgatcctgacgaaccgctgccctgacccaaaatacagacagctgacactggtaaaggagacagagcaatgatctacaccgtgacattcaacccggccattgattacgttgtgcggctggaccgtgagctgcaggtgggcgacgtcaaccgcgccaggggcgaggactgcgtgctgggcggcaagggcatcaatgtgtccggcgtgctggcccagctcgggtgcgagagcgtcgccctcggctttgtggcgggcgagaccggcgcctggctggagcgcggtctggctgcgcagggcctgaaaaccgatttcgtccacctcgaccacggtatgacccgcatcaacgtcaagatcaaggccgggcaggagaccgagctcaacggcgcgggccccgatatcccggaagccgctatgcaggcgctggagcaaaagctcgacgccctgcaaaaggatgacattctggtgctggcgggcagcattccggccagcctggcccagacgacctatgaacggctgctggcccggctggagggccgcggcatccgcgccgtggtcgatgccacgcgcgatttgctcgtgaacgtgctgccctacaagccgttcctcatcaagccgaacaaccacgagctgagcgagatcacgggcgtcaggctgacgaatgataaggaaattgccgctgctgcccacatgatgcaggacaagggcgcgcgcaatgtgctggtcagcatggcgggcgacggtgcgctgctgctggatgagcacggcacggtctaccgcatcggctgccccaggggcaaggtcgtcaacagtgtcggcgcgggcgacagcatggtggccggttttgtggccggttaccagcagagcggcggcgattatgaggccgccctccgcctgggcaccgcctgcggcagcgccaccgcgttcagcctgggtctggcgacgaaggcggatattgatgcactgctggcaacgatgtgacgcggcgctgtaacggaggatgcctgcatccgcccgcgggtcgatgcaagcatcgacccctgcaaaagcggcggctgccccgtaggggccggacatgtccggccctcaaccttcccggcagcacccatttaccgtaaggcagcgggccgggcatgcccggcccctacaaagatattatttaaaaagaagaaggagaactgtcctatgcgtatcacggaactgttcactgcgcagtccatcgcgctggatgtcgctgccccggatcaggccgccatccttgacaagctcgttgatctgcaggcgacccacggcaatatcaccgataaggacgcctataaaaaggccctctacgcccgcgaggccgaggcatccacctacgtggacaacggcatcacggtgccccacgcccgcacagcctgcgtgacccgccccagcctggcggcgctgcggctgagcaccccggtccagtacaacgccgatgacgacggcaaaaccgacctgctgtttgcgattgccgcgccggagaatggcagcctgcacattgacatgctggcccgtatgatgcagatgctgatgaacgacgacttcgtcgaaaagctgcgcgccgccaagacgcccgccgaatttctcgacgccatcgacgcccaggaggatgcccaatttggcgaggagagcttcacccaacaggagatcccccggaacggctaccgtgtgctggccgtcacggcctgccccaacggcattgcccacacctacatggccgctgaggctctgaccaagatgggcgacaagctcggtctgccaaccaaggtcgagacgaacggctccgacggagccaagaatgtgctgacccccgaggagatcgccgcctgtgacggcatcatcattgcggcggacaagaacgtcgagaccgcccgcttcgacggcaagccggtgctgtttgcccgcgtggacgatggcatccacaagccggagaagctgatcaagaaaattgcccacggtgaaactcccatctaccacgccgaggccggggccaagacccggcaggccgcgggcggcgcaagcgacagctttggccacagcctgtacaagcacctgatgaacggtgtatcgcacatgctgcccttcgtcgtgggcggcggcatcatgatcgcgctggccttcctgctggacgattacacgattgacccgtccaacttcggcatgaacacgccggtggcggcgttcttcaagaccgtcggcagtgcggcgttcgggtatatgctgccgatcctcgcaggctttatcgccatgtctattgcggaccgtccgggtctggccgtcggctttgcgggcggcgtgctggccatgaacggtacgaactttgccgcccttgcccacggtgagaccaccggcatctccggcggcttcctggcggcgctgctggccggctttgccgcgggctgcatcgtgcagttcctcaagaagatcaccgagaagctgcctgccagcctcaacggcatccgcccgatgctgatctatccgctgggcggcatcctcattattggtgcggtcatgtgcggcatcaacccggttatgggcatcatcaacacggcaatgaccgactggctgaacgccatgggcggcacgtccaaggtcctgctgggcgcaatcgttgccggcatgatgagcattgatatgggcggccccttcaacaaggcggcctacgtctttggcacggcggcgctggcctccggcaactacggggttatggccgcggtcatggtcggcggcatggttcccccgattgcgattgccctgtctacgaccttttgccccaaaaagtggagccccgacgagcgccgcaacggcatcgtgaactacgttatgggcctctgctttgtcaccgagggcgcgatcccgtatgctgccgctgacccgctgcgcgtcctgcccagctgcatcatcggctccgcgctggccggttcgctctccatggtgttcggctgcgccctgcgcgcaccccacggcggtatcttcgtattcccggtggttgaccacgcactgctctacatagttgccctgatcgtcggcagcgtcgtcggcgctgtgatcctgagcctgctcaagaaggaatacgtcgaggaataaataagaaaacggtacaaggccgctcccgtgcgatgggggcggccttgccgtctgtttggaaccatggtataatgacaaaaaacacaaaaggagacgtttcatgcaggtcgtgttttccccgggtgctgagataaaatttgagggcgcaaataactttcgtgagctgggcggctaccgcgcggcggacgggcggcaggtaaaatacggtctgctctaccgcggcggcaaccttgatctgctgaaaagcgaggccgaccacgcacggctggcgtcgctgggcctgcgggaaatattggacctgcgcagtgcaggggagagcgctgcgcaccccgatccggcggtcccgggggcgcactaccagcgcgtctgcggtatgcgcaacgccgacggtaccgagatggacttttccggtcagggcatcgagcgcctgcggcaggaaaaggaagcctttgagcgcagtgtgggccgcccggtacacgattttgagtggttcagcgctctgtaccgggagatgccgttccgcaatccggcctaccacgcgctgtttgccctgttggagggccgccgcgtgccggtgctgttccactgctcctgcggcaaggaccgcacaggtatcggggccatgctgatcctgctggcgctgggcgtctcccgcgcggacgcgctggccgattacatgctgaccaatgtctaccgccgcgaaatcattgagcgcttcctggcggataagcccgccgccgagcgcgatctgctgctgcctgtcgagggcgtcagcgagccgatgggcgcaggagccatcgacgaaattttgcggcgctacccgagctacgaggcgtactttgccgatgaattcggccttgatgccgcaaggctggaggcgctgcgggatttttatctggaataactggaataaaaacaaccgctcccttgccggaaaatggcaggggagcggttgtgatttacagggaaaatcagcccaggctgatgcccatggcgcgggcgacgttcagcatgtcgcagtcgccgggcacgccgcgggtcttgccggcaatgtcggccagcgggttggcagtcacatggcggttgaccatggcgacggtcacgccgtagtgctcgtccgccacgagaccggcagcgtaggagccgaactgggtggccagcacgcggtcataggcgctgggactgccgccgcgctgcatgtggccgggcacgcagatgcgggtctcagcaccggtcatctcctcgatctgcttcgcaatgcgggctgtggcggtggtgtaaccggcctcggcgcgcttggcggtccactccttgcgcttcatcttggcctcctcggtggagaaggcaccctcggccacggccaaaatcgagaagttcttgcccgccttggcgcggttctcgacagcagcggcgaccttcttgatgtcgtagggcagctccggcagcaggatgatgtccgcgccgcccgcaatgccggagtacagcgtcagccagccggctttgttgcccatgatctcaatgcacatgacgcggctgtggctgcccgcggtggtgtggatgcggtcaatgacctcggtggcgatgtccacagcagtgtggaagccgaacgtcacgtctgtgccgtagatgtcgttgtcgatggtcttgggcagaccgatgatgttcaggccctcctggctgagcaggttcgcggtcttgtgggtgccgttgccgcccaggcagagcaggcagtccagtttggcggcgcggtagtttttcttcatcgcggccaccttgtccaccttgtcctcctcgaccacgcgcatttttttgaacggggtgcgcttggtgcccagaatggtgccgcccacggtcagaatgccggagaactcgtccggggacatctcccggaagttgccgttgatcaggccgtcgtagccgttcatgatgccgacgatctcgaccttatcgcccatgcggtggtacaacgctttggccacgccgcgcagggtagcgttcaggccggggcagtcgccgccggaagtcaggataccaacacgaatcgccattgtaaaaacctcccgttgcttatatattctactatatataaatgtacgctaagcgcaaaaggatgtcaagtatagtttttgcacgatgctgcgagcaaaacaaacttttttgaaaaaatctcaaaaaaattcaaaaaaaggcttgcaatttggaaacacctttgctataataacatacgtcgccgggtgacacggcagacacaaaacaaaatatgggagctttcccgagtggccaatggggacagactgtaaatctgctgcttaatgcttcggtggttcgaatccaccagctcccaccaaaaaggacccgcaacttaggttgcgggttcttttttgtgctggagctggtaggattcgaacaggtcggccatccgcagacggcaaaaaacagtcctgcggactgttttttagaccgcggcttgcgaatccaccagctcccaccaaaaagctgtggcaaagatgttgccgcagcttcttttctttgctgtatcgcacaaaaccggcaaaggcgatgaccgattttcaaagtgcgttttatagagatgtccaactgcttccgggcggttggactttttttgttgccaacctttataattctaagtgccgatacggcgagcgaggtgccgcagccgccggagcggtgcttgagccgtaaggtgggaattgtgcggtattgccttaaatttccccgcagccggagaccgtggagtggttcatgcccatcctgtaaaatcagaaaccgggcacagaattacagcgggcacttgcaatccgggcggaaaacaggtataatagcaactgttacctgtctcagtagctcagctggatagagcacacgcctcctaagcgtggggccggaggttcaaatcctctctgggacgccagaaagcaccgctgcaagccttttttcggggcttgcagcgtttttttattcctccttttcccggtaatttcgcttctgttaccgagaaatttttatacgccgcatgatgtatatttgctaattggactcgaacgcttttcagaaatttgctaagaaaattctgcgttttgctaattcgatttttcggatcactttgccggggcttgcgccgctatcagggctgcgagcgcacttgccagctccggcgacttatgaagctgctccacaaggctttcaaggtccaggttcgcaggctccgattttgccgattcttccggcggacggacattgcggagatcaggcttggcatagaaggctgtctcaaatttctgacccaacttgtctctttcatcaaaattaccccgtaacttgatgtttctttgatatattttttgttagtctataaaatacgaatatcaatccaacattaaggatgatcataaagaccggctggctcataccgaaatatgttttcatatcagaaaatataccgtttgtatgaagcataaaaatcgggcaaatttcctgcattttttgtaaaacaggaaggctatcattaaaatcaaacacaactggcaagaagcagatgacgcaagaagtaataagcgctgtaacaggagaactcatttgagcacttaaaaacaatgtaatagttgtcaaggctacaatcccaaaaatattcaatattacagagataaagaacatttgcaaaaaggtcaaattatatattgaagaagcataatgtaatgaagattgaatgcttacattccacccctgtaacccataggtacagccatacagaactaaatttagcagtaaatacaagaggtatgtgccaattacaacttccaaggccgctataatttttgaagttgtgagtttggttcggccataccgagccgaataaataatgctatctgtatgaagtgcatactcttctgagaaaacaggagatagagtgattacaacaattaaacatatcattatggacaagatgctccccattccagataatagcttatcccagccatcacaatatcctaaagtcacagttggactatttggatatgctgtttcgagtgacttaaaactaccatcagaatttgtcaaatattccagaatcgccgcttggtcacgataaacatgaacagcagaaaaagcagaattttcatcttgtccaacagttgcttgttttgcttggtcgattttttcttgcatagtaagtaatgtattttgagagagttttccttcaaatatttctgctacttccttccgttgttcaatggctgtaaaaccgcttgctaatgccattttttcaaggtcataatcatagaaaacattttgataattaaattgaaaaaagaaaaaataggcaacgataagaaccacaccagctaaaaacaacattcgtgtttgctttctcgaacatattttatttcgttctgcttttatcatttcattcatgctcggatacctccgcaaaatagtataaatacaaatcttccaatgttggatcaacattccaagcggttctgcatggtgcttcttgagaaataatcctcagccgttctgcaccattattatgtttcagatttgctgttacatagttcaattctaattctttggcctcttttcgagatacatcacattcccaaacacatttttcaatcggcttcaaaatttcttctggagaaccatgttgaattaactcgccattattcataatcagaatctcatttgcgatatattcaacatcagaaacaatgtgagtggacaaaattacaattctattttctgccaaagaactaatcagattcctaaaccgcacccgctctttcgggtcaagtccagctgtaggttcatccaaaatcaaaatacggggatcgtttagtaatgcttgagcaattcccaagcgttgtttcataccgccggaaaaagttttgattttttcgtttttctgtgtgagcagatcaacaacctgcaacagctccattgtgcgattatgggcttttttaggcggcagcccctttattgcagagatatacatcaaaaatttatacgctgtaaagttaggataatagccaaaattttgtggcaggtagcctaagatattacgatatttctcgcccaaatcatgaatgtttttcccgttaaaaaaaatggctcctttcgtttcagtttggacatcgcaaataattcgcatcaaagttgtcttgcccgcaccatttgccccgagtagaccataaacaccatttgttaattttgcgctgaaatgatttacagctttttttcttccatattcttttgaaagatcatttattgtaagttccatatcaattctccaatcattttttcttttttcaagtacagttgaagtgttttccctaataggataatagataacacataaaatccaatccatccccagaacatagacgcttcaaatataaatcgctgatggagtacaagagaaaatgttccagaaagaaaaatcatacaagcgattaaatgatacaagctatcgtttgtcctgcttttcgcacatataaaaagataacaagtgcaagaaatattaaatggaatcaaaccatacaacaccatttcaatcattgatttctggtaaatatatgccattgaaattaaaatgactgttattaggaaaaggttgattactccaataatcagcatacgacctgctacaatttttaccagcgttgttctactagactgttcaatttcccacataccatagatgttgcttttagatatttctattgcacctaataacgcaaggaatggaaccataactgcaaggattgtcaatggataataaaatggaaccctccattggcccaggatacatgctaataatactgcacatatagtgagtattatttgaacaatccagaaagaaagcggcagaaattgaagttggttcaatataatatctcgcattgaatttttattgaattcagaactattcatgtaactttttccagctacgattactgctttaattttaggttcagatggagcaggcgtttcacaactctgcaaccattctaatacaccattttgtttttgggtcatacattatcgcctcctctaaaatcagccaaatatcgttccagttttttaatcccctgttggagcctagattttacagtagaaacactagcttttgtaatggttgcaatctctcggattttcaaatcataataaaatcgtaaaatgatgatctctttttgatagtccggtaatgtgttgattgcatattgaatttgcgctttaagttcgttaagctcaattttttcaaaggcattatcagtatcttctatatcttcaagagtttctaaatccatatacaggggttttgctttcttagtataattgttacaggtattaacagcaatcgttagcagatagttttgaaatttcccgatctttcgtactgattgaatattctccaacaatttcaagaaaacatcttgtgtaatatctgcggcggtatctggatcgccgttcaatcgccgacaacaaaatagataaattgactgataatattttcggacaattatctcaaatgcatctgtgtcacccgactggatttttttaattagtatgaaatcttcgataccgtgtcaccgccttccatgtgtaaaacgccttacacttaatatacaactgagtaacccaaaaggatttaactttagaaatttttcttttacttttttcatttcccttctattgtaattcctgttcttgaaaaatataagatgtaatatatgaattataaacttcaatcaacctgcatatagcaacattccacgggcaaagtatgaattatacaatgtaatagggtgatgctatatggcaaatgtttagcatggccgcaatttgttccacggtatatgtgcgcggttccggcagcgactttttctctttcttgtccatagtaacctccatatatttgccttgtcattttgactaagggagtggagaatggcagtagcaatcggctttggctgggtgtcctcttgctaagaatttgctaataggaccacccaacggacacataaaactgcgtcagaacaggtgttttgcaccataaagttcgtttactacaagtcattctgcgtaagggatgatattggaagttacatccgaaccgtgtatcacatggtaagccatactcctaagcgtggggccggaggttcaaatcctctctgggacgccagaaagcaccgctgcaagccttttttcgggggttgcagcgtttttgttttctccttctcccggtaatttcacttccgttaccgggatatttttatacgccgcaagcttttttgtgatggcgttggattcggcaaggacgcattgtttacaatttggcggtggattatcccgcgcagggtgtggtacaatataaactacactgaaaatgcaggggccgatgctcaccatcgacccgtgaaccttgcggcggccgctatgtgccgcgggcgaaccatgtccgcccttacactctcgacgcaggaaggccgcgctgcatctattataattaaaggggtgtttaccatgtgtacagctgcaacctatacaactgacagtttctactttggccgcaatctcgattatgaattttcctacggcgacgaggtcacgatcacgccgcgggcctacccgtttagcctgcgctgcatgggggacttccgcacaaaatatgcgatgatcggcatggcctacgtggcgggggagtacccgctctactatgacgccgtcaatgagaagggcctgggcatcgcagggctgaactttgtcggcaatgcagtctaccacccggcgcaggatggcaaaagcaacgtcgcccagtttgagctgatcccctggctgctgggcagctgtgcgacgctggccgaggtgcgcacgctgcttgcaaaaaccaacatcgtcaatatcccgttcagtgagcagctgcccctcgcgcagctgcactggctcattgccgacaaaacggggagcatcgtggtggagtccaccgccgacggcctgcacatctacgataatcccgtcggtgtactgacgaacaatccgccgttcccgcagcagcttttcgcactgaacaactaccgcgcactctcgccgcgcacgcctgcggttgcgtttgcggacggccttgacctgcccgtctacagccgcggcctcggcgcactgggcctgccgggtgatctgtccagccagtcccgctttgtgcgtgcggcctttgtgcggatgaacgcgaaatccggcagcggcgaagccgagagtgtcgggcagttcttccacatcctgcacgctgtcgagcagcagcgcggctgctgtgagctggacggcggcaagtacgagatcacactctacacaagctgctgcaacgctgacagaggtatttactactacacgacctacggcaaccaccagatcactgccgtcgatatgcaccgggaaaaccttgacggggacaggctggtccgctatccgctggtgcagggcgaacaaattgcgctgcaaaactgattttacacccaaaacgtgaaaaaagcgcttgcaacgtgcggcaaactatgctatactgtacggtgcatgagacttttcacgtcacgacggcgtggatagaaatagaaggagtgctaatctaatgaactggtatgagatcgttctcggcgtcgtcctcatcgccgtgtccgtgttgatcgttgttttcaccctcgcgcaggagcagaagggccagggcctgtccggcgcgatcatgggtgaaagctccgccacgatggcagcaggccgtgagcgcggcgtggacgccaagctggccaagctgaccaagatttgcggcgtcgttttctttgtcgtcacgctggtcgtctgcgttttgagcgcgcgcctgtgattttggcagggtaacaaagatgaaaagggtccgccaagcgctttggctttgtaagcagcgccccggcgggccgttttttgtggatgttttttgtggatgtatataagggtagggcaccgtcggatggcggtgcgacgtaaattaaaggagcaactatgacaccgttacaaaaatctattttaaacgcagtcaagcgccgtcccatgacgctgcgcgaactgcagaacaacctgcaggtggacaactcccgcctgcgcaccaccgtttccgctatggtcgccaccggcgagctgtcgatgcgcaacggcacctatgtgcccggctttgcgacctatgagaatgctgcagcccccaacacgattccctgcacgctcgtcaagctggccgcgcgcttcggctttgccagccgcgacgacggcgagggcgacatcttcatcccgggccgcgcgctgcacggcgcaatgcccaacgataagatcaacgtcaagctgttcgaccacccgcgcgtggagggctcctccgagggcgaggtcgtcgaggtcacggtcccgaacaaccgctttgcgggcacggtctgcctgtccgaggatggccgcatggccgtggagccggacggctgccgcgacgtgaagttcctgctggccaagcaggggagcgagggcgtgcacctgggcgacaaggtcggcttcctcatcacccaccgcggcaaccgccacagcgaccaccgcgccgccgttgtcgagaaattcggttcctccgactatgcgtccgagtgcgccaaggccatcctgtatggccgcagcgtccgtcaggagttcccaccggaggtgctggaggaggcccacgcctacgacaacgccacgattgaccccgccgaggtcgcgaagcgcctggacctgcgcggcattcccatcttcacgattgactccgccgagacgaaggacatcgacgacgccatcagcctgcagaagctggacgacggctacgagctgggcgttcacattgccgacgtcagccattatgtccgccccggctccgcgctgaatgaggaagcgttcgagcgagcgacgagcatttactacgccgacaaggtcatcccgatgctgccgacccagctgtccaacggcatctgctcgctgaacgagggcgaggaccgcctggcgttctcctgtctgatgcgactggacgagaacggcgagatccgcagctacaagttcgtcaagagcgtcatctgcagccgcgtcaagggcgtgtacaaggagatcaacgcgctgctggagcccgaggagggtgttgacctgaccgacctcaagacgaaatatgaggccgtgcttgaccagctgcccacgatggacgagctgtaccgcaagcgcctggtcctgcgcaaggcccgcggcgccatggatatcgagtccaacgaggctaagctcgtcatggacgagaacggacgctgcatcgacattgtcaagcgtgaccgcggcacgtccgagtgcatgatcgaggagttcatgctgctggcgaaccagtgcgccgccaacgcgggccgcacgaacaaggccccgttcgtctaccgcgtgcacgaggcccccgacgccgagaagatggagaagctgtccgccacgctgttggcctgcggcctgaacgccaagttcaagaaccccatcccgacgcagctcgagctggcggccctgctggacgagacccgcggccagcccatccagatccccgtccacaccggcattctgcgcagcatgcagaaggcccgctacgccccgcagcccctgggccactacggtctggtgctggcggactacgcccacttcaccagccccatccgccgctaccccgatttggcgattcatcgtattttgaccgagatgctgaacggcgtctccgccagccagctgcagcgcgacttcaacgagtttgcccagcaggccagcgagaagtccagcaagcaggaggtcgccgccgtgcgcattgagcgcgatgtagaggacctgtacaaggccgagtacatgcacaaccatctcggtgaagtctacaccggcacggtggccggcatcacgccccgcggcgtctttgtcgagctggacaacacggtggagggctttgtccccgccgcgcagctctgcaagggtgaaccgcaggtcatcgacggcgtcagcatgctggacccgctgaccggcaagagctggatgctgggttcttccatgaagatccgggtcgccgccgccgatgtggcgctgggccgtattgattttgagtatatggtagagtaatttcccacgccatacaatagaaaactccctgtccgcaccgggcagggagttttttgcgtcttatatcaccttatgctccatccatttcccgcgggcaaaccgcacaaggaaacacaggctgcggcagatccagtcgatgaacataccgaaccagacgccggtcagtcctaagtggaactgcagaacgaagatatagctcagaatcacgcggaacagccacatgctgacgatgctgaccgacatcgtaaacttggcgtcgccgcccgcgcgcagggcgttgggcagggtaaagctcgtcgcccagaagaagatgctgaacaggttaaaccagtggaccacgtgggtacacatggcggatgcctccgccgagaggttgaaccaggtcacgacctcgggcatcaggaagaacagtgccgcgttcgtgacggtcagccccgtgatggcgatgccaagcagcgtgacggaataacgctgcgcctgctttttctcgcctgcgccaaggcactgccctatgaccgggatcatggcaagactcatcgtgttgccggggatgttcgccagcgtcgagaccgagtttgccacggcattggccgcgatggccgaggtgcctaaggtagacgtcaggctgctgacacacagcttgccgatctggaacatgccgttttccagacccgacgggatgccaatggacaaaatctgcatgatgggcctgcgccggggccgcaggtcagcgaagcgctgcacgcgcaggggattgtgcaggtcctggttctgccacaggatgaacaccgcggcgaacacacgcccgatcagcgtagccagcgccgcgccgataacgcccatgccgaaaccgtagatcagcagcgcgttgcccgcaatgttgatgacgttcatgacaaggctggccagcatactgatgcggctgttgccctgcgcacggaacagcgccgcgccgccgttgtacaggccgatgaaggggtaggacaccgcactgataaggaagtactgctgcgcaaaccgcatgacatcctcatcaatgctgccgaacaccatccgaaggatcaggcgggagagcagcatacagacaacacccaccgcaaccgtagagatgcccagcacgctgtacagctgggcggcgctgcggctggcgttttcctcatcccggcggcccagatactggctggcaatgaccgcaccaccggtagccagcgcggacaaaatctgaataatcaaaatattcaggctgtccacgagcgatacgctggagacagcggcttcacccacaccggcgaccatcagcgtgtcggccatgcccatcgtgacgcttaatgtctgctccagcagcaggggccagatcagggtgaacagcgcccgcctggtaaacaggggaccttgtgattttgcagtggctgtcatggtaaactcccatcctcttttacttggattttaccattagtatacagcaaaatctatgcgaaatcaaggatttgacacatgtacaaaaaatgcccgcgaacgctgtagctgcgccctgtacagcaaaaatttgcaaaaatcaaatcgcaaggattttgcccacttttgcggcggcaaaaagccccggccacaaaagcttgtggccggggcagatcatgcggcggcttgcaggagccgcagaggggcggtggttagaagtcgacctcggtgtcgtagtagcagcacttcagcagcttttccatctcctcctgggtcggctggcgcgggttggagccggtgcaggcatcggcaatcgcgttctttgcgatctcgggcagtctctcgaggaatacgttctcggggacaaagccctgctcggcggggtaggagtcggggccgtagtggccgatgcagtgcggaatgttcagatcgtcgttcatgccgcgcagatactggatgagcagcgcgaccttctcgtcgtcgttctcgccgcccaggtgcatcttgtcggcaatgacgccgtagcgtgccttggcggtgggatccttcgcgttgtaggcgatgaccttgggcaggtacatggcgttggctgcgccgtggatgatgtgtgcgccgtaatcggcaaacgccgcgccggtcttgtgggccatgctgtgcacgatgccgagcagcgcgttcgagaacgccataccggccaggcactgggcattgtgcatcgcgtcgcgcttatccatatcgccgttgtagctgccgaccagatccgcctggatcatctcgatggcgtgcagggccagcgggtcggtaaagtcgcagttcgcggtggagacgtaggcctcgatggcgtgggtcatggcgtccatgccggtgtgggcgacgagcttcttgggcatcgtgtgggccagctcggggtcaacgatggcgacatcgggcgtgatctcaaagtcggcgatggggtacttgatgcccttctggtaatcggtgatgatcgagaaggccgtgacctcggtggccgtaccggaggtggaggagatggcgcagaagtgggccttgcggcgcagcggcgggatgccgaacaccttgcacatatcctcaaacgtgatgtcggggtactcgtacttgatccacatggccttggctgcgtcgatgggggagccgccgccgattgcgacgatccagtcgggctggaacttttccatggcggcagcacccttcatgaccgtctccacggacgggtcgggctcgatgccttcaaacagctctacctccatgccggcctcttttaagtaggcctcggcgcggtccaggaagccgaagcgcttcatcgaaccgccgccgacgcagatcatggcgcgcttgccgggcagcgttttcaatgcttccagcgcgtgggggccgtggtaaaggtcacggggtaaagtaaatctagccatagggtttgcctcctttaaaaatagctctctctgactttgataattaaatgtcaaaatctgttattaacagtatacaccttatgtgtctaaacggtcaatcgacaatacagagaattttccggcgataattcagcattttgccagtggaacactcataggctgttctatggggaagggggcaggagctatgcgtccgatcacgccgcagcagaatacaaaaatgcgcctgcgcatgcggcttttggcggcggtgctggcggtggggtgtctgggcgggctgacggtgcggctgtttgtgctgatgctgcgcgaccccggcggctacgcggcacgcgccgccgaccagcagctgcgtggggccacgctgcccgccgcccgcggggagatctattccgccgacggtacgctgctggccgccagcgagacctgctggaccatccgcgccgccccgcgggagatggccgacgacgccgtagaaccggctgcgcgggcgttgagcgagattttagagctggactacgccgatacgctggccaaattcagccagcgaacctccaacgactgcctgctgcgccgccgcgtggataagacgatggccgacgccgtgcgggactggtgccgggcgaacggtgtggacggcatacaaattcggcaggatacccgccgcgtctacccgcagggggatttcatgggcggcattttaggctttaccgacgtggacaacgcgggcctgtgggggctggagctgcgttacaacgacgaattgaccgggcagaacgggcgtatcctgaccgccaagaacgcctggggctacgatatgccgacccactaccagacgctggtggacgccgtgcccggcagcacgctgacgctgaccatcgacgcgaacattcagcactggctcgaaagcgcactgtccgccgctgtgacggagcatcatgtagccgagcgcggcgtcggcatcgtgatggatgtccacaccggggccgtgctggcgatgtcctgccagcccgactacgacccgaacgcgccgcggacccttataaataaagaagtccgtgacgctgtgaatgccctgaccggcgaggagcgcagcgccgcgctgcagaaggcccagcaggcacagtggcgcaacaaggccatcagtgacctgtatgagcctggcagcgtgttcaagctcatcacagcgtcggcggcgctggactccggggtgtgtaaggccacggactatttcacctgcgcgggtaaaataaccgtcgcaggcacgcggttccgctgtgcaaacgggcatatccacggcaccgagaccttcgcccgggggctggctgtcagctgcaacccctgctttatccagatcggtgcgcggcttggaaaagaacgcttctgcgattactttgcggccttcggcctgcgggaggccacgggcatcgacctgccgggcgaggtcaggcgcagcgaatactacaccgcggaccggatgggcccggtggagctggcgagctgctcgttcgggcagagcagcaaggtcagctacctgcagatgctcacggcggtctgtgcggtggtaaacggcggcgagctgatgcagccctacgttgtggcgaaaatcacggcgcctgacggcactgttgtgaaggaagtgcagccgacggtgaagcgccgcgtcatcagcgcggagacctccgccacgatgtgccgcctgatggagggtgtcgttacaggcggcacgggtaagcaggccgcgctggcgggctaccgcatcggcggcaagagcggcacgagccaaaagctggacagcgccaacgagggcgcgcgcattgcgagctttgtctccgttgcgcccatcgacgaccccaaggtcgctgtgctggtctgcctggatgagccccacagctggacgacgagcggcggcgctctctccgggcctgtgtgcgccgaggtactgggaaaggtgctgcagtatctgggggtggagagggaaagcggcgaataaagacagccgggcacgggcggatatggaatccgcccctacgttgaatcgggaaagcgcagggtgacgaggctctgcccgtttgccgctgcactatacaaaaaactctgcgctgtccctcttgacattccccgatccggtgttatactggtaaagtacgcaaacgaacagttagaaagtgaacaattcgaaatctaacttcttggacccaaaaatcgtaaaggagggaagaaatgcacgaatcatcgtatgatgactgcggctgctgcgcggatgtccacttcggcgcactgctgaaccagacctcgcggctcatccgccgtgcgctggatgcccgcatcaacgccgaggtcagctcggagctgtcgggcgtgcgcggcatggtgctgggcgacatcgtccgtgccgagcgccagggccgcgacgtctaccagcgcgacattgagcagtggttcaacattcgccgctccagcgtcaccgccatgctgcagggcatggagcaggatggcttcatcacccgcagcgccgtggcgaaagacgcccgcttaaagcgccttatcgccacagagaagggccgcgcctgtcacaagcagatcgaggcaagcattgcgcggtttgaggatgacctgcaaagcggcattgacccgcagcaggccgccgcggcccgcgctgtgctggagcagaccctgcgcaacgcacagcacatcctgcaagaggaaaataccaaacaagagaggggaaataccaattgttaaaaacactcggacgtgaaaccaagggcttccgcctggtctccgtgctgacgccgatctttatgatcgcggaggtcatcatggaaatgatcatcccgaagctgatggcctccatcattgacaacggcgtcacgccgggcaatatgcaggtcatctacaccgtcggcgcacagatggtcgttgcggcgctgttcggcctgctgttcggcattctgggcgcggtggccggctcccacgcggccacgggctttgcccgcaacctgcgccgcggtatgttccgcaacatccagaccttcagctttgccaacattgacaagtactccaccgcgggcctggtcacccgcatgaccaccgacgtcaccaacatccagaacgcctaccagatgctgctgcgcatgtcggtgcgtgcgcccgccagcatgatcgtggcgctgatcatgtcctacacgatcaaccgtcggctggcaaacatctatttgatcgccgtcatcctgctgggctgcgcgctcgcctttattatgagccgcgccaccaagtacttcggcgaggcattccgcaagtacgacgacctgaacgagagcgtgcaggagaatgtctccgccatccgcgttgtcaaggcctatgtgcgcgagaagtttgagggcgagaagttccgcaaggccagcgagaatgtgcgcaatctgctgatgcgtgccgagctgattctggcctggaacgccccgctcatgcagctgaccgtctacagctgcatcctgctcatctcctggatcggtgcccagctcatcgtcagctccggcgcaacgaccttcaccaccggcgacctgatgagcatgctgagctactgcatgaacatccttatgagcctgatgatgctgtccatggtgttcgtcatgatcacgatgtctgcagcctccgccaagcgcgtggccgaggtgctggacgagcagtccgacctgacgaacggtgaggatcccgttatggaggtcagggacggctccgtcaagttcgaccacgtcagctttgcctataaaaaagatggcgagaaggccctcgaggacattgacctcgacatcaagtccggcgagaccatcggcatcattggcggcaccggttcggctaagtccagccttgtgcagctgctgccgcgtctgtacgacgtgaccgagggcagcgtgaccatcggcggcgttgatgtgcgcagatatgacctcgacaccctgcgcaacaacgtcgccatggtgctgcagaagaacgagctgttcagcggcacgattgccgagaacctgcgctggggcaaccccgacgccaccgacgccgagatcgaggacgcctgcaagcaggcctgcgccgatgaatttatcgagcgcttccccgacaagtaccagacccacatcgagcagggcggcaacaacgtctccggcggccagaagcagcgcctctgcattgcccgcgcactgctgaaaaagccccgcatcctgatcctggacgactccacctccgccgtcgataccgcgacggacgcaaagatccgccattcgtttgcggaaaaaatccccggcacgacggtgttcatcatcgcccagcgcatttcctccgtggaaaatgcggacaaggtcctcgtgctcgacaacggcagggtcagcggctttgacaccccggccaacctgctgaaaacaaatgccatctaccaggatgtctacaacagccagaccaaaggctccggcgactttgatgagaagggaggggaggcataatggcacagcagcctaaagtcgtaaaggtcggccccggcgggcgcagcaatggcccccgtcccaaggtcgaaaaccccggcaaggtgttcaagcgcatcctcgcctatgttatgagccgctataaggcacaggtcattgtggtgctctgctgcattctgctggctgtgttcgcccagctgcagggcgtcatgttctcccagacgctgatcgacagctacattctgccgctgctcaaggcgggcagcacggacttcagcggcctggccgcggctatcctgcgcgtggcagtcatctactgcgtcggcatcgctgctgtctttgtgcagaaccgcctgatggcaaggatcacccagggcacgctgaaggatctgcgtgacgagatgttcacccacatgcagacgctgcccatcaaatactttgacacccacgcccacggcgacattatgtcggtctacacgaacgacattgacacgctgcgccagatgatcagccagagcctgccgcagctcgtcaacacggttgtgaccctcgtcggcgtgctggcctcgatgctctatctgagcgtccccctgacggtgctggccctcgcgatggtcggcgtcatgctgctggcgacgaagtacctgaccggcaactccggcaaatacttcatcaagcagcagcaggagctgggcaaggtcaacggctacattgaggaaatgatgaacggccagaaggtcatcaaggtcttttgccatgaggaaattgccattgaggagttcgacaggctcaacgatgagctgttccacagcgccgacaaggcaaactcctattcgctggtagcaatgcccgtcaacggccagctgggcaacctgtcctacgtgttctgcgccatcctcggcggtgcgctggctatcaacggcttcggcggctttacgctgggcggcctcgccagcttccttgtgctgacccgccagttcaaccagcccatcagccagatctccatgcagctgaactccgtcgttatggcgctggccggcggtgcgcgtatctttgcgctgctggatgaaaagcccgaggtcaacgagggcgacatcaccctggtccacgccaagtacgaagcggacgatactgtcaccgagacgaacgagtccaccggcatgtgggcgtggaaacgcatggatgccgacggcaagccccggtacaccaagctggagggcgacatcgtctttaaggatgtggacttcggctacgacgagaagaagatcgtcctgcatgacatcaacctgtatggccgtccggggcagaagatcgcctttgtcggctccaccggcgcgggcaagacgacgatcacgaaccttatcaaccgcttctacgacatccagaagggccggatcctgtacgacggccacgacatcaagtccattgagaaggacgcgctgcgctcctctctgggcatcgtcctgcaggatacccacctgttcaccggcacggtcatggagaacatccgttatggccgcctgaccgccaccgatgaggagtgcatggccgccgcgaagctcgccaatgcggataccttcatcaagcatctgcccgacggctacaacacgatgctgaccggcgacggcacgaatctgagccagggccagcgccagctgctggcgattgcccgcgcggctgtcgcagacccgccggtgctgatcctggacgaggcaacatcctccatcgacacccgcaccgagaaacttgtgcaggacggcatggacggcctgatgtatggccgcacgaccttcgtcattgctcaccgtctgtccaccgtgcgcaactcggactgcatcatggtgctggagcagggtcgtatcattgagcgcggcacccacgacgagctgatcgcccagaagggccgctattaccgcctgtacaccggcaactttgccgagaactcttaagcgcagagaggtcgaaaaaagccgcaaaacggcataaaatcaatcaaaactgccgggatagcatctgccgtcccggcggtttttgtgcaaaatgccgcaacagcgccaaaaagttgacgggaaggtaaaaagtggttataataggatacgtagacacgcaaaaagcggtgtttgaccacgcggcatgagggaaactacaaacaagatttgccgcataatatacatgatatacctataggaggaacaaatatggcaccgaagaagattgcacagaccgtacttaccgagggtaagttctataccatcagcgccgccaacggcaaggtcgttgaggtcgctgactataacattgacaatggcgcgaagatccagctgatggacaacgccaactttgagtggcagcagtggaacttcgtcgcagcaggcgacggcgtttaccgcatccagaaccgcttcaccggcaagatgatggatctggacatgggcggcgtcagcgacggcacccgcgtccaccagtgggagggtgcccaggcatccagccagctgtgggtcgtggagcctaccaacgatggccgcgtcaagatcaagtccaacctggccggcaagctgctggaccccggcatggctaccgagaacggcaccgtgctgcagatctgggctgacgtcaacggtgacaaccagttctggaccatcaacgaggtcacccgcaagcccaagaccagcgtgaaggccaccaccgttaaggccaaggccgctgccgagaaggccgccaccgaggtcgtcaaggctgctgagcctgtcgtcgagaaggccgtcaaggctgccaagcctgccgctgagaaggctgtcaaggttgcgaagcccgtcgtcgagaaggccgtcaaggctgccgagcccgtcgttgagaaaaccgtcgaggctgcgaagcccgtcgtcgagaaggccgtcaaggctgccgagcctgtcgttgagaaggctgttgaggctgccaagcccgcagccgagaaggccgtcgaggccgtcaagaccgccgctgccaagaccaacacccgcaagggcggcaagggcaagcgccgcaagtaatttgctttgaactttttccctgcaatttttgtgctgtaacgagaaaaccccgccccgtcaggatgcagttcctgacggggcggggttattttttgtttgtggctgaaaagccttcccctacgggggaaggtggcccgaagggccggatgaggggcgagtgtgccagtattgcccgtgaacgagctgcggcggaaacactgccctcatcagtcacctgcggtgacagcttcccccacgggggaagccttcagacttaccccagcgccgcaatgctctccttgatcttggcggccttgtcctgggcggcagccagcttggcgcgggtctcctcgacgagcttcgccggggccttctcgacgaacttcgggttgttcaactggttcgtgaacatgcccagctccttctcggccttggtcagctccttgttcaggcgggccagctccttgtcgcggtcaatcagctccatcatcgggataaagcccttcgcgtcgggggtcgccacgttgaccatgccgtcggtgctgccctcgtactttgccgtgaccgtcacgtcggtggcaaaggcaaagcgggccagatacgcgccgcccttctcaaacgcggcgggggaggcagtctcaatgaccatgctcgtctttttggcggggtggacgttcatctcggcacgcatggcgcggacagccttgatgtagtccatcagcttctcaaagtcggcgcagtcctcggcccagaccttcatgttttcgtcgccgggccacttctcgttcatgatggtctcggcgctgccgggcagagcctgatagatctcctcggtgatgaacggcatgaaggggtgcagcagtttgagcgccttgtccagcacgtagaccagcaccttgcgcgctgcgtcggcggctgccgcgtcctcgccgttcaggcgggtcttgcagatctcgatataccagtcgcagtagacctcccagatgaagttttcgaccttctcggcggccagacccagctcgtacttgtcgaggttggcggtagcctcggcggcgaccttggcaagctcggacaaaatccatttgtcgctcatgtcgagcaggctttcctcgggcagacccggctcaaagtcctcgggcaggttcatctgcacaaagcgggaggcgttccacagcttgttggcaaagttgcggcaggcaaggactttttcatcgctgtagcgcatatcgttgcctgcggtggagccgatgatcagcatcatgcgcagtgcgtccgcgccatactgctcaatgacctccagcgggtcaatgccgttgcccagggatttggacattttgcggccctggctgtcgcggacaatgccgtggatcagtaccgtgtcaaacggtgccttgccggtgtaggccagacccgagaagatcatgcgggacacccagaagccgatgatgtcatagccggtgaccagcgtgttcgtggggtagaagtagttgtaatcctcggcgttctcgttgggccagcccagcgtggagaacggccacagggcagagctgaaccaggtgtccagcgtgtcggggtcctgggtcatgttggagctgccgcacttggggcaggtgcagggggcttccttggccacgacggtctcgccgcagtcgtcgcagtaccaggcggggatctggtggccccaccacagttggcggctgatgcaccagtcacggccgcccttcatccagttgatatagttcttggtgaagcgctcgggcacgaacttgatctcgcccttctcgacgctctcgatggcgggcttggccagcggctccatcttgacgaaccactgcttggagaccatcggctcaatgaccgagtggcagcggtagcaggtgcccacatcgtgggtcagcggctcggtctccttcagcgcaccgcaggcctccaaatcggccagaatggccttgcgggcctccagcgcggtcatgccggcatacttgccgcagtccagcacgtccggctcgtcggcagcagcgcggcccgccgccttctcggcatcgacggcagccttgtcggcagcgccggtcatgtggccgtcgtaggtcagcacacggatcatcggcaggtcgtggcgcttgccgacctcaaagtcgttggggtcgtgggcgggggtgatcttcacaacgccggtgcccttctccatgtcggcgtgctcgtcgcagacgatgggaatttcgcggcccagcagcggcagcacgacatggcagccgtgcaggtgcttgtagcgcgggtcctcggcgttgatggcaacagcggtatcacccagcatcgtctcggggcgggtcgtagccagctccagcatttcgccggtctccttgacggggtagagcagatgccagaagctgccctccttggcctcatactcgacctcggcgtcggaaatcgaggtgttgcagtgggggcaccagttgaccatgcggttgccgcggtagatcagcccctcgttgtacagacggacaaagacctccttgacggcgtcggagcagccctcgtccatcgtgaagcgctcgcgctgccagtcgcaggagcagccaagcttcttcagctggctgacgatgcggttgccataggtgttcttccagtcccaggcacgctccagaaagccgtcgcggcccaccatctccttggtcaggccctcctcgcgcatcttggcgacgaccttggcctcggtggcaatggacgcatggtcggtgccgggcacccacagcgcggcatagccctgcatccgcttgtagcgggtcaggatgtcctgccaggtctcatccatggcgtggcccatgtgcagctggccggtgacgttcggcggcggcatgacgattgtaaacggctttttgctgcggtcgatctgggtatggaaataccccttgtcgcaccagttctgatagatgcgatcctcggtgccctgcggggcatactgtttggcgagttccttcggcatagtgtaaacctcctcgtgaatgtgcggggcgtgatttttacatttggacaaaataaaaaaggccgccccatgagtttatcatgggacggcctgaaaagctcaagtcgcggtaccacccaagttgcccgatcgggccgctttgcggcaggccgacaagcccgcctgccctgataacggcggcaaccccgtgcgcggctggcaggggagaagcccctctcaccgcgcctgcttgaaagtgacagcacccgccgcaccgtaccgggcttgcatcctccccggcttgctgcaaaggtacgacgcgggcacactctttcgcactgcatttgtaccttataatgtaccgcaatgcggcggatttgtcaagggcgggtgcgcaaatctgtcgggcccctgggctcctgcagagagaggtgagctgtctgtcttactcccacttctcccacacctcggggcagtagcctacggtggcctgtctgccgttgcgcacaatgggctggcggaagagctgctggttctcgaacagcttgtcggcctgctggctctcgtcgagccatttcaaaagcgccagcgtgtccttgtcctttgcgttctcgtcgacgagctttgcccagccgcccacggcgcggcagacgttgtcgaactcgccgcggctcatgcccttttccttcatgtcgatcatctggaatcggatgccgcgctccttgaaccaccgctgcgcctttttggtgtcaaagctcttgttcgtgccgaaaatctggatgttcatggccattcccccgcaaaatacattctttgcattagaataccacaaaaaccgcaccctgacaacttgcaaggccgggcctgcagtatgagggaaactgcgggagaacgcttgctcttatgcgggctgcgtgctataatacaggtttatagaggagtatctataaaggagtattatggaaaaagaaagaaccagtccgtggctgatcttgttccgcgtggtatttacggcggcactgatcgcctgcattatgtttatctttcgcaactcactggaaaacggtgcccagtcgtccgcacgcagccaggccgtcatgcagttggtcaacagtgcgctggccaaggtgcatctcggcccattgtcggagcatctgatccgtaagctcgcgcacttttcggagtttgcgctggagggctttctgctgatgctctgcatccgcgtgtacacaaagcattttgtgcgccacatgagctggccgctgctgggcggcatgacaacggcgctgatggatgagaccatccagctgcacagcctcaaccgcacctcgtcggtggtggatgtctggatcgatatgtccggcgtcgtggcgggactgctgtttgcactcatcatcctgctgatcgtgcgcggcgttaccgcattcatccgcgtcaagcaggagaaccgcgctctgcgcgccgagagcgcggagctgcgccgccgcgagcatgagcggctggcccgccgcgccgcccaccgtgcccacgaggcacagctgaaccgccccgaacccgacgaggataactatgaggaggacgaagaatgacgacccaacaggcaattgaagccctgcacgccctgccgcgcatggggcagggcgcacccggtctggcccggatgcagaacctgtgcgaccatctgggaaaccctgaaaaggagctgcagtgcatccacattgcgggcacgaacggcaagggcagtcttgcggccatgacgtcctccatcctgacggcagcgggctacaagaccggtctgaccatcagcccgtatgtggtggacttccgtgagcggtttcagatcgacggcgagatgatcccgccccgcacgctggcaaacctgacggagaaggtgctcgacgcgattgacgccatcgaggccgagggcggcgagaagcctgtggagtttgaggccgtcactgcgctggcgttcctctggtttgcccgcgaaaagtgtgatctggtcgtgctggagaccggccttggcgggcgctgcgacgcaacgaacgtcgtgccccacaagctcgtggcagccatcacaaagatcggctatgaccacatggaagtcctgggagatacccttgataaaattgccgccgagaaggccggtattataaaagaaggaaccgtcgtcgtcaactatcccgaccagcctgcggaggctatggggccgatcctgaccgccgctgccgaggcgcacacaagcatcatcacgcccgacaaggacgatttgacgctgctgcgcggcaagcggctggaaaaccgcatcgattacggcggctatcgcgccgcactgggcctgcccggcacgcaccaggctaaccacgccgccatggctgtcgagatcgcgctggctctctggcgcgagttcggctatgatatttcggacgatgccattctgcagggccttgccgatgcccggatgcccgcccgcatcgaggtgctgcgccgccatccgctgctgctgctcgacggctgccacaacccggacggcgctaaaatgctggccgcgaccctgacccgcgccgactttgaggaaaacctcgtcggtgtgctgggcgtgctggccgacaaggactataaggatatgctgtccgatctggccccctgctttgccaaggtctacaccgtcacgcccaactgtccccgcgcattgagcgccgaggaattgcagaaggaggcacgcttccacaccgacgccgaggccgccgacagtgtggccgatgccatccgcaaggccgtggactacgcggacgagaacaacctcgcgggcgttgttgtctgcggttcgctctaccttgccgccgaggcccgcccgctgcttctcaaagaagcagaaaaataaccggccatcgccatttcaacaaaatacgcacccgtaagcctgtatcataacgatacgggctttttattttgtctcaacaccccctcccggaaattacccgttgatttttaactctccccgtaggggccgggtatgtccggcccgcaaccttcccaacactaccctgtatacccttataaatgaaaaaagaggacaaccctatggccaaagtaaccttcgtgcccggcagcggcacactggccgcctatttgagcggcgagatcgaccaccacgccgcccagacactgcggcgggagatcgatgcccaggtcgatgaccgcctgcccgagctgctgacgctcgacttctcgggcgtcaccttcatggattcctcgggcgtcggcctgattttgggccgcggacgccacgtaagcgcactgggcgggcggctgaccgtccagaacccgccgcgcgccgtgcggcggatgcttgacctggcccacataacctacgcctgaacggaggtgaacaccgatgaagatgctcaatcaggtaaaaattacgtttgcgggccgctccgtcaacgagggcttcgcccgcgcggcgctggccgcgtttcttgtgcagcttgatcccaccgtgccccagctcgccgatatgaaaaccgctgtctccgaggccgtgaccaactgcatcgtccacgcctacccggacaagatcggccccatcacaatgacggcggccatctatgagggcggcattgtgcgtattaccatcacggaccgcggcgtcggcatcccggatattgcgaaggcgatggaaccaatgttcaccaccggcgacgccgaggagcgcgcaggtctgggctttgccgtcatgcagagcttcatggacaaggtcaaggtctcctccacgccgggccgcggcacccgcgtgaccctgaccaagcggctggatgcccgcgcgtgaacccctacatatataagaggaggggacagtcatgcccacggatatgcaccagctgccgcgcgaagaatttattgagagaaacctcggccttgtccacgcctgcgccgggcggttcaaggggcggggcatcgagtatgaggaactctacgccgcgggctgtctgggccttgtgaaggcctgcgacgggtttgataccgggcgcggcgtctgcttttccacctatgccgtgccggtcatcctgggcgagatcaaaaagctgttccgagatggcggcacagtcaaggtcagccgttcgttaaaggagctgagccttaaaatcaatgccgagcgtgagcgctgcctcaagcgcaccggccaggagcccggcgtgaccgagctggccgagacgctgggcacgaccccggagcagattgcgctggccatccgcgcggccctgccgactctgagcctgacgcccgtggacgacgaggacggcctgcgggagtttgacgtgccggtggagtccccggaggaagcactctcggaccgcatcggtctggccgaggtgatggacaggctggacagcggtgaccgccagctcatccgtctgcgctttttcgcgggccgcacccagagcgagaccgcccgcgtcctcggtacgacccaggtccagatctcccgccgcgagcgccgtatcctgaaatggatgcgcgaacagctgttagaggcccaatgatacccccgacaagcacccgctccccttccaccctcccgtaggggccgggcatgcccggcccgcgcgctttcccataaccaccctctgatctttcacattgtagggaggggtcttgacccctccgcggcacgtcgaggacgccgccccccctacaaagatggcccgaaaccaccccacacccgcgcaccttccggccggcacccgctcacccttccgccaccccgtaggggccgggcatgcccggcccgcagcctccccgccgcctgccgtcaatcttccaccgctcacccattcccccaaaccacctaatcccgtaaccctcttgtagcccaccacccccataatttgtgcccgccaaccgccgtcaccccaatatacaccttgcccaaacttcgccctcaaactttgtcgaaaaaatcaaaaaaacttgcaaaaacctgttgacaaaggtcatactacttgctataataatcaagctgtctcgcgagcccagcccgcggcggcagccgctggagcctttacctacagcttgtacaccgttttttgaagaaaacttcttcaaaaaactttcagaaaacctcttgacaaacgagagaatctgatatataatatacaagctgtcacggaaacgcgacagcgcagcaggaccttgaaaattgaacaaaactgaaacttgtggaaccttgatcgtgggtttggaaacccacgttaatcaattccaaatttacaagtaattcatacaggacgcaagcgattgtgtctgagtgattacagcgatttaacactttgtaagtgattaaataccatttataaagagtttgatcctggctcaggacgaacgctggcggcgcgcctaacacatgcaagtcgaacggagtcaagaggagcttgcttttcttncgattgtgtctgagtgattacagcgatttaacactttgtaagtgattaaataccatttataaagagtttgatcctggctcaggacgaacgctggcggcgcgcctaacacatgcaagtcgaacggagtcaagaggagcttgcttttcttgacttagtggcgaacgggtgagtaacgcgtgagtaacctgccctggagtgggggacaacagttggaaacgactgctaataccgcataagcccacggcccggcatcgggctgagggaaaaggatttattcgcttcaggatggactcgcgtccaattagctagttggtgaggtaacggcccancttagtggcgaacgggtgagtaacgcgtgagtaacctgccctggagtgggggacaacagttggaaacgactgctaataccgcataagcccacggcccggcatcgggctgagggaaaaggatttattcgcttcaggatggactcgcgtccaattagctagttggtgaggtaacggcccaccaaggcgacgattggtagccggactgagaggttgaacggccacattgggactgagacacggcccagactcctacgggaggcagcagtgggggatattgcacaatgggggaaaccctgatgcagcgacgccgcgtggaggaagaaggttttcggattgtaaactcctgtcgttagggacgataatgacggtacctaacaagaaagcaccggctaactacgtgccagcagccgcggtaaaacgtagggtgcaagcgttgtccggaattactgggtgtaaagggagcgcaggcggaccggcaagttggaagtgaaaactatgggctngattgtaaactcctgtcgttagggacgataatgacggtacctaacaagaaagcaccggctaactacgtgccagcagccgcggtaaaacgtagggtgcaagcgttgtccggaattactgggtgtaaagggagcgcaggcggaccggcaagttggaagtgaaaactatgggcttaacccataaattgctttcaaaactgctggccttgagtagtgcagaggtaggtggaattcccggtgtagcggtggaatgcgtagatatcgggaggaacaccagtggcgaaggcgacctactgggcaccaactgacgctgaggctcgaaagcatgggtagcaaacaggattagataccctggtnaacccataaattgctttcaaaactgctggccttgagtagtgcagaggtaggtggaattcccggtgtagcggtggaatgcgtagatatcgggaggaacaccagtggcgaaggcgacctactgggcaccaactgacgctgaggctcgaaagcatgggtagcaaacaggattagataccctggtagtccatgccgtaaacgatgattactaggtgttggaggattgaccccttcagtgccgcagttaacacaataagtaatccacctggggagtacgaccgcaaggttgaaactcaaaggaattgacgggggcccgcacaagcagtggagtatgtggtttaattcgaagcaacgcgaagaaccttaccaggtcttgacatccgatgcatagtgcagagatgcatgaagtccttcgggacatcgagacaggtggtgcatggttgtcgtcagctcgtgtcgtgagatgttgggttaagtcccgcaacgagcgcaacccttattgccagttactacgtaagaggactctggcgagactgccgttgacaaaacggaggaaggtggggatgacgtcaaatcatcatgccctttatgacctgggctacacacgtactacaatggcgtttaacaaagagaagcaagaccgcgaggtggagcaaaactcaaaaacaacgtctcagttcagattgcaggctgcaactcgcctgcatgaagtcggaattgctagtaatcgcggatcagcatgccgcggtgaatacgttcccgggccttgtacacaccgcccgtcacaccatgagagccggggggacccgaagtcggtagtctaaccgcaaggaggacgccgccgaaggtaaaactggtgattggggtgaagtcgtaacaaggtagccgtatcggaaggtgcggctggatcacctcctttctagggagtcagacagtgtgatttagctggtctaaatgacactggacaggaaagcaagtttcagtattgttcaattttgagggtcctgcgggttcatcccgtaaacaaaaccctcaaagcataagggacagcgaaacccgaaacgtgaaaacgcgggggtatagctcagttgggagagcacctgctttgcaagcagggggtcaagggttcgaatccctttatctccaccatttgggctgatagctcagctggttagagcactcggctgataaccgagaggtcgatggttcgagtccatttcagcccaccacaggttgcctgtg

SEQ ID NO: 31 - DNA, 236302 bp, Gemmiger formicilis
  source 1..236302: mol_type = genomic DNA
agcgtgcgattttatacggagcgagtatccgacaacggatgctcttgtttgctataccaattttcaccaccttaaaatttctctcgaaaattttgttttggggcttgacttttaatagttagtctttcctcgaaagatatatgaggtgtgcaccccatatgccataccggaaaaaggttagacttcttccttttactatggtgaagaaattatagcatactgtaatctgaaattccagtgaatatctgcgagaaagatattaaatgacaaaaattgtcataaccgacaaatgaaaaagacagcgacgaatgaaatttaacaagacagggatttgacgggaaaatgttataataggatgcccatataaaaagggaaaacggcaaaaaatgtgcgtttctccccgcgcggttgaaagccgcccggcagtgtgatacaataaaagccaaacaggaaagtgaggagaagcggcatgcagacctgcaatattatgggcgtgaacatcgccgtcaccgacatggacaaaacgctgcgcctggtggaggacaactgcgaggtatggcgcgggaaatatatctgcgtggcgaacgtccacaccaccgtgacggcccacgacgacccgacctatctgcgggtgcagaacggcgcggtcatggccctgccggacggcgggccgctgtccagatacagccgcaagaagggctttgccgacgccgcccgcgtgacaggccccgacctgatgcgcgagcttttgaaggagagcgggacaaagcactaccggcactatttctacggttccacgcaggagacgctggacatcctgcgcgaaaaaatcacggaaaagtaccccggtgcggtcatcgcggggatgtactctccgccgttccgcccgctgacggcgggcgaggatgcggagatcgtggagaagatcaacgcggcaaagccggattttgtctgggtgggcctgggcgcgccgaagcaggaacgctggatggccgcccatgaaaaccgcgtgcaggcgctgatgctgggtgtcggcgcggcctttgactacgaggccggcaacatccgccgcgccccggcgtggatgcagcgctgcaatctggaatggctgtaccgcctgatgcaggacccgaagcggcttttcaaacgctatttcgtgacgaacaccaagtttttgtggtggagctggagacactaaggaaggctcccccctcggggaaagccttttgcgagcatcgcctctttttatgggtggcggtgctcttttttgtttgtttatacgctcttttcggttttccacgctctgcggcaaaaaacagcgtgcgggggtggtatagtgcaaagcgtccgagacatatactgtacatttacggagggcttgcacgatggctgtactgaacggggaacgtatgcacgacacaatggaaaggctgctgcccggggcgcgaagtgcggcgctgctgtggcagggcgcggcagtgctgggcggcgcggcgctgggggccgggcaggtctacggcggggctgcgccgtttgggctggcgctggtcatcggctgcccgccgtcctactgcctggccgcggcgctgggtacgctggcggcggggctggcattccagccgatgctgctgggcgtcaagctggccgtggctgccgtggctgccgcggcggtgcggcggctcatcgatggccgccccggggccggggcgctggcgggctgcctgacgctgacggcggcgcaggtgctgcaaatcgtgctggcggggggacttttcaacccggggcagaccgtcacggtggggtgtacggcgctgctggccgcggtttttggctgggcgttcgcgcattttccggcgcgggagccgcgcggcgtctgcctgtggctggctgtggctacggcatgcttacagcgctgtgccgtcgggcccttggctccgggcctggcgctggccgcgggggccgggctgtgcgcggccatcggcggcacgctggagcagaccgccgtgctgagcattgcgctggcggcggccatcacggcgtcggggccgacactggcctacgccgcgctggctgtggcgctgggcagtctggcggcgtcctgcctctgtccgggggagcggggccgctgcgccggggtgtttgcggcgggctgcaccgcgggggcactggccgcgcccgacgctgtcagtgtgctgccgctggcggtcagtgccggggtgggcgttgtggctgcgctggctgtgccggggagcgtgctgcacaaaattttcccgccgcccgcgccgcccgtgcagacgcagggcctgggcggggcggcgcgcaagctctccgccgtggcggacacgctgagcgacattgccgacacggtcaacgcggtctgccagcggcagctgccgcccaagggcgagacctttgactttgtggtggagcaggtcgcccgcacgacctgccagagctgcacccgccgcagccggtgctgggtgcgcggctacgccacggccatggacgggctgtaccatttgaagccgacgctcgagagcaagggccgcgtggaggtcgaggacctgccggggcagctggcggggtgcatccacccggcagacctctgtacagcggccaaccacggctaccggctgtggcgcagccgccgccagacccgtgcccgggctgtgacgctgcgcgccgccctgaccgagcagtacagcgcactggccggggcgctggcccagctggcgggcaagctgggccaggccggtctgcccgacccgcggcgcgaggcccgcgtggcgcagctgtttgccgagctggggctggacgcgctggaatgcagtgtgaccgctgatttggccggtcggctgaccgcgaatgtgacgatctgccgcacgcggttcacccccgacgaggtcgcgggcctgaccgacgagatgacccgcatctgccgccgcgacatggatacgcccgaaatcacccactgccgcacggtcacgatgctgtgctttggcgaaaaaccgctgtttaccgttgaattcggcgcggcggcgcacgcagccggcgggcagagcgtcagcggcgacgcgctggaccagttctgcgacacgagcgggcgggcgcagatgcttttgtgcgacggcatgggcacgggccgtgccgccgccgtggacggtcagatggcggccaagctgacggcacagctgctgcgcgccgggttcgcagcggagagcgctgcccggctggtgaacgtggcgctcggcctgaagggagccgagcaggaggccggggcgacgctggacctgctgacggtggacctgtacaccgggcgggccgggctgttcaaagcgggcgccgcaccgagctttctggtgcgcggcggcgtgccgcggatgctggacggtgcaagcctgcccatgggtgtgctggacagtctggtgggacggagcacgacgtttgcgctggacgccggggactgggtcgtgctggtcagcgacggtgcgctggccgacgggagcgactggctgatgcagcaattgcagctctgcgccaaattgggccatacgccgaagcaagccgccgagaccgtggctgacgccgccgcccgccgcgccggggccaagcaggatgacataacggtggcggtgctggcgatggggagagcagggtaaacaggagggagccctgtaggggcgggcactgcccgcccgcgccgtttgcggcagtggaacagcgcccgggcggatatggaatccgcccctacggctgtagggggcgatgctcgtcatcgacccggagggcttccgctgacgcacacctcctgcgggcgagcaatgctcgcccctacagaatgtaaaacacgccccgcggttcaaaatgaactgcggagcgtgttttgggtttaaaatagcttttgctttttggtgggctgggggtcgaagggggtgtcctcgtggtggcgcttgataaagacctggcgggtcttttcggtcacgctgcgtccgttgtgcttggggacagagtagaatgtccgggtgatgttgtagtaccccagcaggtgctgcaccagatattgtgctacggcgggcagacaatcggtgtcgtcgatggtctcgtaattgtagtcgccgtagaggaacggcacctcgtcgctgccggcaaacagcgtgatggcggcctcgtccaggacgatctcccggatgacgctctgctgcaatcccgcggtgccgcactcggcggcgcgcttcgatgccagtgggcgctgatccagcggcacgctctgggggtcgagcttctcggtgccgcgctggccgatctccagcaggatgtcgcgcatcatgcggctctccagcagcgggcggatgcgttcctttgcgcgggcttgttcagttttgttctggatggtggtaatcaggcccatgggggcgcctccttgcaaagtatgacgatttgataacagtataccacatccgaaagcaggatgacaaccgttcccggttgtaaaattccgcaaaattacccgacgacgagcacctgcagactggccgtgccgtgctgtacggtgtagcggtctgtgatggtaaagtgctgctcaatccaggcgtggaattcggccatgtcgcggacctcggcatcatcgtagaggatgacgtcgggctgcttctccggcaaaagcgcatagtactgttcaaaacgcgggtcgctgtcggtgcccgagatgacggacgcctgcgcgacggtcagcgtgccgtctgccatcagaaagcctaggccgtgctgctcaccgatggcctggagcacgctcttgcccgcatagggggcgagggcttcatacaggcattcctgcatgtcggcggccttggtgtcggcccaggtcccggcggcggggccgcgggtgatcctttcgggctggatggccgtgatcggctcacagtgccagccggtctccagcacaaggcagagcctcggcacggcacaggccagcaggagcccggctgccagcgatgccgccgcggcgcggtgccgccgggtcgggcggggcttgagcagcagcgctgccgttccgcagaccgcgggccagaacaggtacataaaggtcgttggcagcgcgatcagcgtggagcgcaggataaacaggtacgccgctatgccgggcagccagcccagccagaacagcaggcggcgcagggggcggtggtcggcctcgcgccggtcacaccagaacgtccagccgccggccagcgcgaacgccgggcacatgtagcggaaatccagctcctgcgcgcgcaggcagtaggccgtgcaccagagagagaggaagaacgctgtgtaccaaagcgccttttcaaggctgcgggcaaagccgcggcgctcgccaaagagcatcccggcggcggccagcgccacaccggccagggccgacagccagcagttgccgatgacggcggaaagctgggagcggagcatggcaagacggtccgctgtggtaaaatcatactgtgggtcgtgtaaaatcaggtcggcgcgtgcgagcagagcggcgaaatcaaagcccatgccctgcaaaacatacacgacaaacgcaccgccgcagacggcacaggtcagcacaaatacccagagaccgcggcatttgtcggcgctgccgcggcccagcaggagcagcgccagcatcagcaccggcgcggcagcgagggtctgcgggtaggcgaggaagctcagacaggcgcagacgccgcccgccgcgacccgccacagaccgcggtactgctgcgggccgggcgcgtagtagccgtacaaaaacaggaacgccgccagcgtaaagtggaactgctggctgacgtagtccggccccaaaaaccacttgggcgtgaaggccagcacggccagcgccagcagataggcgcagcgccccccgagggccacgcgcaggctgcggtaaaaccagacggccagcgcgagcttgacagccagcacagcgccgcgcacaaacagcagcacgccggtggtcgtgcccgcgacggcggtaaacaggccgatgagcaaagcgggcggcagggcggccagctggtgcggctcccacatcgagtaaaagagccggtcaccgcgcacaaggcggaagccgagggacagggcgtactcctcgtcgatctccagccccaggaacattgtgcggacgagcgcggccagcgccagcaggcccagcagggcaaggatgattttttcaattgtcggttttttggtatggctcatagatcgtttttaaaatcaatgcggcggcgcagcagcgtgtcgcgcgccagccagagatagggcagccagttcaggcggagcgcctcccacttgcgctggacaaaattctgcggcctggcagcgcccttgacgctttccacgttgatgcagcggcttttttgcagcacaagaatggcctcatgcccggtgggcgtttcctccggcgtgcagtagtcgggcggcaggatgcggaattttccgggcgtctcggcgaccaggcggttgagctggctttcatcgtgaaagcgcgcaatgacgttgttttgcagatcctcgtccgtgcgctttttcagctcccggcacagggccagataggccgccgccgtgccgccgttcagcccgcccgccacgtaatactgcccgcagctgtacgggatggacgcccggcttttgccgctgcggtcataggggtggaaaatcggatttttgccatagtagggcaggtggcagaccgcggtcaggctctgcccggcggcggggtcgggcagcagctcgtcggcacggatgacgcgggtgcagtgcaggttggcgttggcaaagaacaggtagtcatagccctgcagcgcgtcggcctggccgaggaaggcgtcaaagcgcagcatcgtgctctgcggccagggcagggccttctgataaatgcggcgcacgtcgggggcgtcctcatagtcaatatgcgctgcatcggtaaaaacgtagaaggtgcggtcacagtcaggcaggaaatttgccttgaagttggggtaaaaatcatgccagaacaccgcgtaggggccggtgcagatatacaggatggcgagagttttcataagatcaccacgttatttgcctccctcgcgtgcgaggaaggtggcccggagggccggagggagggcggcaggcggaaggctcccccaccgcctgcgggcggagccccctcccagagggggccaagaagggaagtcactttttcagcagcttcttggcaaccttgcccgcgtactggcgcaggtaggcggcatctttgccccagccgtagacggcgaggttcagggcgttgggcacgacgaggacgacgaaaatccgcggcacaaggccgagccagccgccgggcatccgggcgcagagcgcgtagctgccgcccatgcagacggccagcgtgaccagatgcagcgcctgcacgccgagataatgcccgagcccgccgcgcatgtactggcggaacacgacccggatacgcccggcccacatgatgcagtgggcgacgacggtggcgatcagcgcgccggtgatgtcgaacagcgggaacaggataaagctgagcgccagattgaccgtggccgacgcgaccatgaaccactggtcgtcctcaaaatggccgaggacggcgcggtaactgccgagcatccggtggttccagccgacgtactcatttaagcagaacacgagcacgaagcccagcggcagcagccatttttcgcccatccaggacgccatgaacggctggaacaggcagaaatacgccgtagctacgaagctggcaaacaggtagctgaacaggtccatgccccagaacacctgcttgtcgtggtcgttggcggcggcggacttgtcgtagacgatgctgccgatggctgcggcgaagctgtccatgaccttgttgccgaggtctgtggcggaagtcgagatcgtgttgtagttgcctaaaaacgtcgtctgggtcgagccgcccaggcgggaggtcacgatggtgtcggacgagccgtagatggtgttggacaggcggtgcaccagaaagtaccgcagatcgtggaaaatgccgaggtctttaaaatcgttgaccgtgaccttaacgtcgtgtacgtagggaaaatccttcctgaagcggcgggcaatcagcaggttggccgtgacgttgaagaagatcgtcacgctgaaatagagcacgtagttggggaaccacagtgacacggcaattttggcaaggctcgtcagtacgttgcagcagaagtcgatctgggtgcagcggtagccctgctgggtgcaggtgtacatcaggcggcgggttatcagaaaataactgcacagcgttgaaacgacgttcaggccgtagaccgtgtatgccgtggcggcgggcacgtcaggcatgatccaccgcagggccgccgcgccgatgagcgccagccccgcaatgaccaggccgacgacgcggtaggcccacttgtacatcgacatgtacttgctgatcttttcctcatttttggcggcgatttgctcgtagagacgataacttatgacgctgccaacgccgaactcggcgatggagaaaaagttgaaaagctggctgacgacctgcgatgccgtggtgatctgcgggccgaagttatcgacgagcagacgccgcgtgacgaggcccagcagcagaagcagcagactggacccgagggcgtaggccatattcagtagggtacgtttggtacgcaaggttaaatctccgtttttaaataataaataaaaaatgataaataataaatgtggtgcggcgccgcgcgccgcgatttaaaatagtggacggaaagcagagaaatgggctgtgcaggcagggcgcggggcgtcggggacgccgccccctacagcggaggtacacacgcaatttaaatcacgccgccgcgggcggcgtacatgattttttacttattatttattattttttatttgcgttgaaggcttgccgcccaaagcgtgaaccgcggcccgaaggtctgcatcatccaccggaacagccgccagtcgcggcgggtgcggacctcggtgccgtgggggtagagcgggcgcagctgctcgatatagggcaggcaggccttgcggatggcggcgtccttgaccgctgccgtgcgggcctgcggccagaaaacgtctgcagcggcatcctgcatggcggcgtaggccgcggcgtccgccgtgccgttggcggagagcctggccaggcggcgctgtgcggcggcaaggccccgaaagcgtttgggcagatttttggcatctgtcaaaagactgccctgccgtccgacgcggtagtgggtgaaaaccgtgtccaggaagtagagcctgtcgcagtgcagcagcagctcaaggtcaaagggccagtcctcggcccagacgcagtccggcagaaagcggacgcgggcctgctccaaaaaggaccgccggatgcagtatttccagaccgaccagtgcccggcagtgtacagggccttcagccgcgcggcgtagtcgctgctggcaaacgggccgggcaccagatgcagaccgtcgtgcggggtcagcgtgccgtcgggctgccattcgagatgcttgccgatgaaccagtcgcagtccgggtgggcggccagcgcaccgcgcagctgcgccaacaggccgggggccatggcgtcgtcactgtcgagaaacagcagccagtcacctgtggcggccttgaggccggtgttgcgcgccgcggcaaggccgccgttttcccggtgaatgacctgcaggccgggcagctcggcggcgagggcgtcgcacatcgcgccgctttggtcggtggagccgtcgtccacaaggatgcactcccagtcgcgcgggccgggctgctcgaccacgcttttgacgcaggcggacaggtagttttgcacgttgtagacagggatgatgatggaaaagagaggcataagtgtctccttgctataaagccttcccccgagggggaaggtggcccgaagggccggatgaggggagagtgtgcgctgcaagctgttagcgggtgatgatggcgaggtttgccctcatcagtcgcctgcggcgacagcttcagtctccgcgtcaagagccgcctacggcggttacgcttcgacacgcgcctgcgggcgcagccccgagggggaagtctttataagctgccatccgtcctgatacaaggctgttttctttgtgtgcgcataccatttatccggcgcccaggtttgtttatcgggggcgggggcaaggtactgcgcccaccagctgtaggtggagttgctcaggacaaagccgcggcagagctgcatgaaggccaggtcggcgacggcctcgccgcggggcaggaacacggcgggcagacccgcggtgtccagatgctcccgcgcccagtcgatgtcgtcggaaaagacaaacagcgcggcgtcggggtgttcgtccctgaccgctgcgacagcgcgggcgtagtagtccggcgtgcagacctgtaagatcgcgttctcgggcttctggtagtcgccgcggcgcagatggacgcagacggggtacgcggcggcggtgatctgcgccgcatagggcccggcgggggcggcttttgcacgcagctcttcctttataataggggcaaaatccgcaaagtagcgctcactctggaagtacccccacgcgaggaaatcgcgggcgtggccgcggcgggcgggggtgtagccgtcggtggcaaagtgcaggccgacggcgttcagcagcggggcggcggcagcctcaaagctgtgccagtcgcgggccatcaggccgcggcgctgctcatacttgatcatcagcgccttggcggcgttccggcgcggcaggtgtgccttggcaaagcccgcgtcggcaatgattttgacgtccggtgagatgttcagtgcgtccagcgcgcagaccgtgtgcgccggggcaccgtcgcgccagtcctgccggtccagcagggtgacgggctcaccgcagcgcagacccagcgcccgcgcaaaggcgtagatgaacatttggttgccgaggcccccggccagttcggcgtagatcatgcgtgtcctcccagtttgtcgtacagctgctccatgcggcgggcagcggttttcagctcgtacccggcggcggagagcgcggcccagtggtcgtcgtggtcgccgtgggcggcgatggcctcggccttggcggcccagtcggtcagcggcgcggccagcggcagaaaatgcacaaggtcggtcaccgagccgtcgtcgggcacgttggtggacgccaggcacggcacgccgcagccctgcgcctccaccagggtgacggggctgccctcaaagttgctgggcagcagaaacaggtcaaaggcgttcatgaaggcgggaacatcgctctgcacgcccgcaaagatgacgcggtctgtcaggccgcggcgggccgcggcggcgcgcatttcaggctccatctcgccggtgccgacgagcagcagcttccaatgcgggtcctgcgcggccatcgcggcaaagacctccatcaggaaaagcggatttttctggtggttcagccgcccgacgaacccggccagccggtccgcgtcggtaatgccccaggcggcgcgggtcgcggcgcgggcggcggcatccgggtgaaagcgcccggcatccacggcgttgcaggccacggaaaagttcggcttagcgtcgatatggtcaccgaacacgaaccgccccgccgcgacgccgcagccgaggaagtagtccgcgaacagctggtacaccagatgggcggcgcgccaggtcagcgtcatgggcgggtagacgatgtggctgtgcaccacgattttagcccgggggcagagcacgcgcatcatgccgcagaccggggcaccgatcttgctggccgtgtggtagtggatgatgtcgtagtccttatgggtgcgcaggtgggcggccagggcgcggatgcggtcctttttgttatccggcacggcgaggatctcgacgccgtgagcctcgagcgccggggccgtgctggcctggtccggcgggcactgaccgacgaaaagggtgacgcggtatttggcggtatcgaggtgcaggagcaggttctggacataccgctgtacgccgctctgcacgccgaggtggttgctgatcattaagattttcatggtggtctccggaaaaaataaaagataagagagaaaagataatagaagtggagcggcgcgcggcgcaattttaaccacaggggagtataaggataaagcgatatgcagggaaggttgagggccggacatgtccggcccctacgggcaggctttttaagacgcgccgtctgacggcgcacatttttattatctattatctcttatctattatctgaaaaattaccagtagctcccgccctcgaccttttctttattgctgatgccctcggtctcgtcgggacggacccaggcggggttgtagagcttggaaatgacggggtggtcgtcccagcgcttgcccttgatgccaaacaaaagctgcgtggcaccgctcatttgtatggcggcgtggccggtgtcgcgggcgtgggcggccagcggcaggctgtaggcccctgcgccgacgatggcgacgtcgtagtcgacggcgtccatccggcgctccatctcggtcagggcgtcaaaccagtcggcgtagccggtatcctgcccgcccagaccctgcacggcctgaatgaccgtcaggcaggcaagctccggcagcacgtctttgccgggaaacagctgggtacgctttttatactgggctaaaatcgtgcggcggaacgggtgtacgacgagtacccgtttgcctgcgagggcggcgctccacgggcgggcgtggtagtagggctccaaggcgcgcagttcggtaaagcgggtcgcgtcacagccgcggatgacctcccgctcggccccgacgttccagagggcgagcagctcggcgctctgcgcagtcttgacgtagagacggcagaatttgtccagcgtggcatcgtcggtgggaaagacgcccgacagattccgaatgtccgcccgcgtgcggtccgtgaagttgtgcccgccgttttgcagccagtcggccacggtgcgcatctcggtggcaccgcagcggccaaacaggaacggctgaccgctctcgagcaggtcgcgcgccaggtcgttgccggcagcggcgggcaggatgtccacgccgcggtatttcattgtaaagcgcagaccgcggtagaggtcggcggccttctgcaaaagaggattgtcgttatccattggcttttccctttttgggcagcagggtcagggccagctcggcactgttctgccacagaaagttttcgttcacgcggctctgggcggcgtggcccatggcggcggtggttttgtccagcgctgcggccagctcgggcacggtgccgcacagcaggccgctgatgccgttctcaatgataaggtcggggccgggggcgtggcgcgccaccggcgggcagcctgcgtacatggcctccagcaggctcatgccgaaaatctcattcgggttcaggttcacaaaagcgtcgcaggcatgataataaacgtgcacctgctcattgggcagctgcgggatcaggcggcagcggtccagcaagcccgcgtcggtcaggcggcgggtcagctcatcgcccagtgagccttggccgatgatgatggcgtaccagtccggcgcggcctgcaaaagcggcacaaggtcgagcggctgcttgtaggggtcaaggcggcccacaaagatgaacacccgcgcgtgctcgtcgattttgagcgcacggcggatctcggtgcggttgttggggatggacgggatgatggcggtgtccagcccgacgggcatcagccccgcgcagggcacgccgaggctttccagctcggcggcgacggcgggggttttggcgtaggtgggcgttttgcggtataccgccagattgcggcgcagcagcaggtccatgaccctgcgcacggcggcgtggttggaggtacttttcagcgcaccgagctggctgtaaaacaggatgccgtgcttttggcagaagcggtacagccccggcacgccgagagagttgtcgcccatgacgtggacggcgtcggcatgctcgtcgagcagaatctgccagcttttatagaatgcctgcacgccgaaggcgacggcgggcatatagcagatttttacgtttggctccggggtctcgatccggggggctttagcgcccggctccgggtagagcacgacggcgcggcagccaagcgcggcaaaggcgcgggccaggccgacctcctgccggttatacaggcccttctggcccgacggcccgcggtaaaattgcggaatgacgatggttttcatgaatggatgattacctcttttggggtatagagaccgtaggggcgaacatggttcgcccgtggccgtttgctatgtgcgcagccttcccggaaaatcaatgcggcgtcaggttggcgggcgaacaatgttcgcccctacagagcgcgattttttacggttttgcttcggaaacggtttcgacggctgtctcaatcttcggcagccttgtcagataccttgcgtcgatgatctctaaaacgtcatcgcggcagtaggtgtggatgccgatgatgtccgcgggggcaaggccggtgatctcgacattctgcggcgtggcggcgcacagaggcacctccgagctgccgcggcgggcgagaaactgcagatagaccccgtagtccacggtggtgctgacctgggtgggatggatgatctgctcacccagcaggaaaaacggcccggcgttgcggctgacaaggtcaaagtcgcggtgctgcagattgtaggcttcatcgggcagcagctcaaacgggccgggcgcggcgggcagcgtgtcctcggcaggcagcgggacggcggcggtctcctgtacggcgtggcgcagcgtgtagcggcggtagcgcacatagagctggttgtcggggcgggtctcgctgcaaagcagggtcagggcctcggcgcggcggtccagcaaaatcgtgtcgcatagctcctcgtccgtgggaaagcgctgcaccagctcccattgggtggggaaggtcttgcagcggtagagccgcaggctgtggtcgctgccggtctcgggaatcatccagacctcaccgttccagtcaaagaccatcgggaacgacaggtggaaatcttcttccagcgagacgcgccagtcgtcggcggtgccgtcgtcgtgcagctcgcagacctcgagacggcccttgccggtggagaggtccatcgcctcggcgaacagccagcgcttgccgcgccggtggtagagcagcgggtcggcaaaccaccagccctcccgcccgggcagcagggtgtaggggccgccttccagagcgggcagcggctcggtgccctcggcagtggggcgggggcgcacggcgatggtgtagatttctttttcgcccatgactttgcgcagcagccgcttgggcggcatgtgcagggcgcggtaaaactggttcatgatacttcctcggcggcgcggcggccgtatagttttagcagggtcttgtagttttcctcggcgctgaagcggcggcaggtggcgttggagatggccgtgcagtcaaactgcatggcgctcatggcgcggacagccccggccagcgcggcggggtcgccgggggcaaagcacagcccgttaaacccgggccgcaccgacgccccgacattgccgatgccgctggccagcaccggcgtgcccagcgcgtgggcctccgccgggacaagggcaaagctctcatagcagagactggcggcgacgacggcgcggctctcggccatcaggcggtgcagcgcgtcccgcggaagctggccgacgaattgcaccttgggcagattctgcgccttggcccagtcggccagcggaccgtccccggccacaagcagcaacggtgcgtccctgcccagaatgcgccatgcctcaatgacggtgcgcagaccctttagctcctccaagcggcccgcaaagacgaactgacgcttgcgctcctcccagggggtgacggggccggagggcacggtcacggggttcggcttgacgacaaggcgattttcgtcgaaggtgggatggatcttattgaattccagcagcttttcccggtcaaactcggtgggggtggtgatggcgatgccgcgccatgtgcccagcacccgatgcagccagtaggcggccacgacgacgagcgtctgcgcccgcctgccgcggtagcagcggtgccgcagtgcgcagtgcaggccgtggtgcgggcagtcctcacagacccgtccgtcccgcagtaagatgccgttcgggcagaacaggcggaagttgtggagcgtcagcaccaccggcacgccgcattttttggcggcgcgcacaacggcaggactgaggagcagcagcgtgttgtggatgtggacggcatcgatgtgctgctgttctatgatattccgcacgtcgcgggcggcccggcggttccagacggcgcgaaaaggcagcagcgccttagccgcgccgtgggcggcctcctcattgctgcgctcatagacgacgacggtgtggccgtgctgctccagcagggcgcgctccgcggcaaagacggcgtcctcgccgccgggcagccggtaatgacagtgtatcagcagaattttcacgcagccgcctcctcttgcagacaataaacctattatgacattataccctttttgcggcgctttcgcaacaaaaaaagaggaacgcagtgcgtccctcgcggtaaaattactggtcgtcgtcaccgtggagctgggcctcacggatggccttgatttttttctcgatgtcaaagctcttttccagtgcggggtaaatggccatcaggctcagcaggcagggcagccacaggctggttaaaatcagcacaaagctggaaatcggccagaacagcgccacagcgccccagtacagcagctgccacagcaggcctaggccgctgcggggcaggtagcccaggaacagcatgagggagttcttcaacagtccggcgaaggacaggtcaagcagcgcgacctgcacgtagaggtactgggcaatgccggccagcaggatgagggcgaccagcacggtgatcacggccacctgcccgctggcaatgtcgatgtggcagagtgagaaaagctccatggccagcagcaggccgcagacagcgccgggcagcagggattccttcaggttgcgcttccaggtgcggcggtaggtctcccaccagtagccgggctcgtcgcgcagcgtgcgcaggatcgtgtcgttcaggccgacgatctgcggcgcggcgatcatgccgcccagcacgcccgcgatgacgagcgggaccaaagagtgggtctcgacggcgaaccagacaccggcggcaaacggcagaccgccgagcatcgccagtatgccggccagccagatggtggagaagtcgcggcccaaaatctcaaaaaagcgggcagcgccctttttgcggggggcgtcgggcgatacgcccgggccgggtttatcaaaattgcgcgtgaaaagtcccatgatacaatagctccttatggaatgatgttgggggaaggggggcgcggcggcctttcgggtcgatgcaagcatcgacccctgcgccgtaggggcggattccatatccgcccggggtgtttgccgctgccgcaaacgagcacgggcgaacattgcccgcccctacaaagtagttggcccgtagagggcggcgccggattggatcagaatgtccggctcgacgcgcaggccggttttgcggcccttctgggcttcgacgagaaaaagccagggcgcggcgtcggggcggttcttgacaaaagccagacgcttcggctcaaggtgcgcggcgcgtaaggcggccagaatttccgccaactgctccgggcgctggcagagcaggaaccgcccgccgtcccgcagggcgcggcgtgcgcagtccacggcgtcggcggtggtgcagctgccggtgtggcgggcctcggcccggcgcgggtccgggctgcggggaccggctgtgaagtacggcgggttgcaggcggcaaaatcgtactgtccctgctccggcccggcggtgcagagctgccgcaggtcgccgcagaccggcgcgatgtgcgcggcgtcggtgttttcggccagagccgcggtgcagagggcggacacggcggggtcgatctccagtgcggtgcaggggccgcggtgcccggcgtcgtgccaaacgagtgagacgatgccgcacccgctgcacaggtcgagcgcacgctcgtttctgcggggctgcgcgaagcgggccagcagcagcgcgtcggtgccgaacgtcgcgcccggcgcggtcagcacgcgggtgccgttgtccagaatttcaacgcccattcagacttttgcgcgcagctgcgcgtatttaagcagcgcgacctgggtcttgctgtctttgatcgtgccgtccatcacaaggccgagggcctcgtcgaacggcattttgacgacgtcaaggaactcgcccgcgtcgaggtgctgcgctgtgctgtgcaggccggtggcggcccacagatagattttctcgctgtcatagccgacggtggcatagacgacgccgaggtcgataaaattgtcggcggtcaggccgcactcctcgctcagctcgcgcttggcggcctcaaacgggtcctcgtccgcttcgagcttaccggcgggcagctcccaaatctcctcgccgaaagcgtagcggaactgacgtaccatcgtcacgctgccgtcggcgtccacaggcaggatgcaggcgccgccgtggtggtggacgatctcccgcgtcgaggtcgtgccgtcctcaagctgtaccttgtccacggtcacgcggatgacgcggccattgaagatttccctgctttccagcatggtctcggtatgtgccattgtttttctcctttgcagaaagggccccgccgtacaggcaggaccgatactgcttctattttacagcagacgcagacaataatcaataaagtcgagcgtatatttttgactgcgcagccaatcagaggcgtggccgtcatcgaggtaggtcagcagggcttcggtcaggatggggtcctgcatcagatactcgcggcagtactgcccgtccggctcccggatagcctggcagaacacaacgccgcggccctgaaaaacattgacgcacatcgacggagtcagcgccagctgggcagggtccacgatgcgcagggtgcggcggtcagactccgcagcgcggcgcagccgcaggagcagctcccggcgggtgggaatgtccggcgcatcgcacagatccggcggaatgtcgaacattttcccggtgcgtacaaactgcaaaagaccttcctcacagaaatagaggtccggggcctgggcgctccacatctgcaggtgttcgagcagggcgggcagggactgcagcgcggcgccgggccgggcaagctgcagggccattttctcgtcggcaaacagggtgaacggcggctggtagcggatcatggagcagcggcgcttttccgaaaagaggtcgttgtacagcgcaatggattccgaaaagtcgtgggcatcggtggcgagcttcagcaccgacgcggcgttgatatatttgcggctgaacgcaaggcgcagattatcgacggcctgacggtccatgatgatgtaggccttctggccctggatgtccatcatgacggcggccttgggcagcagcagatagacaggcatcagcgtgccggggctgggctcggtcatgacgctgggcacgacgcgggcctcgtaattcagcttgggcaggaaaaggaacggcagtgtgcgggtcaggacggacacgccggacacccattcccggggaatgtcgcggttctcggcataaatcagcagctgggacagtgcgacgggtgcgccgtccgctgccgaaaagcgttctatcagcacatggtccagcatggggtttgtgaacggcgagaggagcagcgggcgggtatcgccggacagaatgtggttggccaccagcgatgccacggcggcggcgactgcgcggctgccctctatgtactgctcgccgcagtgcagctggctggcggcttcgttggagataaggccctcgcggtgggtgaaatcctccacccggaaagagacctccagcaggtggtgcagctcggcgcgcagcctgggatcggggccgcggccacgctgcttgtattgcagcagcagggcggatttctgttcctcgctcaattccagcgcgtcggccaggtgctccagctggaactcccgcggggtgcgctgaccgcttacaattttgtacagcgtggatcggtcgatcgacgctttgcgggccagctcggccattgtgccggggtagcgggtgacgaatatcttcagggtctgggtcagttcgctcatgggggcggcctccatttatggaatgctattactataccgcgaaagtgccgcgctggcaagtgtaaacttttttggtacatcgttgcgatatgccgggaaatttgttataatctgggaaagtgaaaacgaggtgaccgttatgaaaaagcatcctcttttggcggcaggggccgcggcgggcacggcggtgctgggcgcggcgtatgccgtctaccgcgttgccttttaccagaagccgacgacgaaggtgccctccccggcggatatgcccacgcgggagtgctaccgcaaggccatgggccccgacgccgacgcgctggcgcgggatacgttcaaggccgtacacatcacggcgcaggacggtacgccgctggccgcacgctactaccaccacgccgacggcgcgccgctggcgatcatcttccacggctaccgcggctatgccgagcgggacggcctgggcggctatacgctgtgcacggcgctgggctacaatgtgctgctgcccgaccagcgcgcccacggctacagcggcggccatacgatcacgatgggcgtgaaggagcgctacgacgcccgcgactggacggtctgggcgcggagccgcttcggccccgaggtgccgatctttttgatgggcgtctcgatgggtgcagccaccgtgctgctggccgccgggctgaacctgccggacaacgtctgcggcattgtggcggactgcggctacaccaacccgcgggagatcacccgcaagtgcctgccggagtatctgcccggcatgccgctggagctgacctatgcagttggacggctgggcgcgatcctgttcggccactttgaccccgaggacgccgactgcgaggccgccgcagcgcagagcaaggtgccgattttgtttgtccacggcgacgcggacggctttgtaccctatgatatggggaagcgcaactatgaagcctgccgcgcgaagggcaagaaattcttgacggtacacggcgcagagcacgccgtgagctactaccacgacaacgacgcctacacgaagcaggcaacggagtttttgcaggattgtctggcccggcgcggctttgtatggccgcccgagaccggcgagcctgaaaaataatatagaggagtgtttagtattatgaagcgtattgctaccacgaacgcacccgccgctctgggcccctatgcccaggccgttgacaccggtgacaccgtctattgcagcggccagctcggtctggaccccgccaccggtgcattggccgagggcgtgcaggcccagacgcaccaggcgctcaagaatctgcaggctgtgctgcaggaggccggtctgacgctggacaatgtcgtcaagacgacagtatttgtgcaggatctgggggatttcggcaccgtgaatgaaatttacggcagctacttccacggcggcttccccgcgcgcagctgcgtgcagatcgccgcgctgccgaagggagcgctcgtcgagatcgagtgcattgcggtgcgtgaggataaaaaggctggcattccaatcgttgatttttaatttgtggggggcggattccatatctgcccgggggtgcttccgccgccgcggacggcgcgggcgcatatagaatgcgcccctacggaggctccgtgaggggaaatcgcaaatgggaaacgcggatttgtagggaacggtcttgaccgttccgggccgtgagtgccgatcgcaaagcgccgcggaggggtcaagacccctccctacagaaaaagataaccggcaggccgttgaatcgaacggtctgccggtttcggttatttcccgtagcttgccaaaaactgccgggtgcgttcctctttggggtggtcgatgagctccttggcgtcgccctgctcgacgacgacaccgccgtccatgaagaggatgcggtccgcagcgtcgcgggcaaacttcatctcgtgcgtgacgatgatcatcgtcgtcttgtgctcggccagctcgcgcaggacgcgcagcacctcgccggtcagctcggggtcaagggccgaggtcggctcatcaaagcagaggatgtccgggtgcagcgccagtgcgcgggcaatcgccacgcgctgctgctgcccgccggaaagctggtgcgggtagtggttctcacggtcagaaagccccatctgcgccagcagggcctttgcctgcgtttcaatgtcggccagaatctgccgccggttctgcttgtagtcggggcgctccttcgccaggagctggcccgccagcatgacgttctgcagcgccgtgtactggggaaacaggttgaagctctggaacacaaggccgaagtgcagacgctttttgcggatggcttcttcgctctgcgttttggtgtcggcggcgctccacagcgtttcacccgctaccgtaatgctgccggtgtcggcggtctccagaaagttcagacagcgcagcagcgttgttttgccggagccggacgagccgatgatggcgagagcctcgccctcggccagatcaaacgagatgtcgcgcagcacctttgtggcaccaaagctcttgccgatgccgtttacttccaacaatgccatagccgcgcccccttacttgaaatagtccagccgcttttccagccagccgaacagcagcgtcagcgcaccgacgaacacgaggaagaacaccgctgtggagaacagcggccagatcaggcccttggcgctgtactctttcgccatcatgatgatgtccttgttggcgatgacgttcgccagcgaggtatccttgaccagcgtgatgatctcattgcccatgggcggcaggatgcgcttgatgacctgcaggagcgtgacgcggaagaaaatctgggtctttgtcatgcccagcacctgcccggcctcggtctggcccctgggcacagcctcgatgccgccgcggtaaatttccgaaaaatagcaggcgtagttgatggcgaacgccacgacggcggcgaccagacgcccgctgccgccagacggccatgggctggtgaagcccagcagaccgggccctaagtagatgaccaggatctgcagcatcagcggcgtgccgcggatgacccagacaaacgttttgacgacgccgcgcagcggggcaagcctgctcatggagccgaacgacaccaccagccccagcggcagtgcgaacaatagagtcagaccgaacagctggcagttgagccagaacgcctcggtcaggcggccccagatgactgctgcctcgcccatcagtcggccagcgtcaggctgtacttgtcggccagggcctgcatcgtgccgtcggccttcagctcgtcaaaggcggcgttcacggcgtcggcggtatcgctgcccttgcggaaggcggcgccgtactcctcggcgttcagctcgtccttgatggcgaggtttgcgtagtcggtgccctcgccgatcatggcggtggccagcgtcagatccagcacggcggcgtcagccgtaccggcggcgacctccatcaggcagtcagtctggacggacttactgacgtagtcggcctgggagagactttcgtcctcgctgatggcgctctcaccggcggaaccggcctcggccacgacggtcttgccgacaaggtcggcggtggagctgtaatcggcatcggccttcatgacgacgacctgcgcgttcttggcataggccttcgtgcaggcggcgttggccatgatgtcatctgtcagggtcatgccgttccagatgcagtcgatgctcttggcgtccagctcgacaattttggtgtcccagttgatctcaacaaagtcgggctccacgcccagcttttcgcagacggcagtggcaagctcggtgtcaaagccggtgaaattgccgtcggcgtcagtgtagttcatcggctcatagacggtgtagccgatggtcattttgcccttgtttttgatgtaggcaaggtcgctgtcggcagtggcttcagcggcggaagctgcggtgctttccgtagaagctgccgtggatgcgctgccgccgcaggcggacaggctcacggccatgccgagtgccagaacggtgctgatgaattttttcatgatacttcctcctatactttgcacagatccctcacactgccggtttaaagcggcggtatgctttaatagtaatgcaaaaccgcgggttatgcaagaggtttggggggatttttgcagaaaaaagaatgtttatgcaggggagaggcggcaagctgcggcttgacaaagggacagcacagcgttataataagtatagaaaaaggcactgcgacaagcggttggtctctttccaatgaaagttcttatttatcacctaagaaccgtcacttggccgagtggcggttcttgctttttacaacgatgctcaatgtaatagtcttgcgaccaacataaaacgtgaatgtaaaacgcatgatctcacctcctttcggagggtagagaccaaccgcctgccgtatgtgcagtgcccgccgcataaagcggcataaaaagaataccatgtttcgacggtttttgcaaccgggaaacatggcattttttattgcgttttttacttgatgacccgtaccatatcgcgggtgatagcgtccagcgtgggcgcaccgcacaggcgcatcgtgtcggccagctcattgccgagctgggctgtgtaggcggcgacgccgtcggcaccggcaccgtagacggcggtgacgaagggccgcgcgatcagcacggcgtctgcgccgagggccagcgccttgaacacgtcgctgccggtgcggatgccgccgtccaccagaattttggcgcggccatccacggcggcgacgatgtcggccagcacctcctgcgtggcggggcagtcgtccagcacgcgcccgccgtggttcgagacaacaatgcccgcggcaccagcctcgatggccttttccgcgcctttgacggtcatgatgccctttaagataaacggcacgcccgcggccagggcaatttcttttaactgctccacggtcttgctgcccgcgggcgggtcaaggtgctgtaaaaacggcaggcccgccgcgtcgatgtccatggccatggcaaagcagccggagctgcgcgccagcgctattttccgggccaccgtggcgttgtcccacggcttgacggtggggatgcccgcgccgccgcaggccgtgatggcagccgccgcgccctccatgaccttgtggttcgtgccgtcgccggtgaaggcagcaatgccggccgccgcgcaggcggggacaaggatattgttgtagtccaggtcgttgtacttgtcgccgtagtgcagcgtcatggcgccgacaggcccggcaaagaacggatatttgaagctacggccaaacagcgtcagggaggtgtccggctcaaaattttcatggatggtatccatgttcagccgtacattgcgccaggcgtcaaagttgcggacggccaccgtgccgctgcccttggcaccggggccggggatcgtgccgccgcaggcgcggccgttgcagaccgggcaggcgcggcaggggcccatctgaccctgggcagcctgtaaaacttctttatatgtcatctggattttgcctcctgtgttgcgagccgatgcgagcatcggcccctacaaaaatcgggtaattatgctccgcgcccattatagcgcgttttgcccgctgccgcaaggccgctgacgacgacaagtgcgcacagtacacagagccctgcgcccgcctggccggtcaggtcgcccacaaggcccacaagcgggctggcggggatcatcagcagactgtaggccatgctgtccacgctgatgagcgttgcgcggcggtcactggggatcgcgtcgttgagccgctgcatactgtgcaggaaccagacggagagtgccccctgtacgagtaccggcccagcggcgcagagcagcgccggggccgcgcccgccagaagcgtgcctgtgccgacgagcagcgcacagccgaaatagagcgcacgcagccgtttggggtgcaggcggcggcccagcgatgcgcccgccatgcctgcggccccggccagcagacccggcaggaacagccattccatggcccagccctgctgggttagccgctgctggacgaacatcgaggtcaggtaggacggcagcgagatgaccgcatcagccatgataatgagccgcgccggtgtgctgctgcacaggcagtcgagactgtccaaaatgtgcacacgcagccgggcgggcaattcttgtaagatgtgcttctcgcgggcggcctgttcgtcggtgacgacaggttcggtcaggttggccgcggccaaggcggagacggcgctgaccgcggcgtccgcaaggtagtagcccgccgaagtcagcaccccggccagcaggctggccagtgcgccgagggcggaggctagcttcatgaagattgacactttggcgtcaactttaatgtagtcacgctcccgtccggcggttttcaggctgtcgtaggtcagggcttccgtggtgccggagagcaggttgtagcccagcgctttcagccccatgcccgcgcagatgaacgcgagactgggcgcaaacgccatggtggcggcggagacaacgcccagcgcaccgccgaagatcagcgtgcgccgccgccccagcaaatcggcggccatgccgctgggaacctcacacagcaggctgacgccgtggaaaacgccctcggccaggccgatctgcgccagcgtaaagccgcgggccgccagcagcgcgacccagacggcgtcggtgaagcgcagggtagaggtaaatgcgtgcagatacacgcagcgaagctgcttttgtaaattcatggggaacaccctttcatgatcgtatacgaaaacgtgcccttaaatttttgtaaaaaggcagcaaaaagcgccccgcggcaaagccacagggcgcaaaaactgcacacttacagcgttaccgaggtaaaaaagggcacacttacagcgtcagtaggtcaggggtttccttttttctggaacacaacaccaaactgccaacgcataaggagtgctctccttcctcggtggatttgggataagtatagcacagcgtttgccaaatggcaagaaaaattgtacaataggggcatgatttttgaaagctaaggggaacgggtatgaaacgtctggtcgtcgggctgctggcacatgtggacagcggcaaaactacattggccgaagggctgctttaccgcgcgggggtgttgcgcaagctggggcgcgtggaccacagggacgcctttcttgacaccgacagccaggagcgggcgcggggcatcacgatctttgccaagcaggccgtgctgacgctgcccgcagcggacggtgccgacgagaccgagctgacgctgctggatacgcccggccacgtggatttttccgccgaggccgagcgcgctttgcaggtgttggattacgcggtgctggtcgtctccggcaccgacggcgtgcaggcccacaccgagacattgtggaagctgctggcacgttaccgcgtacctacgtttgtatttgtcaacaagatggatctgcccggcgcggatgccgccgtgcgcctgcgggagctgcgcgggcggttcggggacgggtgtgtggatttttccgccgcgcccgacccggaggcgctggctctgtgcagcgagccgctgatgaacgaggtgcttgagaccggcgcagcagcggcagaaacgatacagaccgctattgcgcggcggcaggtgttcccggtgcttttcggcgcggcgctgcggctggacgggctggacgggctgctgcacggcctgcagacgctgacccgcaccccgccccggtggccggaattcggcgcacgtgtgttcaaaatcagtgaggatgcgggcacgcggctgacctggctgaaggtcacgggcggcgtgctgcatgtaaaagatgtgctgcccggcggcgagaaggccgacgcgctgcggctgtacaacggcggtaaattccggctggtcagcgaggcgctgcccggcatggtcgtggccgcagcggggccggtcagtacgcggcccgggcaggggcttggcgcggaatccgacgccgagacgccgcttttggagccggtgctcaactaccgcgtggactgtgacgctgaaccccataccttattaaaggcgctgcaaacgctggagggcgaggacccgcagctgcacgtcaactggcgggatgacctgggcgaggtacacgtccagctgatgggtgaggtgcagctggaaattttgcagacgatcttgcaggagcggttcgggctgaccgtggcgttcagcgagggcggcattttgtataaagagacgctgacaagggcggtggagggcatcggccactatgagccgctgcgccactatgccgaggtacatctgctgctggagccgggggcgcggggcagcggtgtgcagctggcggcggactgcccgcccgacacgttggccgaaaactggcagcggctgatcttaacgcatctggccgagcgcacccacccgggcgtgctgatcggtgcgccgctgaccgatgtgaagatcacgctggcggcgggccgtgcccaccagaagcataccgaaggcggggacttccgccaggcgacctaccgcgccgtgcggcagggcctgcggatggccgaggcgaaggacggcgtgcagctgttggagccgtggtatgattttacgttggagctgcccgccgacgcgctgggccgcgccatggccgatgtgcagaggatgtgcggcagctttgaggcaccggagacgtcaggcggcacggtgcggctgacgggccgtctgcctgtggcgacggcgcggggctatgcgcgggaggtcgcggcctacacccacgggctgggccgctgggctgtgctgcctgccgggtacgacgcctgccataacgccgacgaaatcgtctccgccgcggggtatgaccccgacgcggatgtggaaaacccggcggattcggtgttctgcgcccacggggccgggtatctggtcaaatgggacgaggtgcccgctcgggcacatctgtccaccgggctggaacggcggctgaacggcgagacggcgacagaagaagccgacgctgaggacgatgccaacgcgcgccgccgccgtgccgacgcctaccgcggcacgctggagcaggacaaagaactgttagcgatttttgaacgaacctacggaaaaataaagcgacgcggtgagacgggcgacgcgaaaaaggcggcccgagcggccctgcacacggcccccgcggcggcgtccgtgcccgcaaagcccgtgcccgccgggccggactacctgctggtggatgggtacaacgtgatttttgcgtgggatgatttaaggaaactggccgacggcaatctggacgccgcgcggcgcaggctgatggatattctgtgcaactacgcgggctaccgccgctgtgtgccgatcctggtttttgacgcctacaaggtgcgcggcggcgcgcgggaggtagagcagtaccacaatttgtatgttgtctacacccgcgaggccgagacggcggatatgtacattgagcgcgcgacccacgagctggcgaaggaacaccgcacccgcgttgtcagcagcgacggcgcggagcagatcatcgtcatggggcacggcgcgctgcgcgtgagcgcccgggcgtttgaggaggaagtcagggccgtggagaaggagatacgggagtttctgggggaataaaacgaaggggaggggcgaggcatgcctcgcccgcagcttacccatgagatggagctgatgggaaagctgcgggccgggcatgcccggcccctactttttgtgcagcggaaaactttcagaaaccctgccgtgctatactggcctcaacgaaagggggaaaacgcgatgcttccgattttaatcgtggatgatgagccgcatattgccaggctcattgagatgacgctggagccgctggggcagccgcttgtgctggcctgcgacggcgagcaggccgccgacctgctggaaaagcagcagtttgatctggtgctgctggacgtcatgctgccgggcgtggacggctttgcactgatggactacattgcgccaaccggcacgccggtcatctttctgacggcgaaaaacgccgtggcggaccgggtgcgcgggttgaagctgggcgcgtatgactacatcgtcaagccgtttgccccggcggagctgctggcccgggtcgagggacttctgcgccacaccgggcggcgggcggcgacgctgcgggtgttcgatgccgaggtagacccggacaaccgcaccgtgacccaaaacgggcgcgcggtggagctgaccccgcgggagtttacgctgctgttggttctggtgcgggcgcggggacaggcgctctaccgtgatattttgtatgagcgggtctggggccccgacgcggagccgaacccgcgggcgctggatctgcacatccaccggctgcgcaaaaagctggactgggcggacaagatcgtgaccgtgccgaaggtggggtataagctgctggcagaacggtaggggccgggcatgcccggcccgcgggctgcaagacggcagaccgtgaatgggtcatggcggaaggctgccgggccggacatgtccggcccctacatggcggtaaatcaaaatgaatcaaacaaccgggaaaccgcaggaggtgactttatgaagcgtacatccatgtacacggcggtccttgcactctcgctggcaatggcgctggcgggcggcgggctggcgtgcaggacgttccgggaacggctggacgcgctggaggaacaggcggttttgcagcaccagcgcaatgtctgtgggctggaggacgcctttgccgccgagtacgatgcccggagcggcgcgggctatctgagcagcggtgccgactcggtctgcgcccgggtagggcaggcgtacacccgcggccagtggctgatcctgggcagcagcactgccgcgtttgcgctgatgcgggagggcgacgtcgcctacagcgccctgccggagagcgtggccgccgccgatgcgcagcaggccgccgcggccacggacggcatcctgctgcgcggggagacgctgctgctgggcggggtgctgaacacgccctactcctaccccgtggccgtcgtcacggcggcggatgcgtctgaggcgttcgccgcgcgaaaccggcttttgtacagctggctggccgtgcaggcggtcatcacgctggcggcgctggtcgcggcgtaccactatgagcgtctacaggagctgaacgcccgccagagccgctttgtggccgacctgacccacgagctgaaaacgccgctgaccagcctgatcggctacgccgacctgctgcgcggcggcacgctggatgcggaacgacggcgcacggcggtggaggccctctaccatgagtccgcacggctggagagtttgagccagcagcttttggcgctgaacggcttgcaggcggacggcgtggtgctgcgccctgtgcgggtggccgcggcctttgccgatgccgtgcgcagtctgccggatgtggtgctggactgcgacgcgcctgcggaggccgttgtgctggcggaccgggtactgctggcggaccttgtgcgcaatctggcgctgaatgcatggcacgccgggccgcaggacggcgcggtccacctgcgctgcaccgacgcgggcgaatgctggcggctgaccgtgcaggacacgggctgcggtatcccggcggaggcgctgccccacctgaccgagccgttctaccgcgtggacaaggcccgcgcccgggccaacggcggcagcggcgtggggctggcgctctgcgcacaaattgcggaggcattcggcacgcagatgacctttgcaagccgtgtgggcgagggcacgacagtgacgattttattgcagaaggaggcagagcatgaagaagcagcgcagcaacaataaatttttgaaaattgccgcggtaagcctggctctgctggcactgccgccgctggccgtgtacgggcagacggtgcgctgccgtgcggcccagccgcggcccgccctgcccggcgtgatgagcgacgagatacgcctggaccccgtggccggggcgctctaccgttacggcgtgcagggcggcatcaatcgggcggacagctattggtccgacaatgtctttaccgtactgcgcggcaagctgaagcaggccaccgcgcggggccttctcagtcgggagcagcttgactacctgctggaccgcgtggccgagggcgaggcccacgccgggccggtgcagccggaaaacggcagcgtgcaggtccagtgctacgggtgcagctacacgggcaatatccagactgtgagcttccggatgtacacggtgaacgcctacaaggtgacggaaagcggcgagatgtacagtatcgacgatgagacgagcatcgagctgatgtatctgcccggcaacggcgcgtttttgcaggtcggcgtccttgacaaccgactgcccacggcagagagtacaccggaggagcaggtgcaggcgtttttgacccagctggacacaacgctggacggcagctgggagcagaccaccacggaggacgggctggaatataagcatacctccggtgtgctgcgggtcgtgcgctatgccccggacgaggtcgatttcgctctgtgtgtcacgctggaccccgacgtctacggcggcctggacacgctgagcaatgtggtcatcggccccgatgggacgatctacacgccgggcggggaatatggaactttttgaaaaggaagaaaagcgccctgcacggtaaaaaagtgcagggcgctttgcggtttcagttggcgctgttcaggcggtagccgaccttgtagacggtctggatgtcgttttgcaggccgagcttgcggcgcaggcggttgatatgtacgtccacggtgcggctctcgccgataaaggcgtagccccaggcggcctcgagcagctggctgcgacttaaagctgtgtcgcagtgggtcacgagcacggccagcagggcgaactcccgcggggtcagcagcagctcatgcccggcgcgggatacgcggtgggcggtaaggtcaacggcaaggtctttatacagaatatcctgtttgcggtttatgatgggattcatagcggggcctccttccggcaggatgttttttgaaagggtgtactgtctattataacgacaaatgtttccgagttgttacaaaatgcgggaaaatttggacggaatttttacttttgtttaaaaatagacgaaaaagttgacggctggggcgaaagggaaaagcctctcaggccatcgctgcgctcggccacctcccctaaaaggggaggcttagcgtgtcgaaaaacctccctctgcgagggaggtgccccgaaggggcggagggagagaaccttgccatagcccgaaatatttcggacagccgtacagttctctcccccaccgcctgcgggcggagccccctcgcagagggggccaaggggtgagcacacctttttcgacagtctgcggctccccagaaaggggaggctttgtctccggttttccacatttcaacaaaccctgtctatcgtgctattttgtgggtttgcacggagttttccacagtttcaacatggttttccacatttccacagtggaaagatgtcgaaaacctgtgcaaaatgtggagaaagcccgccgcggcgggattttttgcggttcgttcaaagttgtttcacacgttgttcattttttgggagcatgctataatagttacaaaagataaggaggaggcattccctatgaaagagacgacacagccgccgaaggaccccaaaaagaagctttggatcggctatgcggtcattttggccatcgttattttaagcaatgttttcctgttcccggctttgatgcaggcgagcgtgaaaagcgtgaactacagcaccttcctgcaaatgctggagagcaaggagctggccaccgtccagatcgaagatcagcagatctactttgtggacaagaacgacaattcctacaaaaccaacgccattgcgcaggacaacaacctcgtcacccggctggaggatgcgggggtggagttcggcacggtttatcagtcgcccacgatctgggattcgctgctgaacctgctgatctcgttcctgccgatgatcatcctgttctggttcgtcaaccgctgggcgtccaaaaagatgcaggagatgggcggtgccggcggcaacgccatgctgttcggcggcaaatccggcgcgaagcagtacgtagtggacgatgagaccggcatcaaattcaacgatgtagcgggcgaggacgaggccaaggagagcctgcaggaaattgtagacttcctgaacaaccccaaaaagtatgaggagatcggcgcgaagatgcccaagggtgtgctgctcgtcggccctccgggcaccggcaaaacgctgctggcccgcgccgtggccggtgaggccggcgtgccgttcttctccatcgccggcagtgagtttgtggagatgttcgtcggcatgggcgcgtccaaggtgcgcgacctgttcaagcaggcaggtgaaaaagcgccctgcatcgtctttattgatgagatcgatacgatcggtaagaagcgtgacggcggctccaaccttggcggcaacgacgagcgcgagcagacgctgaaccagctgctgaccgagatggacggctttgatgccacgaagggcgtcgtcatcctggcggcgacgaaccgcccggaatccctggatcctgcgctgacccgcccgggccgttttgaccgccgcgtgcccgtcgagctgcccgatctgaagggccgcgagagtatcctgcgcctgcacgctaagaaagtcaagctcggccccgactgtgactttggtgttgtggcccgcatgacgcccggtgcgtccggtgccgagctggctaacatcgtgaacgaggccgcgctctgcgctgtgcgccatcaccgcaaggccgtgacccagttcgacctgcaggaggccgtggacacgatcctggccggtgcgcagaagaagaacaagatcctcaacaataaggaaaagtgcatcgtctcctaccatgaggtcggccacgcgctggtggcggccttgcagacgaacagcgcccccgtgcagaaaattaccattgtgccgcgcacatccggtgcgctgggcttcaccatgcaggtggaggacggcgaccacacgctgatgacgaaagaggagatcctgaacaagatcgcgacgctgaccggcggacgcgcggcggaggagctgatcttccactccatcacgacgggcgcgtcgaacgatattgagcaggccaccaagctggcccgcgcactggtcacccgctacggcatgaccgaggatttcgacatggtcgcgctggagactgtgaacaacgcctacctgggcggcgacgcaagcctggcctgcagcgagcagacggcggctcaggtcgatgccaaggtcgtggagatcgtacaggccgagcacaagaaggcctaccagatgctggccgacaacaagcgcaagctggacgaaattgcccagtatctgtacgaaaaagagacgatctccggcgaggagtttatgcgcattttgaacgcacagccgcagttaccggcggggccttcggcagattccacaaatcaggcgcaataaatttgtacggttgttgctggtttgccccttgacggaaccgctgtgggcttgtatgataagaacacaaaacttcccagtgagagggggaaaacggaatgacctttgaagaattgcaggatctgctggcagagcagttcagctgcgacacgggcgatttgagccgcggcacagcgctggctgacctgggcgccgaccatgaggatatgatcgagctggcgtgggcactgggcgaggcaatcggcgaggagatcgacgagagtgagctgagcgaggatttcaccatcggtgagctgtggcgttttgtgcgtgacaaggaagaaaacgcacaggagtaaaacaaacgaagggcctgccttttgaggcaggcctttttggtatgcaggtgtgtaaacgaacgggcgcgcattcccgtaggggcggattccatatccgcccgggaggtttgcggcggcgcgaggtgcgcgggcgcatatagaatgcgcccctacggtcaggcagaaacggaaagcgggaatcatgaaaaacacaaaaaccaagcgcatactggcggtggcggcgttgctggccgtggggctggcgctgatgctctactacgcggcgcacaagcagggctaccatgtggacgagctgtacacctatgagctggcaaactatcccggcgggttctacgcgctggaggacggctatatggacagctggcacgacggcagcttttacagcgcggtcctgacgccgggccgcctgtttgactataccatcccgtggaacaaccagaagatcgatgtccacccgccgctctactattgcctgatctatacggcggagtcgctgctcccgcagctgggtctgccgtgggtggggctgctgccgaactttgtctgcatcctggcgggcgcggcggtgctgtactgcacggcgaagcggctgatcgggcagttctggcccgcgtggacggcggcggcctgctggctgctctgcgtcggtgtgcagggcatggcggtgttcacccggatgtacagcctgatgatgctggagggcatcgtgcttttgtactgccatgtggttttgtggcaggcgctgcaggcggggcaaaagccgccgcgggcggtctggccgggtctgtttgcggtcacaatggccggggcgctgacgcagtatttcttcttggtgttctgctttttcgtctgcgggctgttcggcgtctggctgctggctgcgcggcggttcaagacggcgggcggctatgtgatcgccgagtttgccgcgctggctgcggcgtatgcggccttccccacgatgaaggcccatatcttctccggctcccgcggaaaagaggcatttgcgagcgtctttgacctgtccgcgctggcggagtggggcaggagcatcggcacggtggtgcagctgctggcggcccagttcggcgggctctggctgtgggccgtggttgtggctgccgcggcggtggtgctgtggcggcgcggctgccgtctgcgcggcaagggcctgtttgccgccgggctgctgctggcgtcggcggggtacgtggcgctgatcgataaggccgcgccgtttgaggcggaccgctactatgtggtgatctacgccgctgtggtgctggctgtggctgtggtgctggccaggctggccccgcagcacgagaccctgctgctgctggcactggtgccgatccttgcggcgcaccggaccgaccccaacgcctacctgtatgaggacgccgccccgcgcaaggctgcgctggccgacaccgagaggctgcccgccgttgtgctgaacaaggcggggtatgaggtcgcgcccgacctgttcttggaggagttcgccaagcgcgaggccgttgaccaggcaagcggcgaggacgatgccgccagcctgcgcgcggcggtggagagccgggacctgcacgacggattcttgctgtacggctacaattacgacgccgccgtactgcgtgccctggccgaggacacgctggacgtggaaaaaatcgagtttgtgaccgacggggaacggtgcccggtgtattatattgagctgaagtgaggaaaaaggctttccccgagggggaagctgtcgccgcaggcgactgatgagggcagagtgaagggggcaacccttgcactggtaatggcggaaggccggccctcatccggcgcttcgcgccaccttcccccgcgggggaaggctttttagagaaaagggggcgtgtatgctttctaaaaaaagaaacggctggctgtgggtcgtgatgctgtttgcggtgtgcgccgttgtgtacgggatgctgagcagctacccgcgggagctggctgtctacagcgacgagctgcggtatctggatgtggcgcgcagccttttgcaggggcgcggactgcgggtgcgcaatatgcccagcgactaccagaaaattctatacccgctctgcatcctgccggcgctgctgctgaaaaccaccgccgcgcagatcacggccatcggctggctgaacgccgtatatatggcaagcgcggtgttcccggcctatgcgctggcacgggccatgggcatgaaccgccgccgcacagcgtttctcgtcggcgttacggcggtgctgcccacgatgtccgctgcgagtacgtttatgagcgagacggtgtttctgccgctgtcgctgtggcaggtgtattttttcctgcgggcgatgctggcagagccgaaggcccgcgtgggctggtgcgcggcggcgggggcgttctgctacctgctgtatctgaacaaggaggtcgcgctctattatctgatcgcatgggtgcttgtgcgcgcgtgggtctggtggcatgacaaggcgtcgtggcgggcggagctggcctgcaatgccgcgctgttgggcagctttctggtctgctttctgctggccaaggcgacgctgttccgcgggctgggcaactcctacaaccagaccggctggctgacggcggagcagtggcgctttctgccgtttgcgctggtgtgcgacgcgctgtttgccgtgctggcgttctgggtgttcccggtgctgctgccgctctgcgggctgcaccgcccgcgcaggggcagcgatgcccgccgcacccagctgccgctctttttgctgctgtcccttggcatcggcgtggcggtcattgcgtggtccatcacggtgcgcgaggatttaggctcgccgtcgccgcggcagcatacgcggtatctggagccgctgctgatcccgctgctggcggtgacgctggacacgctggatgaaaagctgaccaaaacgcgccgccggatcttggcggttttgacgatagcctggggcgtgctgttcgtggccgtctgccgggccatcggcgcgggcgcgggcgacaacacccttttgcagtggtttgacttcgcggcggaccgtacggaccgcctgcccgtgctggggcagggggcgtggctggcggtgtggcgtgcagtgattgcggttggcgtggccgcgctgggcgtgctgctggtgcgccgcaggggccgccgcgtgctggccggtgcggcgctggtgctctgcgtgctgtgctacgcgggcgagtggcgcatcaaccgctggacgtatgaggtccccgccgggactgcacagcaggcgtcggcgctgaatgacgcgctggcggagctggacggcagagttttgtttatcccctacggcgtgcgccagcgggacagccagctcatagaaacgtatgtcgcgcgggatgtctatatcgtcgagtatgagacgcttttgcagagcggtgcgctggcagacggcgtgctggacctgaccgccgaggccgtcgggccggagtacccgggcaaggcatataccgatttggacacggcagactgggtgctggcagcggacggcgtgccggtggatacgagcgcgttggaaaaggcggacgcggcgtgcccggcggggtatgtgctgtatcggaatttggatgcacagagggtcaggtttgcggtatcgtgagcgggcacgggcggatatggaatccgcccctacgaaaaggcgtatgccgatacaataatccttttgcggcagacggcattgtgtggaatccgcccgcggaggtctgcgctgtcctgacccgcaaaaattgcttcctcttttcccaagagggggctttttttcttgcgattggcggcgcggtgttgtataatctttattatgtagaactgtgtgcagaaaaggagctttccatggaaaaactgctggtttttatccctgcttataattgcgaaaagcaggtcacgcgggtgctttcgcagctgttggatcagcgcattgccccgtgggtgggggagtgcatcgtcgtaaacaaccgctctgccgacggcaccgaggccgccgtgcaggactggatggcccgccaccccgacgcgccggtccgcctgctgcgcaatgaccagaactacggtctgggcggcagccacaaggtcgcgttcggctacgcggcggcccacgggtacgagcatctggtcgtgctgcacggcgacgaccagggcgctattgcggacctgctgccgattctgaacgacggcacctacaaaaaatacgactgctgccttggctcccgctttatgaagggcagcaagaccggcggctacagcgcgctgcgcacctggggcaactacggcttcaactggctctttagcttagtggcccgcaaaaaaatcaccgatctgggcagcgggctgaacctgtatgccgtggaaccgctgaaaaacgagtactacaaaaagttcccggatacgctgtattttaacgactgcatgatcctggcgctctgccagatgaagcagcgggtgctgttcttccccatcagctggcgggaggaggaccaggtcagcaacaacaagctgacgagcttcggcatcagcctgctcaagctctgcggcaagtatctggccgggccgcgggcctttgtggagcgcgaatggcgcgagaaaatcattgaggattacagctacgaggtcgtagcttccaacctgtaaggagggctttggtatgaagattctggtgacgggcgctgccgggtttatcggcggccagctgtggcatacgctgtggaagcgcggggacgaggtcgtcggcattgacaacttctcctacggcaatccggacaacctgaagtttgacgaccatgattttggcgcagaggtgcgcagaatggacatccgcgacaaggccgggatgctggctctgttcgaggcggaaaagttcgatgttgtgtataacattgcgggcattgcgccgctgccggactgccagagcgaccccgtgcaggccattgaggtcaacaccctgggtctggtcaacctgctggaggcgggccgccgcaccggcatcaaacagctcgtgcaggcatccaccaacgccatgtacgagaacgagaccgagttcccgacggtggagggtaagttcaacccgccgacgctcatttacccgaacacgaaatactgcggtgagcgctttgcccagagctttgccgacacctacggcatgactgtgacctgcctgcgctttgccaacgtctacggcccgcacatcgactgcctgcgcaagcagccgccgttcgtcggttacatgatccgcgagctgtactatgaccgcacgccggagttccactccgacggcaaccagcgccgcgattacatttatgtggatgatttgatcgcgctggcgctgcgcgtcgtcgaacacccgcagaagggctttgacgcggtgaacgtgtccagcaaccagagctattccgtgcgcgagctgtacgccattgccaaccgcctgatgggcaaaaatattgaggccaagtactgcccgagcagccattactgggccaagtaccccgagctgtacggcggggcctacggcatcaaaccggagatcctggaccacgaggtcaacaagttcagccagtgcgacaacacccacgcccgcgaggtctacggctggcagccgcaggtcgatattgagacggggctgggcagagtcattgaggccgagacgcggatgctggcggggctggaaaagtaaaaaggcttccccttcggggggaagctgtcgccgcaggcgactgatgagggcagagtgaatggagcagctcttctgcggaaaattgcacaggcaatggcggcaggtcgcccctcatccggcgctgcgcgccaccttcccccgcgggggaaggctttttgaaaagaggtacatcatgtctaaacttcacctgattctccccatggccggcaggggcagccggttttttaaaaacggctttgtctgcccgaaaccgctgatcgaaattaacggaaaaccgttcttttactgggcggcgcgcagcgtggaaaagtttgtggactgcgcggacctcacgtttgtggtgctcgaggagcatatccgcgactttgccatcgacgaaaagatcaaggcgtactggcccgcggcccgcattgtggcgctgcccgaggtgaccgagggcgcggccgtcacggcgctgaagggctgcgagggcctgccagacggtgagccgattttgttcaacgactgcgaccatctgtttgtttgcagggcgttcaacgagttctgcgctaagggcggctttgcaaacggcccggagggcgcactgctgacgtttgagagcgattcccctgcgtacagctatctgcagtacggcgcggacggcaatgtctgccatacggtggaaaagcaggtcgtcagccatgatgccatctgcggcgcgtactatttcaaggataagaaaacctacgccgatgcctgcgccgaatacctgaaaaactgcgagtacaaggaattttttgtctccggcatttacaatgtgctggccgcgcagggcgcaagaattgcgggctttgcgtgtgatttacatctgccgttcggcacgccggacgagtaccgcgcggcggaggcacccgccaataaggccggttttgacgcgctgacctgaaggagtaagaatgaaaacacctgcaaaaaagcgaacggcggcggagctggcggctgcggtgctgtggtgcgccctgacgctgggaacggacaggctgttcttccgctatgactggcgcacaccggcgttttttgtctacaaggcgctgtttctggtgctggcattcgggctggtgcacggcgcggtgacgctggtgcagaagctgcgcgccggggacaaatttgcccggcggtgggtggcttggacgctgccgtatctggcggtgaatctggtcatcctgctcatcgtctggcccggcatctggggcaatgatgacctggccgtgctgtatctggcacggacgctgcagcccaactcatggcagcactttctgaccagcggcgcgttcattctgtcactgatgtttgtgccgatgcccggcggcgtcgtgctggtgcagaacctgcttatcagcggcattgtgggctgctttgcggccacggcgcaggacctggccgaaaagcggctgacccgcccggtgcgcccggcgtggtttgcgctggtctacctgccgtttttgctgccgcccgtgctgatgcacacccagcagcccttccgcacgacctggtcaacgtggaccgagctgtttttggtgttcatgctggtggccatgtacctgcgcggcacgaagctgaacaaaaaggagctggccgctatcgtgattctgggcacgctggctgcgtcgtggcgcagcgagtgcgtctactatctggccgccatcccggtgctgctggcgctgctctgcgcccgcaggctgctgcgcccgctggcggtgggcgcggtgacggcgctggtgctggtggggtatttcgcctgctcccgctacagcagcgcgctgatgggcgaggcgtggcagtacaagatgatcgcactgtgctatcagacggcggcgctggtacaggacgcagaccccgtggaggacgccgaggcgctggccgacattgaccgcgtgtttgatgtggaattctgccgcgccaaccccgagacccacggcaatgaactgcgcggggggatgctcgccgggcgcggcggctcggcggaggactggtcggcctgccagaaggccattataaagctggccctcaagtatcccaagagcatgctgcgggagcgtgcgggtgtgttctacaacacgctgcgccagcgccagaacggccagtctaaccagaagatcgcgtttgcatcggcatttttgctgtatgaggtcgagccgacgcaggacgaccaaaagagctttttgcaggacagcgccgccgtgcagccgttgaacaaggagctgcgccgggcgtttattgtggatatggcgtccagcaccgactttgcgggcgggctgatcgacctgacgtggtggatgctgccgccgttcgtgctgctgggcctggcactggcggtgctgctggtgcagcggcgctggatgctgttttttgccgcaggcacgttttttgcacgcatcccgcttgtgtttttgaccgcgccggacacctactttatgtactatctgacgccgtttatcgccgggtatgcggtggctgcggctgcggtgctgtgcgcagtgctgaaacggaaattgaaatcggaaaggatcacgggctgatgcttgcactttttttgctgctggccctgctgctggtgctggtgggccatgcgttccgcctgctgcggtgggagcagttcatccgcatttatgagcgcccgccccgcgggcagatgctgcgcggcatggccggcggctatgcgctgaactttgtgctgccgttccatctgggcgatgccttccgcgcggtctacacgggccgcaggatgaagagcggcatcggctttgcgctggcgacggtcatcatggatcggttcctcgacgtctggtttgtggcgttcgggtttattgcgttccggctgctggggctgggcggcgcgccggtggacggcgcggcgcggtattaccttgtgttctcgctgctgctggggctgggattggtgctggtcgtggcgctgcgggattctttgaagaagatctgccttgcgttctgcgggctgttcaacgatacgctgaagctggacggcatgatgttcttctggagcctcatcaataccttcaaggatctgggccgcgtgaaaatcgggcgtctggtcgtcaatacactgctgatgtgggcggcgtatctgggctcctacaccgcgctggctgcggcgctgaccgtggccggggagccgatgcagctggtggatgtgttcgggctgctgttcgggcgcaacgccgcggactttgccgcgctgctgcccggcggtgcgctgggcacggcggcccccgcggcccgctggctgctgctggcatggtttgtgctgccgctgctggccatgtgggcggctacgctgctgcccgagggcgtgcgcggcgcgatgaaccaggccacgcaggccgcccccgccggggaaagctacctgaacctgctgccgcaggccgacgagcatgaccgcgcagtgttcttgagccggtatttcggtctggaaaacaaggactacgtcaagcggtttttgcagatgaaccgcggcattacgattttggaggactactccgccgggtcgaacgccacgacgatgctctgcatggacacgcaatcgacgttctaccgcaaatatgcctttggcaaggacggcgcaaagctggccgagcagctcgactggctgcgtgcccagcaagaccgcctgccgctgtgcgatattctgcgcagcgaggaggccgacggctgctgctggtacgacatggtctacaacccgcaggccgtggggatgttccgctacctgcactcgaaccccgtggaaaagagccgcgccatcctgcgtgcggtgctggcgacgctggaggataagctctacaagccgacggcggtcccggcgaacgcggagaaaatcgaaaagtacatcgagacgaaggttgacggcaacctgaaaaagctgcatgaggaccggatgctgcgcgagctgatgagctatgacacgctgcgcatcaacggtgtggagtacaagaacctgcccgcgctggactggatgtttgaccatgaccggctgcgcaacctgtttgcgaaggaccctgtgggcacgatccacggcgacctgacgattgagaacatcatctgccgcaccgacaacgacagctggtatctgatcgacccgaataccggcaatctgcacgaaagtccgttcctggattacggcaagctgctgcaaagcctgcacggcagctacgaatttatgatgaaaacgccgcgcgtggccgtgcaggataaccgtatcgacttccagctgacgcgcagtgcggcctatgacgcgctgttggccgccgtgatggaggatctgagcgcccgctacccgcgggagcaggtcgagagcattctgatgcacgaggtcatccactggctgcggctgatgccctacaagctgaacaaggaccgcaagcgcgcggcgatgttctacgccgggctggtcatggtcgccaacgatgtggcggatttttcggagcataaaaaggagacactatgctgatttgcgtggatctggacgggaccctgctggacacagtgccggccaacgcggcatcctaccgcgcggcgctggaggagctgggctttaccgtgaccgatgaatattacgccgagcgctgcaacggcggacattacacacggttcctgccgccgctgatgggcggcgcgccgagcaccgccgatgtggagcgcgtgcatgatcgaaaaaaggcgctgtacagtgacttcctcgatgctgtgcgcccgaacacggcactgatggaaattttgaaaacgatgcgcgccgccgggcatgacctggcctgcgtgaccaccggcagcaaacagaacgccaccgaggtgctggagcatttcggggtgcgggaatggttcggcttgatcgtgaccggagaggacgtggaaaagcagaagcccgacccggaagggtattgccgggcgatggagcatttccgcgttacgcccgccgatacaatgatctttgaggactctggcatcggcctgaccgcggccaaggccagcggggcaagggtattcagggtggagcagttttaagagttgtgatgcagggggaaaccttgttcgcacgcagaatatgcagccggtcgcaagactcccgggcggatatggaatccgcccctacggtgtaggggtcgatgctcgcatcgacccggaaagtgcacggcgcggcaaggttgacgggcgaacaatgttcgcccctacaaaaacagccccggaaggcagttgcctttcggggctgttgtatttgtgatggaaaatcaggccttcgcgtccgggcagacgatgtcacggatgacgttgacgatgttgtcagcggtcaggccgtagtcacgcaggacctcattagcggggccggagtgaccgaactgatccatgacgccgatgcggcgcacggggacgggcagcttctcgctgacgacggagcagacggcctcgcccaggccgccgatgatgctgtgctcctcgacggtgatgatgcggccgcactcgcgggcggcggtcaggatgatctcctcgtcgatgggcttgatggtcggcatgttgatgacgcggacgttcatgccctggcgcttggccagcacggcggcacgcagagcctcattggtcatcaggccggtggagatgacggcaatgtcatagccgtcggtcagcttctcgcccttgccgatctggaactcgtaggtctcgggatcgtggaaaacgggcgtggccagacgggagaagcgcaggtagacgggaccctgatagttgtaggcggcgatgacggcggcgcgggcctccacatcgtcagccgggctcaagaccaccatgccggggatcgagcgcatgagggcgatgtcctcgcagcactggtgggacgcgccgtcctcaccgacggagagccccgcgtgggtggcagcaatcttgacgttcaggtgcgggtagccgatggagttgcggatctgctcaaagccgcggcccgcaacgaacatggcaaagctggacacgaaggggacatagcccatcgtggccataccggcggcgacgccgaccatgttctgctcggcaatgccgcagtcaaagtgacgatccgggtactccttgcggaagatttcggttttggtggcagcggccaggtcggcgtcaaaaaccaccagattgtcagcgccctgctgggccagctctaccagcgtgttgccgtagctgacacgggtagcaatttttttaatatcagccattgttgaactcgatctccttttccagcgtggcgtgggcggcgcgcagctcggtcatagcctgggcgtattcctcgtcgttgggggccttgccgtgccaatcgacggcgttttccatgtagctgacgcccagacccttggtcgtgcgcagcaggaagcaggtgggcttgccgctgccgtgggacaggtcgaacatcttgaacgcctgctccaggtcggcaaaggagttgccgttgcagacgatggtgttgaagccgaaggcatccatcttgtggtccagcggctcggagttcatgacgtcgcgggtcgcgccgtcgatctgcaggccgttgacatcgatcatgatgcacaggttatcgagcttgtagtggttggcgaacatgaacgcctcccagcattcgccctcttcgatctcaccgtcgcccagcagggtgtagacgttgatgtcgctgcccagctttttggcacccagcgccatgccgcaggcggcggaaacaccctggcccagggaaccggtgctcatgtcaacaccggggacggtgttcatgttggggtggccctgcaggtagctgttggagtggcgcagcgtgggcaggtcggccaccgggaagaagccgcgctccgccagcgtggcatacaggccgggggcgcagtggcccttgctaagtacaaaacggtcgcggttggggtcctgcggctgttcggggtcaatgcgcatctcgcggaaatacagataggtcagaacgtccgccgcggacaggctgccgcccggatgaccgcacccggcaccgtgggtggcttcgatcacacccatgcgcacgcgggtcgcagtcagttttaactgcagcgtttccagttttgtcatagctaagctcctccggtcacttatggtaaaatcgggcagtatatatggatactgctacacaatatactatcttatattatacacgtttcgcggaatcccgcaacatttttttacaaatttcgtgaaaaaaggctgttttggtgcattcgcggtaaaattgacacgccaaaaagcccgctgctatgcaccctttgtgcgtagtgccaaaaaatggggcgattcgtacataaactacagcaaaaagcaccttgcacaaagcgggcatttgtggcataatttaagtacagccgcggtgcggaaagcccatgatatgaggcagccgcccggcccgcactacaagatatgggagggaaagagagtgcccaacgggatctacatccagactgagtaccacggcaagcttatccgcaaaatcgtctgcaatggggatgaacggtggtttatcggctccaactgcgccgtgaccttcctgtccatggacgactgcatggccgccattgaccgcctgtaattgtaaaaaggaagtctgccgcacgccgtcctttgggggatgacgtgcggctttttgcatttgtatacgaggtttgtatgaaaaaacggaactggcgtctgatgctgcgccgggtgctgaacctggtgttcagccgcattgttgtgaccggcgtgcttctgctgctgcaggcgttctggctgtttgcgctgttctactggctggcggactacgccaaatggttcggcggcgtgggcgttgccatgagcattatcatgtgcctggcgctgatccggcaggattccacggtgccggagtttaagatcagctggatgatcctgtttgccgttatgccggtgcagggcggcattttgtacctgttgtggggcaacaagcgcccggcgctgggcttgcgccaccggttggagcgcgccgaggacgcaatggccccggcgcggaaggacgaccccgacgccgcggcggccttgcagcggcaggacccccgcgccgcgctgacggcccgctatctgcacgactacggcccgatgccggtctgcggcggcacggcggcgaaatattacccggacgggcagagcatgtttgccgatatgctgcccgcattgcagggggcacagcacagcatttatgtggagagctttatcatcggcatgggcgagatgtgggggcagatccacgagattttgcgccggaaggccgcggcagggctggacgtgcgggtcatctacgacgacgcgggctgcctgagcctgctgccccacaactacgccgagatgatgcgggccgacggcatccgggcgttcagcttcaaccgctgcgtgccggtgctgaacctggtcatgaacaaccgcgaccaccgcaagatcatggtcatcgacggacagatcgcctttacgggcggtgtgaatctggcggacgagtatatcaataaaatcgtgcggttcggctactggaaggacagcggcgtccggctggatggccccggcgcagcgagcctggcaaacatctttttgacgttctggaaggcaaaataccccgacgaggatctggacgcgggctgcgacctgcccgccgccgtgccggtggaaacggactgtctggtgcagccctttgccgacaccccggtggaccgcgaggccgtggcgaagaacgtgtatctggagcttatcaaccaggcgcagaagcggctgtacatctgcacgccgtacctgattctggacaacgacctgctgtcctgcctgcggctggcggccaagcgcggcgtcgatgtgcgcatctacacgcccggcgtaccggacaagccgacgatctaccagctgacgcggagctatttcccgcatttgctgcgggcaggcgttaaaatttacagctacacgccgggctttctgcacgccaagacctggctggtggatgaccgcattgccgcggtgggcacggtgaatctggattaccgcagcctgtacctgcattttgagaacagcgtgctgatttacggcggcgcggtgctggacgatgtgcggcgcgatctggcggagatcgaaaaggaaagtgccgcggtgacgctggcggactgccggaccggattttttggcacgctgtacagcgcggtgctgcggctggtggcaccgttgtgctgaaggcgcgggagtccccgacgacacggggggcttccgctgacgcaaacgggcacggagcggtcaagaccgctccctacaaggcacccgtgtatggcagaacgtagggaggggtcttgacccctccgggaaagtggaccgctgacgcaaacgccccggaaacaggcggcggtgtaagctggcgggcgagcaatgctcgcccctacaagagtttttcgacagtttgagcaatacgcaaagcccgtcccgggtcagaccggggcgggctttgtggtttcaggaggcgtattcgcgctccagcgtttctataaaatgtaccgggtcgatgatgcgcaggccgtcggcgttgggggcggcggtgtccagcagggtttgcagcatttcctcgtttgtcagggcaggcgcgacctgccagcccagcgccatgacgccgacgcagtagggaatgccccagctcaaaccgcccaccgcatcatagcggtagccgcattggccggggacgtattcctcggctacggtgcggtaggcgcagggcaggcccaggcagaagggacttttccgggcggccagcataccggagtcattgggcaggccggttttgcaggcggcagggctgtcccgccgggtgaggtcaaaggtggaggtgctcaaggtgagacgcgcggaacccgcagcggcaccctgcgcggtcagcaccagaaggcccgccgcctcggcctcggcgagcgcgtcgcgccagaggtcggcgttttcaaacagatccctgtccccgggggcggcggagactgacacggcgcggatcttttctccctccggcagggtctcgttgatctccaggatgtgccgcagggcgtcggcgtgggggcggctgtcggctgcaccgggcgtggccatataatagacctgcacgcccggcgcgacgccaacggtctgccccgccagaatgcttgccacggcgggaccgtgcagcgtgccctcgttgaggccgctgtcgatgcccgtctcacagtaagcggcgatagcgcctgagatttcggggtggtcggtcagcagagactggtcaatgatggcgatctttacaccctgccccgtgatgccgcgcgcctgcagggaacgcacgccgaggccggggtccctgcccgcttccagcagggcggcggtttcgtcctcggcccccacaaggacggtgcggtcattgaaggagtaggtgtcgagatagaggcggttgtattcgcccggctggtaggtttgcttttgctgaaagccaaactccggcacgtaggacaggtcgtcgtaggggagcggggtggcctgcggcgctgccgtgggggccgcggtgggcgagggtgccgcagtcggtggggctgtggccgccggaacggcagtttcggcggcggtgcaggcggtcagggtcagcaccagcaggcaggcggcaaggcgggaaagacgtttcatgaagggagcctctccttataaacgggtcaggagccgctggggccgcgggaactgacgcttgggggcggggtggtggtgtaaaaggcagtgccgtttacggtgctctgggtcatgccgaccaggtcgaggagctgggactccgaatagcgggcggtgtcgagcttctcgcaggtgcagcggtagacgttgtcggagaccgagacgatgccgagccgcgtcaggcgggccagcgatttttcgagcgtctgcgggtcggtgcgatagcccttttcggtgagcgccgccgcaagctgcgcggcagtgctgggcttgtctctgagcaggagagccagcgcaagccgatgacccgtgaggtaataggggagcagacccctgcggagccagatgccctttggatgcttcatggcggaacactccttttctttatagtatcgtcatcgtagcatggaggggcggcgggtgtcaagcgggaaagcggaaaaagaagcggaagtccggtttttgggattgccaggcgggaatttgcaaaaatatattgacaactatatgttgttgcattaagatgagagtaaccaacaatacctgacaggagcggcaacatataaggaggacagcgatggactataaggaaaaagtggagtggctgggtcgctatcaggcgtctgtcagctgccagcacatgctggaagaagaaatcgaggtgctgcgcagcgacgccgagcgggtgacggcctgcatgagcggcatgcccgggcgcagcggccctaacgcggacaggctgccgcgggccgtagaacgtatcgaagaagcgcagaaaaggctggagcggcagctggaaagctgcatggaaacgcgcgcggagattatgtgcggcatcatgacggtgcgggataggccggggcaggaggtgctgcgccgccgctatgtgatggggcagaatttttcggaaatcgcggaggcgatgggggtagttcagcgccgggcgtaccagctgcaccggacggctgtggaggggatggccgtgccgaagcgggcgtgaaaaagatttcagtaaatttcccgaagatttcgcaaaatttcattgtatttcacaaccaacagtggtaatatgataccatcgaaactcgtgagaggaagtgattcctcccgcgggtttttttatacccattcgggaaaaggagggatgccgttgtgtgagatcgacgcggaccatgtgctggacgagctggccgagatcgcctttgccgtccccggcgaggagggcggtctgccggtcaaggtggccgacaagctgcgcgcgctggaaatgctgtacaagcatctgggcttgggcgacggggcgaaaacagagggggtggtcattgtggacagtgaaagttaggagagaagagagaggagagaggcgccaaggtggaagtgcggctgaaggagaagatacccggcgtgttctggcccgtgcatcaggcgatacggcgcggcgaggtgaccgaggtcgtggccaagggcgggcgcgggtccggtaagtcgagttatctttcgatggagctggtctggcagctgctgcgccacccggactgccacgccgtggtgctgcgcaaggtcggcggcacgctgcgcaacagcgtgtacaaccagatcgtatgggccatcggggagctggggtgcgcgggttatttccgctgcacggtcagcccgatggagtgcacctatctgcccaccgggcagaagatcttattcttcgggacggacgacccgggcaagctcaagagcttaaagctgccgttcggcgctgtgggcatttgttggtttgaggagcttgaccagttcgacggccccgaggaggtgcgcaacgtcgagcagaccgtgctgcgcggcggcagctggacgctgacgttaaagagcttcaacccgccggccatggcccgcagctgggccaaccgctacgcgctggagacccgccccggcaagctggtgcaccattcgacctaccgcgatctgccgcgggctatgctgggcgagcggttctgggccgacgccgagcacctgcagcggacgaacccggcggcgttccgccatgagtacggcggcgaggtcgtgggcagcggcgcggcggtgtttgccaatttgcagctgcgggccgtgccggacgacgagctggaacggtatgaccgcgtctactacggcgtggactggggctggtatccagacccctgggcctacaacgccgcggcttacgatgcggcgcggcgggtgctggtgatttttgacgagctgacgcgcaaccgtacgccgaaccgcgagacggcagagcttttgctggcgcgcggcgcaggcacggacggcccgctgacggcggatgccgccgagccgaaatcctgcgccgactaccgcgccgccgggctgccctgccgcgcagcccagaagggccccggcagcgtgcgtgagagcatgaagtggctgcaggggctggcggcgatcatcattgacccggtgcgctgcccggccacggcggcggagttcagtgagtacgagtacgagcgcgacccgcggacgggcgaggtgctgccgggctaccccgacgtgaacaaccaccacattgacgcggtgcggtacgcggtggagggggtgtggagaaggagaggaagctaaaatgtgttgcgcatgtaggggccgcacatgtgcggctcgcagcctggcgaaaacggaagtctgcgggaaggccgcgggccgggcatgcccggcccctaccgcgtggcaatgaagaaaggagaggatgatttgcaatcctatttggaacaggcatttgggaaaagtgacgttacatctgtcaaaatgcgggcggcggtgcgggaatggtttgatctgtactacggcgtgccgcgcgcgggcgaggattccgcgccccgtgtggcggcgctgatcgtcggcaagctctgccgcacggtctttgccgagtacgagacccgcctgccgcccgaggcaccggacccgctgcgccgcagcctgtcggcgctgaacgcggcggccaagaccgcgatgcagtacgcgctggtgggcggagagtgtctgctgaaaccggtgccgcgggacggggcgttcgactttgcggccatccggcgcgactgttacgtgccgctggcccgcgacgcccacggcagccttctggccgtcggcacgatggagcggcacagcgtcgatgggcggcagtacgcccttttggagcgccgcaccgcgggcgcggacggcctgaccatcgaaacgcggctgtttgagctgaacggccagacattgggccgctgtgtgccgctggccacgctgcccgcttgtgcggagctggtcccgcagcttgtgctgccgggggtgcagggcgtcgggctggccgtgctgaaaacgccgctgatgaactgtgtggacggcagcaccgacgcggtcagcatctatgccccggcggcggggctgctgcacgcactggcccgctgcgaggagcagctgaacgccgaatttgcgaacggcgcgtcccgcgtttttgcgtcggaggacctgctgcgccccgatgcccagggccgccgtgcgctgcaggacgatctgtttgtcggcctgccggacgacccggccaacgtcggcgtgacggtctacagcccgacattgcgggagggcagctatctggcccgcaagcaggatcttctgcgcgggtgtgagagcctgctgggcctgcgccgcggcattctgagcgaggtcgagacccccgccgagccgcgcacggcgacggagatcgccgcaacgtcggtggactacgacctgacgatccgcgacctgcagagcgcgtggacggatacggtgcagcaggccatggcgctgtgcagtgcgctgggcgcggtgtacgggctggacggtctgccgcagaccgcagccccggctatcgactggggcgacggtgttttgtatgaccgtgcgcgtatctgggccgagcagcgtgagctggtggacgcgggacttctgcgccctgagctggcgctggcgtggtattttgatttgccgcatgagaccgaggcggagctggcagagattcgccgccggtttatgggcgatgcagggcgggcgcaatgagcctgccgtgcagtgcggcgggggtgaggtcaccccgccctacgatgctgcagaaagtgaggtgaaatacaatggagaacgagcagaacaagccgatgcagacccccgcgccctatgccgcggggaccggcagcgtgccggtagcgctggaccgcgacgcctttgcgcggatggggtaccgggagagactggcgctgaagaaggagaacccggaggtttataaagagttgaggaagtgaggggcggcgggaggaatccctccgcctcgcttacgctcggcacctccctttgacaagggaggcttgtagggggcggcgtcctcgacgccccgcgggagggaggaagccctcccctgcaaattacgtacacggacgcttgtagggcggccagccctctggccgccgcggaggggtcaagacccctccctacaaagcaaaccgtgaaaggggcaaccaacggaaaccggcgggccgggcatgcggcccctaccgtacaaaagtaaaaacacaaaaaaggagaaactatatgtctgatttcatcacgaagctgtccgaactgatcgaccctgaggttatgggggatatggtgtccgcgcgaatcccgaagaagctgcgcgtggcaccgtttgccaaaattgacgatacgctgcagggtgtgcccggcgataccatcaccgtgcccgcctacacctacatcggcgacgcctccgacgtggccgagggcggcgaggtcgctattgagaagatgacgacctccacccgcaaggccaccatcaaaaaggccatgaagggcatcggcctgaccgacgaggccgtgctgtccggctacggcaacccggtgggcgaggccaatacccagctggcgcaggccattgccgccaaggtcgacaatgactgcatggacgctttgcagaccgcaagcctgatctacgacggcagccaggcccagatcagctacaacgccatcgtcgatgcggttgacctgtttgaggaggagatgggctgctccgacaaggtgctgttcatccacccgaagcaggtcacccagctgcgcaagaaccccgacttcctgagcgccgacaagtacacgcccggagtcagcctgaccggcgagatcggcatgatcgcgggctgccgccttgtgcccagcaagaaggtcccgctggccgaaggcgtctacgcctgccccatcgtcaagctggagaccgaccccgaggtcgacgacgagatcccggcgctgaccatctaccgcaagcgcgaggtcaacattgagaccgagcgcaagcccaagacccgcaccaccgaaatcacggcggacgaattttacgtcgctgtgctgtccaatgaggctaaggtcgtgctggcaaagttcaaggcgtaagggggcgtgcgcgtgccggattataccttttacgtagaggattacctgggcgaggacatcccggagaaggagttcccccgcttcatcagacgcgccggggacgagctgcgccgtatgcgggagatgtacgccgtggcaccgcgccaggggctggacccggagctggccgagagcatggcgctctgcgctgtggccgacgcaatgtacgagttcgcgcaggaggacgaagcccggggcattgcgaaggtgagcgtcggcagcgtgagcgagacctacaccgcgccgcccgagctgtgctcccgcacgctggcagaccgggcggcgcatttccgccacgaggcgggctactatctgcggatcgggcggtggctgctccatgaataaactgtaccgcgataccgtgacgctctaccacgccgacgcagcggcgcagaccgtggtgcgcaccgtactgcggggcgtctgttggcagcagggccgccgggaactgcccgatgcaggcggcacacgccggggcgcggcgctgctggtggtcatcccagagacgacggcccggtacggcgcggactatacgctggcaccgggggacaggctgttccccggcgagggcccggcactgacctgggccgactggccgggctttgtgcccgcggcggtggagggtgcggcgctggtgcagtacgtgctgccgatgcggctgcgcggtaaaccgcaccatgtcgaggccggtgcctggtggaacggaagcggaacgggcgtgaggagcctgacaaggtgagaatttttttggcttctcccccgggggagaagctgccgcccgcaggcggctgatgaggggcgagcttgcgtggccgaacgatgaaagggagggccgcgcgaagtctgccctcatccggcgctgcggcgccaccttcagtctacgcgctaaaagccgccttcggcggttgcgctccgacacgcgcttgcgagcgcagcccctcggggaaggctttagagaaggaggcaaaccatgcttacaaaaatgacggcctttctggcccgggcccctgccctgcaggggctttctttgacggtgggggacgttggccccgcgccgtacacggcggggctgtggtgccggggcattacggtgctggaccggcgggaaaacctgctgggccgcgtgacacagcgctgccgggcggagttcacgctgcggctctgcctgccgcgcaccgatgccgacaacgccgcgcggctgctggatctgcagacctgggcggcagcggagagcgccgcaggccgcgggccggtgctgggcaacgcggggcgcgaggtcctgcgcgccgagcagggccgcatggagcgcgccgacgcgggcggcacggcggtctacaccgtgcgtttacaagcggaatacacacaagtttatacggaggaaaccacatgaaaattgaacgcaagtacatggcccactacctgaacgccgcctttggcagcggcgacgccagctacacccgcctgggcagcgatctggaggaatactcccccgagctgaccgcgaacgtggagaaaaagtcgaatatcgtcggtgagacgacggttacgatcaacggctaccagaagcagggcgaggtcagcccctactacgccgagccgggcgacccgctgtttgagcgtctgcaggccatcatcgacggcgatctggtgctggatgacctgaaaaccgacatcgtcgaggtcaagctctgggacaaggatacggcggggacgtaccccgcagtgcgcgaggaatgctacatcgaggtcgtcagctacggcggcgacaccaccggctaccagatcccgttcaacgtgcattacaccggcgtcaagacgaagggcacgtttgacccggcaaccaagaagtttacgcaggcgtgacaggcaaaagagcggctgccggaaggctgcccctcatccggcgctgcggcgccaccttcccccgagggggaaggctttgaagaaaagagagtacgatggagctgaacattgacaccggcgtggaggaattccgcgtcaacgggcgcggggtgctgcgctttaacccggcagacccgaacctctaccaccgcttttttgcggcgggggcagagcttgacggctacgacgccgcgctgacaaaggcgctggcggcgctggacggcgacgagcagcagcgcgccgcggcggggctggccctgctgaacgagtacgacggcaagatcaagaagctgctgaccggcatctttggcgcggagaacgactttgatgcgatcctgggcggggtgaacctggcgggcgtcggggccaacggcaagcgtgtggtgcagaaccttttggaggcgctgacgccgatcctgcgcgagggcgccgagcgccgcctggccgctgccgccgatgccgccgcagcccgggccgatgccgcccgcgccgagcggggcgtagtatgaccggggcgtggggactgccgatgcaggcggagctgggcggcgtgcggtatgccatccgcagcgattaccgcgatgtgctggagctgctgcgctggctgaacggccaggccgacccggcgctggaccagagcgagcgctggtacgtggctatgcggctgttctacccggagttcgccgcactgccgcagccgctttggcccgatgccacgcagtttttgacggagtttttggcggcgggccgccgcgagcagccccgccccggccacgcgctgatggactggcagcaggacgcaccgctgatcgccgcgggcatcagcaaggccgcggggcaggatgtgcgcacgctgccctacctgcactggtggagctttctggcgtggttcgatgccatcggcgaggggagctttgcgacggtggtggccatccgtgataagctgcgccgcggcaagcggctggaaaactgggagctggactattaccgcacccaccgcgccgtggtggagctgcggggcgtggagagcgccgaggaacaggcggagaaaaggcggctgctggaattgctggggggatgagaaatgcaggagataacctttgacgagctgtcaacgctgaatcagccctcggcgtccctgcgcacggcgctggataaaatttctgcggcgctggggagcgtgggcgacgccgggcagcaggcgcgcagcgttgtggacgagctgcgcgtgtcactgcgggctgcggcggcacagagcgtgaaatccgcccgcagcctggcaaaatttgacgagatcaaccgcctgtccgccccggcggaggacaaaacggcggcgccggaaaagcagaaaaaggccgccgaggccgcggcgaaggccgaggaggccgcaagatccaccaccggcactgcggcacgccgcagcggtacagcgggcagcgacctgagcggcctgacggcagtctggcagagcgtgctggagagcctgcgcggtgcgtgggcggatttctgggcgtacctgcaggaattttttgcgccgttcgccgcggcgtggcagacggtttggcaggggctttccgcggcggcagccggcgtatgagagcagctctgcgcggcgctctctacggtggtccagcccgcgctggcgctgctggacacggtctggcaggggctttgggcgggcatggagcaggcgtgggccgcctacggccagccgattctggacggccttgcgcaggggtggcagaacgtcgtcggcatcgtttcggcgctgtggagcgaggtgctgcagcctgtgctggtgcagctgtttgacctgctgggtgcgctctggaccgcgcacctgcagccgctctggaacgagctgacggcgtgcctcggcgcggtgacaacgctgctgctgacgctgtggaacaccgtgctggcaccgtttgtacagtggctcatcacggcgctggcccccgtggccgtgcaggtgtttgcggcgctgggcacggcggtgaccggtgcggcgggcatcattgcggacggcatcacgattgcgctggcggtgctgcgcggtatggctgactttttgaccgccgtgctgcggggcgagtgggacgctgcctgggctgcgatggccgggacggtctctaccgtgtgggggcgcatcgtctccattgtgcagacggcggtctccacggtgctgggcgttgtgcgcagcatggtcgcggccattgcggcggccatcaacgggctgctgtcggccatcggacatgccaaaagcatggcgggcagtgtgctgggcggcgcgggcaagctggtcagcagccaaagtgcgctgctcgggctgggctacgcggcgtcggtgccggtcccggcgctggcgcagggggcggtcatcccgccgaaccgacagtttttggcgatgctcggtgaccagacgaccggcacgaacgtggaagcgccgctggcgaccatcaagcaggccatggcggagacgctggccggctggcagggcagcgcggacggccagcccatcaacatttacatcggcgaggagctgctggacagcgtcatcgccaacagccagaatcgccgcgccctgcgcagcggcgggaggtgaagcgtggaaattctgaacattgacggcacggcgctgcccgcgccgagtgcgtacaaggtgcagctctccgatctggacagcaacggcacgggccgcaccgaggacggcgttcttgtgcgggagcgggtgcgcggcggcgtggcaaagatcagcgccggctgggcggcgctctcgacggcggactgcgccaaggtgctgaacgccacagccccggacagcatgaccgtgcagtatttttttggcggcgtgcgcacggcgaagatgtacgccggggaccgcaccgccgacctgaaggccgcccgcgacgggcaggccgtgtgggaggtggcggtgaatctgatcgagttttgaggcagaattttgcagctggtaggggccggacatgtccggcccgcggccttaccgcaacaggccgtctgtgggatagctgcgggcggggcataccccgcccctaattggatgtggaaacgaggtgagtgacaatttattccgtatcggatgcctacaaaaccgcgatccgcgcacggacgcggaccgaccgggtgacgggcacgctgacgctgacaaacggcacggtgctgaatctggacgcggcagacctcatgagcgggtcgctgacgctggacaaccagtgcgtcacgggggaggagctggcctttggctgtgcctacctcggccaggcggcgctcaacctgcgcaccgacctgagccgccatgcgttttacggcgcaaagctcgtgctgcactacggcctgcagctgcccggcgggcggtgggagaccgtgccgcttggcgtttacacggtggccgaggccgagcggcgcgcgctgtatgtgagcatcaaggcctatgacaacattctggccttgcagcaaaaatatgatggtacgacgatgcagggcacggcctatgcgctgctggggcagatcgcggcggcctgcgggctgacgctgggccagaccgaggccgagatcggcgcactgaacccgaacgctgccctcgtctgccagctcagcggcgcggacggcctgtctacctggcgggagtgcgccgccgccgtggcacagctggtgggcggcttcgcggcggcggaccgcgcggggcggctggtgctgcgcacctttgccgaaaagccctgtgccgcgctgaccgcggcggcgcgcagcgaggcggcggtctcggattttgcctgccactacgcggcgctgagcatcgagaccgacgacggcagctttgccgcgggccgcagccaggataccggcctgacgatgcgcatttccaacatgacgctggccgaaaagggtctgcccgccacgcggcagcagatcaccgacaacctgtttgcagcgctgcaaaggctggactacgtcccggccaccgtgacgatgcccggcgacccggcgtttgagccgggggaccgcgtggcgctgccgatggaggacggcactgcgcccgagatgctcgtgacgcatttcgtctggcgctaccgcgggcggcagaccttaaagggcgtgggccgcaacccttacttaggcggcacaacggacggcgcgacggaaaaagcgctgcgccgcttacagaacagcgccgagagcaagcggatcgtgtattacagcttcacgaacccggcggagctggcggtgcagaccgtggagacgcccgccgtggcaattgccttcacggcagtggaggagacgagcgctatgttcctggcgcagctgctgttggacgcagcgcccgacaccggcaaggtactgacgctgaccgtgcggtactatataaacgacgtgcctgtggaaaattttgcgccgcagcagcggctggagacgggcgcacacacgctggcgctgttctacccgtttgcgtcggtggaggccgggacggtcacgcggctgtcggtgcggctggtctgcgcgggcggcacggtgaagatcgcgccctacggcatcaaggccaccgtgaccgggcagggcatggcaagcgagacgccatgggatggcacgctggaatgtgaggagacactgctgccgattgcaataaaagcacgcagcatcaatgtataaaacgaagggagcggatgcaatgaccctgcacggtcatacgcgcattgaactgaccgatgtgcacaccggcgcggtggaggtggtggagagcgataatcttatcaccaacgcagtgtcggacatttttaacggctacggcggcagcctgaacaaggccatgctgctgtggcgcggcgaccaggggtacacgaatgccccgaaggatctggtgacgatgttttacggcggcctgctgctgtacgacacgccgctgggcagcgacccggccacagtgtttgccccggcgggcgcgggcgttgtgggcacggcgatggccgggcaggtcaacgcgaccaaaaacacggtgcgaggcagcgccaacctgaccgagacgaagatcgacccgtggagcggcgtcgtgacctacgtctatgagttcgcgacgagccaggccaacggcgtcatcggctcggtctgcctgacccacccgatgggtgcgtactactccgagatgatcgacgcgccggacgcggcttcctgcaacgcggaccggctcggctttggcggggcgctgggcggtgaccagctgctgacgggccttttggccaaaacgacctaccccaccgacgagaagggcgtgctgctctacgccgaccccgaggcggacgaggccgtggccgggtatctgaacgccgacgagggcgtgctggagctgcgccatcatgcgctggggctgaaaacgctggacctgttccgccgtgaccccaccggcctgtgggacagcctgcagagcaccgacacgctgaatgtaggggactttttgcaggtggattcctccgccggggaggactactgccgcatctgctttgacgcggaggcggataaaatctatctggtgtctgcgccggaggttgactacattgacgcaatgggcattgtaaaaatacgtgagtacgacagaaaaacgctggcggcaaaggactacaccgtgccgaacaacaccggcgttgatctgcagtccttcatcagcgagaaccgcggcacgccgctgaacggtacggtctacggcggcagcctttacatggtccaggaccaggctgagcagatctatcgctttccgctggctgaccccaccgatgtgcaggccgtgacgatgcacggcgacgacatggcctacctgtccgacgcccacgacgggcggctgtactgctactaccgcacccgcgccgtggtgctgaacaccgggaagaacgagctgttctcctgcgaggcggcgggctacgacaacacgacgtcgggcttttccacaacagcgccggtgctgggcgagccgctgacaccgctgcgccgctactacggcgacagccgcatccgtaccgagcgtgtgctgcgggcaaactatctggcgacgatcaacgacctgccgaagtcggtggaaaagaccgccgacaagacgatgaaggtcatctacaccctgcgcagaggaggctgaggatgcagcagacaggaatttttgcgggccgcaccgaggtgcgctgcccctacgcccgctggggctggacccgcggcgggggcaaggtctggcacggcgggattgacctggccgggctggacgacgcgacgatccgaatgccctactataaaggcaagcgcatcacgggccgcgtgacccgggcgcgtatcgtcacggacaggcgcgacaagacctgggagtggggctattatgtctgtgttcagctggaccgcgggcagacgcccgacgccgtgaactttttgtattttgcccactgtgcgtcacttctggtcaaggccgggcagcgcgtggcgagcggggacgcgctggctgtcatgggcaataccggcaatgcggcgctggccgacccgccgtatcggcactgccacctggaggtgcgtgccgcatcgggcggcgtcgggctggacccgacggtgtatgcggggtgtgagaatgctgtcggcgtgtacggcgcggcgggacggatgcaggtcatcacggtggggccggtcacccagggcgatgcggacgcggttttggaagtctgccgggcccgcgggctggtggatgccggactgtacagaagcgaatggagggatgcttaatggagaaacgaaatctgtttgtcagcggcaaggccgttgtggcggcggtgtgcggggcgttcacggcagcgttcggctggctgggctggcttgttgtggcgtgggccgcctgcatggcgctggactgggtcagcggcagcgccgccgcggccagcaggggcgcgtggtcgagcgccgccgcccgggccggcatctggcacaaggccgggatggtggtcgttgtgctggtgtgcgccctgaccgacgccgtgctggcggtggccgttgccaacctgcccgggctgggccttgaggtgaacggcgtggtgctgccggttgtgctggtgtggtacatttttaccgagctcggttccattgccgagaacgccgccgccatgggcgcacccgtgcccgggtggctggtaaggattttggcgcaggggaaggagggggcgaaaaagtgaggggtgcagcggggtgaggtcaccccgccctacgtacagctttcaagtgggatcgtagggcggccagccctctggccgccgcggaggggtcaagacccctccctacaaagcaaaccgtaaaaggggcggcagcgcgagcctgcgggccgggcatgcccggcccctacagggcagtaaaaaagaagggtatctgtcgcatgaacggcagataccccttttttattttgcttacaggtaatttttcaggtcgctcttgttcgtggcgcagcgctcggcggcctcgcgggtgatgcggcctgtgctgacaagacgggccaggtcggcgttcaggctgtgcataccaagggccgcgccggattgcaggatgctcgggatctggtagcacttgccctcgcggatcaggtttgcgacggcgtcggtgcccaccagaatctccgtggcggcgcagcggcccttgccgacggccagcggcagcagctgctgggtgatgacgccgcgcagcacggcggccagctggccgcggatctggttctgcgcaccggcagggcagacgtcgatgatgcggtcaatcgtctgcgctgcgccgatggtgtgcagcgtgctcatgacaaggtgtccggtctcggcagccgtgacggcagcggaaatcgtctcatagtcgcgcatctcgccgacgaggatgacgtcggggtcctcacgcagggcgctgcgcagcgccgaagcaaagctgcgcacatcggcaccgacctcgcgctggtggatcagcgagcagcggccctgatagacgtactcgatggggtcctcaatcgtgatgatgtggtcgctgcgcgtcttattgatgtggtcgatcatggcggccagcgtggtggatttgccgctgcccgtggggccggtgaccaggatcaggccgcgcggctcgtcggccagctttgtcagaacgggcggcatggccagctcctccaaggtcgggatggagtcgttcagcaggcgcagtgtggccgcggccctgccctgctggtaaaagacgttcacacggctgcgggtaccgtcgggcgcgacaagcgcaaagtctgcgtcgatgcgctccgatgtgatagcctcgcggtgggcctcgtccatcaggctcaaaatcagtgagcgcgtctctgccgccgaaagctggaccggtgcctccgccagatgcccgtcgatgcggaacatcagcggcagcccctcggagatatgaatatcgctggccttgctgttccgcgccagcgcggtgagctcatgaatctgcatggtgtacctcgtttttcagaaaagagggtggtggcggaaggctctctcccccagtcgcttcgcgacagcccttcgggcccaggcccctctgtcgctccgcgacatctccccacactgtggggagtcaccctcgcagagggggccaagtcgccttgcctccctctgcgagggaggtggcgagcctgcgagccggagggagagaaccctgcggtcagctgctgctttcctgtttactcctcatagaacgtgatcttcagcagctcctcgggggtggtttcgccctcgcggacgagctgcagggcggcctcgcgcaggctcgtcatgccctggctgcggcgggcggcctcggtcagctgcgcctgcgttgccccggcagaaatcagttcgcgcagctcacggttgatgatgaccagctcgtggatggcgatacgcccgcggtagcccgtgccgttgcactgggtacagcccgtgccgcggcgcacaaacgggatgtcaggccctaaataggtgcgctcctccgccgtgaccggcatctgcttggcgcagtgcgggcagacgcggcgcatcagacgctgagccacgaggcccgcgacggagtttgcgaccatgtaccgctcgacacccatatcctccaaacggacaatggacgacagtgcgtcgtttgtgtgcagcgttgagaaaaccatgtggcccgtgatggccgcacgcaccgagatggacgctgtctcggcgtcgcgcgtctcgccgaccatgatgacgtcggggtcctggcgcagcagggcgcgcagaccgctctcaaacgtcaggccggcaatgttgttgacctgcgtctggttgatgcgggccaggttgcgctccacggggtcctcaatcgtcgagacgttgacctgccgctcggcaatcgtctgcaggaccatgtacagcgtcgtcgttttgccggagcctgtcggtccggtcaggtagacgatgccgttcgggcggttcagcagcggcagaaagcgcttgtaggtctcgtcgttcatgccgaaatggctggcatttttgatgtaagtgttgctggacagaatacgcagaacggccttctcgccaaagaccgtcggcaggatcgaaacacggacgttgacgtcggggccggtctcgaggcgcgcgcggaagtggccgtcctgcgggatgcggtgttcggcaatgtcaaggttcgacatgattttgatacgcgcgatcagcggctggtgcaaagcacgctgcagcgtcacgtagtcaataatgacgccgtcgatgcgcatacggaccttcgtctcgccctcgaacggctcgatgtgaatatccgacgccgtcgtcgtgacggcacgttgcacgaggctgttcagcagacggatgatgggcgcgtcgaggtcgccgccctcggcagtcatgtcgatggccagatcctcggtctgggcagcggccatgtcgctgtcgttggcggtgcgggccgccttgcgggcgctgacctcggcgtaatagtagcggatggcgcggcgcagcggctccagttcggccagcacgatctccggttcgaggccggtcagctggcggatgtcctcaagggcgtagtagttcagcgggtcgttggcggcaatcgtcagcgcgcgcggactctgcgcaatcggcagcatatcgtacttctgcgcaagctcctgcgggaccttttcaacggcggtcacatcgacgttggtgtgctcgatgtcgatcattgtaagctggaggcgctgggccagtgcctccaggacctgacgctcattgacgtagccaagctcctgcaaagcctggccgacgcgcaggtcgcggtgctctttctggtaggcaagggcggtgttcagttggtcgggcgtgatatagccgaactcgatcagaacgtcgccgaggcggatgtttttcacggctgtacgcctcctttgtcacagaggatcacgttcagggatacattgaacgccgtggccgtcacggcgctgccgtcggtgtcggcgaagctgcgggtatcgatggagaaggatacaagctgtacggacgggtagttcgcggccatgtcgtccagcatcgaaagaaaatcactgtcttcgcccgtgcagcagaagctgatcgccacgctgcggtaatagcccggctggtcatagtccgggatgaggtcggaggctaagatctgctgcaaaatggcgttgccctgggccgtcgtgtcggcggtgtcagcggtgatgctgtcgtcgtcactgtcgtcgtcaccggcaaaggcggacgcggctgcgctgggggcagcgctctgtccggcgttctcactggcggtataataggtaaggctctgggtcacgggctcgccgatggtcagcgagtcgggctgtaaattgtggttcagctccaggcttgtcaccagcgtgtccagctcgtcactgctcagcaggctgtagtagctggcgttggcggtctgcagttcgccccagttgttgtttttctcggcggcgtaggtgccggccagcatgatcgtatcctgcatggaggtctgggcgtcctgcgcctcgcgcagatcggcgtcggcctgctggtggttctcaatgcccggaatcagcaggaaccggacaaaaagcacaacgaacgccagcatcagaacgacgtacagcagaattttatcgcgctttgtcattggtgcaatttccatagcgccctcctttactgctgcggcgctgccagcacacagcgcagatcgatggaatagccgtcgtcatcggccttgtagccggtgtagctgacggtggaaaacaccccgcagttctgcagggaacggatgtaggccggaatgtcgatgacctgggaggagttcgcgttaaagagcagctcgcccgtcgatgcgttgtagtcggtgaactggatcgtgatgccggacccgccggcagcctcgacccggtgcagcagactgctggtcacgtcggggtagctgttcagcagctcggtcatcccgtcggaatagtcggtcagcaagcggaactgcgccgcagactcggaatcctgcgttgcggcgcggtatggctcggtattgtcgctgcaccagttcaggatgtcctcccgctggcttttcagcatcgaggtgtgcagcgtcagcacaccccagcccagcatggagacagccacgacagcaaggccgggcaccagcgtccgcaggccctggctgcgggattccgacttggccgcaccggcggccttatgccagcgcagataaaagttgttctgtttcatagccataatgataagcccccggggcaagtatttgcaggtaaaaatcagcgtgcgatcaggttgcccgccgcgtaaagcacatcggccagcgcggtgccggacggcagtttgacagtgggtgaatccgggaagcggtccacctgcaggcccagcgcctcacagcccgggcggcagaccgcaaggtcgtccgccgtggagccggcaaagcagaccgtctcaatgcggtgctcgctcttgctggtcgtgtggaactggatcaggcccgagagcttctgcgcgatctcggtgccggactccgccgagccgcgcgggttgaacaggcggctgcgggtcgagtaggtgtactgcccctgcacaaacaggcaggcagagatcgtgtcatcgtcaaattgcagcaggacgaaggtcttctgctgcaaatcggggatcgtgcgcacggccttgatcggcgcggccagccctaagtcgatgctgtacagcttgaagccgacggccttggccagcgcgtcgtacccggcaatgacgctctgctccacgcgggtggccagcacggtatccacgcgggtcctggcatcgcgggagagcagcatgtagtcgtccagcggagccttgacctcggcgccgccgctggaaagctcatgggagagcacggccatccgctttttctcgctcatggcgggcagcgtcaggatgcggtgcatgaactggctgccgcctgcaatcagcgccacgcggttcatcggcagcttgttggcggtgaaaaactctttgagcgcggcggtcaggtccgcctcgtttgtgatgacgccgttgatcaggcagccctcgggcagctcggtctgggcggcggcgacaacgcgcgccccgctgcccgtgggcgtgccgacggcagcatacaccgtgcggctgcacagatataaagaggtaagaagtgccatggtgggcctccgaatggataaaatataaacagaaaaaggagctgcagtgatgaggctctctcccccacccgctgcggcgggagccccctcgcagagggggccagggaacttgcctccctctgcgagggaggtggcccgaagggccggagggagagaagctgccgggaaaatcccttttcagggttgacggtggttcctttaaatcgcgccgctcgacgcgccgatggtgccgtaggactggtagatgggcacgatgaccgcggctacgacgccgccgaccacgagacccataacaacgatcataacgggctccagcagcgtgacaaggcgcttggtcgccatctcggcctcatagtcgagtgtctcgctgatggtcgccagcaggctgtccagcttgccggtctcctcgccgacagcgacggaggaggagagcttcacttcaaaaccgtcgatgcccgcaatcgcctccgacaggctgtggcctgcgcggatgctgtccagcgcgtcaccgaactggctctcgatccagcggttgccgatggcgtcgcgtgccgcggccagggtcgtgatgatgggcacgccgctgccgtacaggttggacagcgtgctggcaaagcgcgccgtgcagatcttgcggttcagcacgccgaccaccggcgcgtgcaggatgaagcggtcccactggcggcggaccttcggctgcgccagcaggagcttgccgccaaagacgatgagcgccgccacgacgagcagcaccggccagttggcaccgacaaagtcgctgacgtcaaacagcagctgggtcaggaacggcagggtctccatctggtcaaacatcggtttgaactgcggcagaacaaaggtcatcaaaatcgcaataacgccgacgatcagcacggacaggataatggggtacatcatgctgttgccgacctgctggttcatcttgtgctcgcgctcatagtaggtcgccatgcgggcgcaggcgtggtcgatgctgccggtgccctcggcgctgcggatcatggccagcagcagggtggggaacgcgggtgcgcaggactccatcgcatcggacagcggcacgcccttgcgcagctcgctcaggatggcctcgtacagggccttctggcgggcgtcgatggtgcgctcgtccgccatgatgcggaacgcacgcaccagcggcacaccggcagtcagcagggtgcccaggttgcggcagaaatccgccagcacggcggttttcagcgggcggaacgtcgcgtgggccttctgggcctcctgcgcgtcggtcatgtacaggccgtcattgcgcagcttggcgtagagcgcctcctcgctgggggcctcaagcagtccgcggacggtcttgcccttctcattggtggcagtataacgaaaacgtggcatgagggagattcctccgaaaacaggttaaaaactttcagattgtcgaaaaactcttgtaggggcgagcattgctcgcccgcgcccgcttgctttgtaagacaactgtcccggaaaaaacgttgctgcggtaagttgacgggcgaccaatggtcgcccctacacacgcaataaggcaagaatgcaattttttgacggtctgaacatcacaaaaacgcgcagtaccattccaaaacgggctcgccaaacagcatcgcgatcacgatgcccgcacacagaaacgggccgaaggcgaagtggtccttcttccctgcctttttggcggccaacaggtatatgccgtatataccgccaaaaacaatgccgaaaaacatcgccagcagcgtattctgccagcccaggaacagcccggcggctgccatcagcttgatgtcgccgccgccgaacgcgccgtcgatgacaaggcagagcagaaacatcggcacactgacgcagagcgcaccgatgacgtgcggcagccagtcggcaggggagagcagcacgctcaccgcgccgcagaccgccagtgccagattcagccggtccgggatggtctgcgtctcggcatcaatgagcgaaacgctcagcaagatcccgcagaccgccagcgccagcagcgcggcccagctcatgccgaacagcccgcccggcagggcgtaggcggcgccgtaccgccaagtgcagcccagcgccagcacgccgcccagaagctccaccagcaggtaccgcgccggaatgtgcgcaccgcagtggcggcaccgcccgcgcaagaataaccagctgaacacaggcactaagtccggcgcacccagcgtgtggccgcactgcgggcatacgctgcggcccttcagcgggtccatgccccgcggcagccgccacgcgacgacgttcataaagctgaacagcgccgcgcccagcagaaaacgaatgagtcccaacagaagctcaagcagcagcatggcccacccccgcgccgtattgcagccggtcctccgcgcggaaaacgcggtaaccgctgtcggcatcatagatggcgtacatgccgttctcctgatacaggagccgctgcacggtgtagccgttcgggtcgatctgcaaaagcgtcactgtgccgggcagtgagcccagcgtgcggatttcctcggcgatgccgtccgcaaagccgtccgcgcttgtctggtcggcgaacgtctgcccggcggagtagcactgggcagacacggcactggccgccagccgcgcagccttgacctgagccaggacctcccgcgcacgggcctgatagcgcagctccgccgcgccggtcacaatagtatacaggacagcgcccagcgccagcagtacggcgagcttttccgcaagcgcagctttggcccagcgttccccggtatggcgcagccatgcgcccagtcgtgctgccagcattgttacacatcctctaccatataataacacgctatttagtataccgtgccggacctgtatttgcaaggaatttcgcgaaaaaaaactctgttttttgttcaaagataacggaaattatggcgaaatcgtgcacaacctgccgctgacctactatatttggtataaatttgctgaaatctcgcggagtttcttgcgaaaacgtcacattccgagtataataccaatatatataatctgatattgtgtctaattgtaacctttcaccggagaaacgacgggagcatctatggtgcagtacaataaaaatataaaaaacaaaaagaaaggctttacgctggtggagttgatggtcgttctggctatcacggccattctggcggcgctggtcggcggcgggctgatcgcctacacgcggctggcccggtttgaaaagaacgaggccaacgcccgcacactgttccagacggcgcagatctccctgacctggatggagacggcgggggagctggatgcgttccgcgataaggtgacgaaaagcggcagcatgggtcagcactttgccgagggtctgactgatgcgaacggaaaatctctcgatgggcgcacccagaaagacttgaacacctatatcgcggcactatactatgacaagaccggcgcagcggacggcaaccataacgcgctggtcaaggagctgctaggcgattacatctacgacgcctcgctgctgaatgcctcgatctgcgttgaaatcgacattcaaagcgggcaggtctactcggtcttttacgacacaaattccagcaaactgcgctttaatgaagccgatgccacaaatatttatgaccgcagctatgaccaccgccgcaatgacagccttgtcggctactactctgccgaggaccgcgtcaacgttgtgcagctggtgcagacgaagctgaaggtcaagaatccccgcctgacgaacggcgagacgctgaccctgagctggagcggcaactccagcctcggcgatctggacacctcctacacggccacggcctacgatgctgcaaaggaaaagcagctgtttactattaccattcaacgagatgtcaacggtacggcgggcgatgacaaacaggtcatcaccaagatgcctgttaccatttaccactacagcaacacgggcgaaaagacgagcgagacgaaagaactctacttcccgttaagctacaacaagggcagctttgtgctgacgctggacgccatggcggacgcggccctactgcgtgccagtgagaacagcgctgacgttgctgccacgagcctgtacagcatcacccgcctgctgaacgacccgcaggacatctacattgccatgcgcgccgagccgcgggagagttataaagatatttataccgccagcagcgaggtgtggactcctaccgatgaaaacaccctgctggccaagggcggcacggcggtcacggcagacctgaaatatttccgccatctgtacaacctgcgctggtctgccgactgggacatcaccgacaagggcacctacatgctgaccccccaggccagcaacagcaccggcctgaactggacgggcggcggcgtcacggtctactgcgcgtcgggtgatcagtacccggcggccaaggtgccgtccctcaattaccctgtcgcctggccgacgatcccggagctgggtgaaaaaatcgtacttacgagcaaaacaacgggccttgccaacaacaagacgacccgtgtgcccatcctcaatctgcaattgagcagcaagtccgttgcaaaaaccggcagggcagagaaggacgagctggccgaccactatgtcggccttatcggcgagaacaagggcaaaatttcttacatcacactgcgcgacccggacattcaggtcaacgtcaagaccgagaccgtcgccgccgatacgctgccgaaggcagaccagctcaagctgaccgcgaccaaattcgtcacggcgctggcgaaggaagacgagaactggcgcgatgtgcgcgccgtcggcgcactctgcggcgtcaacaccggcacgctggaaaactgcgccctgacccgcggcacgaactcctcgacgagtgcgctggtggccgcggcgctggcgtttaacaacactaccaccgcaacgcagcgcaaagcgcagacgctggacgctgacagcaaaagctatacctattatacagacgagccgcgcggcattggcggtctcgtcggcgttgccatacccgaaacggattccgtcatgcagaatctgaccgttgcgtcggacgtgacggtagcgggtctgcttgtggacaaggacacgcaatccgttgcagagaccacagcggcagaccagcaggccgagaaggcccgctacgctgccgcggcagccgagccgaatgacaagaactccctctggcgcagcgtcggcgtgggcggcgtgttcggcacggtggacgctgcccagatgaaaacagacagtaaaacgaacatcgtcaacaacggccttgtcaccggcaacggctttacgggcggcatcgtcggcaacctgtttacgacagacacaggtaccggtgcgcctgtgctgacgggcctgaggaacaacggcacggtcagcgcgggcgccaactataagggcgataccgcgggcgatgcgcgcagcctggtgctggggcagttcttcggcggcattgcgggctacggcaggggcgtgaccctgcaaggctgcgaaagcgtgacccgcagcgacctgaccgagacccagctcaaggagcaggtcgaggcgggctttgacaaaaaaaccggcacattgaccgacgccagccccctcaagggcgatttcgtcggcggccttgtcggctacggcaaggaaattgtgctgaacggctgcaagaccggcaagggctacgtgctcggcagccggtttgtgggcggtctggccggtggctttaccggcagcggcatacaaaagaacgatacgaacagcagtgacgtctttggcaaccgctacgtcggcggcatcgtgtcggtcaacggcagcaacagcaaaatcagcggcatgaccaatacgggtctggtcgcggcctttggaaagaacgcggcctacgtcggcggcatcgtcggcgtcaatgatgccgactggggtggcagtgatgacaagactgccaaagccaccgtgcagaactgcgccaaccgtatgtccggcgacaacgccaccgacacccgccgcatcaacctgttaaaggagctgagcatctccgcgggcggctacgccgactacgtcggcggcatcgcgggctgcaacggcaaaaacggcgttgttacgtgggatacaagcaccccgacgctgggtgccatcctgtacggcaacaactacgtaggcggcgtggccggttataacgatgtaaatgcgaaaatctccaacacctccggccggaacctgaccatcagcggccagatcgtggcggcgggtaaggctgtcggcggcatgatcggcctgaactgtgcctccacgctgccctccgccactgtgacggtcagccgcgtggcgggtcagcagcttgtcggcggcgtcatcggcgccaacctgccggtgggcagcttcaccgtggcggacggcggcgcgcttaaaacagatgtggcctcgggccgcgtcgaggccgacgccgtcgcgggcggcatcatcggctacaaccgtctgctggcggacaagcccgcaaaggtcacgctggaggcgctgctgccgaagattgacaagagcaccggcgtgctgaccgacagtaccgccgcggaaacggaaacggataccccaatcaccctgaccgattttcagaacgagctcaacctgcaggccgacatctacgtcggcggcatcgtcggcgcaaacgacgctaaaacgaagctgacgattcaaaatgcaaccaacggcgatacgcagaacgccctgtccgtcggcggcctgaacccgtccaacaacggcgcgtttaaaggcggcgtatcgctgaacgcgctggccgatggccgctatgactttggcaccgcgtgcggcgcactggcgggcggtatcatcggctatgccacacccaacacaacgctggaaaactgcacaaactacggcacagtggctcacaagtgcgctgcgggcggctttgcgggctggaacgagggcacgatcaccggcggcagcatggcggcgtccctcggcaaccgtgaaaccgggtatacctatctgggcggcgttgcgggcgtcaacggcggtcttattcagtctgcctacccggctgaaggctgcgccgtgcgcggtgacagctatgtcggcggcattgcgggcgtcaacctgggcggtgacgctgcggcaagcaagggcctcatcatctgcacagagaacaacagcactggcacggtggaggccaaccagtatgcgggcggcgtggccggtgccaacgttggcaatatctcgctgtccggccagctgcaaagcagtgtcaccgccgccgactatgcgggcggtgtggccggtatcaatacgacgtataacgcctataagggcagcatttacggcgctgacaacgccaccggcgcggtcagtggcagcgtcactgccgccaactacgcgggtggcgtggccggtacgaacagcgccgaaatcacccgtgtggagaaccgtgcctcggtgcgcgccagcacaaaatatgcgggcggtattgcgggcgtgaacgacgcgggcggcacgatcagctattgcagccatgcgtccggcaatgccgccgcagtctacgccaccaacggcgaggcgggcggcatcgcgggcaataataacagcggtgcgtccattgagaatgtgcaggtccgcgccgccgtcaccgcggccaacggcacggcgggcggcgtcacggccacgaacttcggcatcatcggccaaggcagcgggctggaaagcagcagcagcgtaagcaactgcacgatcaccggtacgtcggagagcatcggcgctgttgcggcgtacaacggcaaggacgcgaccatccgcaatgtgaagctggcggcaaacgccaacgtgcggttcagcaccccggcagtcacgattggcggccttgcgggcatgaacgagggcgccgtcaccggctgtcaggtcggaaacggcgcgctggcgctggacgccggtctgcgcgcgggcaccaataccgtcacgctgggcggcgcggtgggccgcaccacggcggacggcaaggtcagcgaaaccaacgttctgctggaccttacacaaaatcttgataaatatacaaatttgggcggcgtcgcaggccagaacgacggtaccctggatcagtgtacctattccggcacgatgggcggcaacgcggacacggacggccttgtctccgtcggtgcacgcagcaccggcagcacggtgggcggcattgccggtctgaacaacagcacaatcaccggctgtgaggtcaaatacatcaaactgcaggtcagcggtatcagcaacatcaccacgacccagaccgcagacgaaaagctcgccagtgccagccatgtgggcggcattgcgggccgcaacaatgccgaaatcgtcaacagctatgtcgccaccgagcgcaacggcgatacgggcagcataatcacggcgcgttacggctttgtgggcggcgtcgctggctccaacaacggcactatcacgggcagcggcagcaaaaaagcgctggtcagcgacgacgcaaaaaaaaccgcccttgttgcacaggttaaaaattggctgggtgcggcagatgccaatgccggcatcaacagcatggcggcagagctgaccacaggcaagacctacgcgggtctcaagggcgttgacactgtgacggacaagggctacacgaacgtttacaacaacacaggtcttgccgccaatgatctgcttgtcgccctgcgcggcagcaacaacagcgagaccgtccgtgccgccggttatctgggcggtctggcaggctttaactctctccgcggtacaatcgacacttccgccaccggccagtggtttgtctattctgacaatgcgacaacggcatccaccgtcggcggtattgtcggccagaacgaatccaacgtcacagacaaaagcgtgctggacactgtggtaaactgtgccgccgtgcgccggtttacgcgcgtgtttgatggggctaagaacaaggacgatacagacaatgacaacatttacaagagcgaaaatcgtgttgttgtccatgtgggcggtgtcattggccagcagcagaaccgcagcgatgatcggtggtctgtcagcaaggtagtcaactgcggcagtgtgttcaacagccgctcggccaacgtgggcggcgtgatcgcctattggctggactacggcggaaccgtgcagaaatgcttcaattttggcaaaatcacaacaaacacgaacgacaaaaacagcggttacggtgcagtcggcggtattgtcggctttattgaccagcctatttccggcggcaccacaaatgtgctttcctgccgtaactacggtcagatttggtataaatcaaacggcgcaaatgactgcgcgggcattatcggtaaaatcgagatgaagaagcccaccgatattatgacgctgaacatcatcgactgcgtcaatagcggcgcaatcaaggcagcgtcgcaggcagtcggcattctggcatggatcggcccgtggaatggaggaagaattgacaacgttgcggtaaatattgaccgctgccgaaaccttaatacaaactttacgtgtgccggaagtgatgacagaagagtcggcattgtcggcagccgcggcgacggtagagggtcgaataaagcaactaatgtcacaaactgctttgccacggttggggttggtgcaagttggtatcctattgcctatgtgcggaacgcaaacgagaatgtcaccggccacggcaactattatattgaaaattccgaaagtgcaggcaagagcttctttaagaaagattcccgtaaactgaccacgacaaaaccagccgaaaaaacaagtaactggaatagtcctaactatgaaccggcctacaaggaaacagcgtggaacccgtcctcggaaaaagtaaaagcacatcgtctgtacataggctataacgtcgatgacaaaacctatccttatattgcgttcctgcccactttggcagacgatgggaacggcgcagcgtacagtctgtggtggattagcggtcgtacatctgcgggctcgcctgccaaaccaaactctgcctatatcaagaccgacggtaagaaagcctacattttcgatgataccggcgcgggcaatgataccaatcccggcaaccagagagcgactgtgatgctgcaattcggcgaagccgcgaacagtacggacaaatcggacaaatcagacgttgatattaccgacatcaccgacgaggtcatccagaactactataagtacgtgctggacagcaccaagccagccaagccgggaaaaatcgacgtcaaggccagccaggtgcaggacgcggacaacaacgtctatggccgttataaagtgacgtggggcgagccgagcgacagcgacaagaacgccagccccgccgcttactaccgtgttgaaattctgccctgcgatgccgtaggcaacatcaccggggtcgcctacctgaccgcggacgtctaccagcgcagctatacctttgtggctgataaagagtggacgggtaacttcgtcgtgcgtgtaacgccctacaacaccaacgacgacccgaagcagcctgataaccccaacaccagcggcgtgcagacctttatgcacgccctgccgacaccggagattgagttccggctggtcaaacgcaagaacggcggctttgactgggatcagtgccagacgccagattacccggggatgcaattcaattatgaagttgtcgcggtgctgaaaaactacgccgaatacccgacagacgaggcttggaccgtcaagctgaccgatggaaggaatacttattatttcagcagacggaatggcaagcagtacatccgcctgaccaaaaatttggaacgcactttgacgcttacggcgctggcaaccccggacaacagcagcagtacaaagtatctgcgctcggcccagtacaagtcagagacctatctcccgtcccagtggcgtgatgaaaacggccctaacggcaaggacgaggacggtttgccgcttggcacgctgaaacaggacggcaacacggagtttgtgacctacaccggccagacagcggagagctttgaagcaaccgtgaagttcagctttaccccgaaggtcaagagcgacagcagcgagcacggcagcccgacctaccgtgtcatgctgctggcaaaatatctgggtaatgacgaagtcaacggcgtatctttgaacggccagtacatcacgctggccgcgcgggaaagcattgtgacagagtctcccgtcaccttcaacctgaacagcctgccgtcggatgccatgacgaactacaccgacttcctcgttgtcgcggtgcccgtcaccagcggcaagggcgatatgaagtatcgctgggatgccacggcggacgaagtgtccgcagccatcgccagccatgcaaacgacaccgacaaagaaatctggtggaagaacggctatgagatcgtccgcacgggcgagcacagctatacctatgcccatctgacaccgctctgcttctccgacgtgaaccgcaccgatgacccgagttgggctacacaggccacggtaacgaccccgcagatcatcttcaagcagctgaacctgaatgtcctaaaagccccgacgctggccgaaaccattggggacggcgtagtggataacaacaatcagctgacctacacgttcaaatggacacaggacgacatgaaggccgcagacgcagcccccgactaccagatcaagctctacggcttactgacgaacgcggacggcaaggtgaccggtcaggagcaaattgcgctgaaggacggcgtcaccctgacgccgacacaaaatggcaacagctttaccctgcctgtcaacgtggataccatgctggccaacggcagcgacagctggcgctatgacaaggtccggctcgaggtcacccgcgtggcggcagccggcaccaaggaaatcggcgcgtccgctgtggcggattacagcgttaagcagcgcctgcccggcatcagcgcgccgagctccatcacccgcgtcaacggcgagaccgacaatgcggatgccctgctctacacggtcagctggtcgccatccgacgacgcgcgcattggctactattacctgtgcgtcgtcgatgacggcggcaatactgtgctgacgctgcccaccacgggcaacgtcggcagcctgacgctggatctggagcagtatcagggcaaggcattgcgcttccgcgtcattgcccgccgcaaggctgatagcaattgctttgacggcccggacggcgcattgagccagtccgagaccatcgtcagccgcgccgatgcgcccaaggttacggccagcagctttgcgcccgacagcccgaatcaggagacgttcctgaacgacctcaagctcaacatgacgctgacggaagccgcaaagggcaatgtctactttaccggctatatcttcagcaacgagaacaattacaatacaattgccggtttggccaggacttggcaggaaaagtccaccggacaagccaagtatgaggcccagcaggcgctgaccaacgccctgaacacgatgctggccaacggcgacgccgagctggtcatcccgaaagacaaccgcacggtgggcgggagcgccagcgtcaacgacaaaaccgccagctatacctttgtgcccgacggcaacggctttacgctgacgcccgaccatgcaaaacaatacctgctgcccgcggtgcgcgttatgcccaccgacggcaggacagcgtcgaactggttctactacatcctgcaggatgccgcagcggcacagctgccggccatcacgctggacgcccccgtggacgaaccggaacgcgcacttggcaatgccgtttacaagcaggaagtcaacctgtacagcgaccccaagtttaccgtcgagcgcgataagaccccgctggagctgcgccgctttacggtggagtggaccgcggtgaacaagtacacccaggccgacggcgcggtgcgcaacctgacagacagctatacctttaccgtcacgccgctggatagtaagacgaaacagccctacatcattacggtgacgacctacgacagggacgagacggacacagacggcaccacgcataagcgcggggaaatcaaaaccgttaccaagacctatgacggcaaaacgacgccgcttgacaagcagaccgacgagacccgcatctggtacgacctgagcgttgagcctgtctacgacaaagataacaacctgaccggctgggaatcgcaaccctatgacgtcaccggcacggtggaaaaggacggcggtacgctgtactacaaggcacagacggttcccatgctggaactggtgcaggaggacggcgccgagcctgtttaccgcatcaccctgcccgagctgcaggaaaaggtgcaggacgactcgctcgctctgcaaaagttcaccgcaagtgtgacgctgcagacgctggcgcactcggatgacaagggtaagaccgtcgagtccggcacggtcaaggtccccgtcaacgagacgaacaccgccgatgcggcggaggatgcccagagtatggattccgcggagagcgtcgcgcccgccgagactgcagaaagcacggcggcggaaagcgcccccgcaagcgtgcccccggtcctgatgcgggcccgtgcggcactgcccatggcgaccccggagaccgccgctgccccggatgagacggacgcggcggaaaccgcgcccccgaaacagacggaaacaagcgacgcatcgtaattctatttcaggaaagaaggtggcattatgcaccgcagggcacgcagcattctgcgcggggagcagggactttcgatgatactggtcctctgcatcggcgcgctgtttgtggcgctgtcggcagcgctggtctatgcggcctccgtgctgacggccaatgccaaccgccagctgctggaacaggaagcctaccagctggcaaccagcttttccgacgtgctggaaggggagctgaacaagagggacagcagctttgccaagttcgtcaatgagcagttcatgttctcccaaagctacggcaaggacatctatgatttggaatcccagcccaaggagttcgcctggaaaccgaaaggcagccagcctgatggcggcgccgaggccatcacggtaacactgcgccgccgcccgggcgacggtgccgacaagctgaaccagacggcgaacagtaccagtgtcacagacctgctcaatctgctcaacacactggagggcgaagaccgcaagggcatggagatcgtcgatttacagctggacattacggtgacagtcacgaaaaacggcgagagctttgcctttacgcggacctatgaccgcacggtaaagtacgacagcgacggcagccaggcaaaaagcaataaaaaattcccaaaggtatactacacaataaacgacggtccaacaaagtattaccgcattgacgcactgacgttctacgcccccggcgtcgatgacaaggctattgacgatagcaacatcagcagcaaccgcctgacgttccactgcgacaccagccagcagcccgattccatcacctacacccgcggtgccaaacagagcaccggcacaacacaggagtgacccgctatgaaacatactttacaaagtcagcgcggcgagaccattgtggaggtgctggtgtcgttcctgctgctgatgatttttacgtcgatgttcgtcgtttcgctgcggtacgcccgcgccatgtcccaaaaggccgaaacgctgcgggagacagcctatgccttctgcgctgggctgtacccggccaataacgcggcccccaaatgggagaaggaacaggatgggctggagttctcctttggcgattacggtgaatttacggtgaaaggcgtcgagctggacagcgtggagaccagagcagaagttacggaaaacggccaaaaaacgacggaacagcacaagttttaccgctacagcaggaagtctaaggcagaagggacgaccaacccatgaagcagcgtttgaaaaaccagaacggcacaacgctggtggagctgatcgtctgcatggtgctgctgtcgctctttacgctggcggcggtcacgctgatacagcccagcgcacaggcgtacatggacatccagcagcagacccgtgcgcaaaatctggccgatgcgctcattgagacgatccgcggcgaggtgctcgaggcgaacggctatatccgcttcaccgacggcgcgacggaccctgaaaatttggacagcgtttttgcgtccaagggtaacgactacagcaagggcacggcactggaattcagcgtctaccccaaccacattgagctgatcgacaaggactgtgtgccgccgctgacaaagacagacggcacagcactgctgacaccggaacaggccaatgcgctgaacggctacctgcacatgcggttttaccgcgatgaactgaatgacgccgggcactacggcaacccgcagcacacaaaagagaacaaggacgcggatgacaacgtgacgggcacgctgccctacgttgcctacggctacacaacggcctatccccgggatgcctatatggggctgttcatcagagatctgcatttctacgcccgcagctggacgcaggacggcgacgaaaccaagaccccgcgcattacggctatgacggtggtgctgactgtggccaagcgggacgccgacaaccggatcgtgccgctgtgcacccaaaaagccattgtgcagttgcccggtgagccggtcatcctgtatggacccggcacctgggacggcaaggcatcgtcggagtcgtgagcggtgccctccgggacgatttttgaaaagtatattacaatcccggcggatgtactggacaaattcaaatggacttgttatactttaaaacatgaatacctgtgtcccggacaaaatgcaggaacgtcatgggcatcagagcagagaggatgacaaggatggcaacaattgaaatcaaaatgctgggcggctttgagatccgtgtgaacggcaagcccgtgctggcacagctggcgcagtcccgcaaggcaacggcgctggtgcagtatctcgttttgcggcgcggggagcgcgtctcccacaaggtactgaccgataccctgtgggcaggggagcggtccaccaacccggacatggccctgcgcgccatcttgcatcgcttccgccttatgatcgacgcggagggtctggatgagatgaagggctgcatcgtgaccagccgcggctactaccagtggaacccccatctggactgcagcgtggatgtgtttgaggtcaacgacctgtcggagctggcccgcaaggagagcgacgccgagaagcgcagccgcatttatgaacagatcgtcaacctgtatgacggacgcctgctgccgcagtctgcgtccgagccgtgggtcgaaagcgtcagcgtgcgtctgcacgggcagtaccgcacagccattttaaacctgctggagctctgcaaaaaatggggcgagagcacccgcatcgttacgctgtgtacccgcgcgctggagctggacccctacgaggagcgcctttatctggaaaagatcgtcgcgctggagacgctgggccgccatgaggaggcgcaggatctggcacgccgcggcagcgccatgggctgcctgcatcatgccattgagccgggccgcgcaggctctgcctaccgccagatgcgccaggcagaccgcaatatggagagcgaggtctccaagctgatctctgctctgccggataccgaggacacgggggcctgtatctgcgactttgagacgttcaaggaaatttaccgcgtacagcgcggcgtgcaggtccgctacggtctgcaggtattcctggcgatcctgaccgtggctcccagccagaacaccgatgctgccgagaccgctttgatggtggagcagctgggcgatctgatccacacgaatctgcgccagtgcgatgtggccgccagctacaccgatatgcagtatgttgttatgctgagcggcagcaccgccgagagcggcaccggaccgctggagcgcatcaaggccgcgttctaccgcatccctgcccatggccgctacctgttgagctatagcctctatgttcccgaggccaaagccgacagcgggcgcgtccgccgccgcaaaaagacggcgaagaaggaaaaataagtgagccgttaagccgtacagtgaaagctgtgcggcttttttgctgcacggaccggcaaagaaacgattggtaggggcgggcattgcccgcccgtgcccgtttgccctgtgataaatttccccgaaaagacgatgctgcgccaagttggcgggcgagcaatgctcgcccctacactcgctgtatgtcgaggaacgattttttacactttccacaatcttttgcctaaaaatttttacaaaaaatccgaaaaaactgtttaaatttccacaacaatgtggtaaagtagtatcaaacaggcgggagtgttcaaaaatcactgcgccgcaatgaaattctacgccgcagggctgccggaagcagccccggcgcgaaaagaggtttgacgatccatgggctacgcaagcaaagacatccgcaacattctggtggccggccacgccggctgcggcaaaacgacgctgaccgaggcactgctgtacatgagcggcgcaaccgagcgtatgggccgtgtcgaggacggcaccaccgccagcgactttgaccccgaggagatccgccgcaaggcatcgctcaactcgagcgttgtccccgtcgagtacgagggcatcaagtacaacctgatcgacgcaccgggtctgtttgattttgagaccggtgctgccgagggcatcatggccgccgagagcgtgctgatctgtgtgtccgggcgttccggcgtgaccgtcggtgccgagaaggcgtaccagctggcgctgaaaaataacaaggcgcggatgatctttgtcaccaaggctgatttggaaaacgccgactactttaagattctggagcagatgaagatcaagttcggccccagtgtctgcccctgcgtcgtgcccgtccgtctggacgacggcaccgtcgcctacatcaacctgttcagccagaaggccttcaaatacgaaggcggcaagcaggtccagattgacctgcccgacatcggccaccgctttgagggcctgatccaggccatgagcgaggccatcgccgagaccgacgaggctttgatggagaagttcttcgagggtgaggctttcaccacagaggagatcgtccagggcatggcctccggcgtgcgcagcggccagatcacgcccgtgttctgcggctccgcggtcaacgcgcaggcgctggatatgctgctctacaacatgaacgtgctgctgcccggcgcggacactgcgtccgccgtgggcgagtctggcggcgagccggtggagatcaccgccgaccccgccgccccgctgtgcgcctacgtctttaagactgtggccgacccgtttgtcggcaagctgagctttattaaggtgctgtccggcaagctgaccgcgacgagcaacgccgtcaacgcccgcaccggccagccggagcgcctgggcaagacgctgaccgtctgcggcaaaaagcagaccgacacgcccgaaatcgccgccggtgacatcggcgccgttgccaagctggccaccgccaagaccggcgataccctgtgcgaccccgcccgcgtcgtggcgctgcccgcacctgtgtaccccatcagcagctaccgcatggccgtaaaggtcgccaagaagggcgacgagggtaaggtcggcagcgcgctggcccgcctgatcgaggaggaccccgccatccggttcgtagtcgaccccgagacgaagcagcagatcatcagcggtctgggcacccagcatctggaggtcgcgctggccaagctgaagaataagttcggcgtcgagatcacgctcgagaatccgcgcgtgccgtaccgcgagtccatccgcaagagctgcaaggcgcagggccgccacaagaagcagaccggcggtcacggccagttcggcgacgtctggattcagttcgagcccatcgagggcgagggcatcgagtttgccgagaacgtgttcggcggcagcgtgccgaagaacttcttcccggcagtcgagaagggcgtccgtcaggccgccgagcacggcgtgctggccggttacccgatggtcggcatgaaggccacgctgctggacggcagctaccaccctgttgattccagcgaaatggcgttcattatggccgccaaactcgcgtataaggccgccatccccgaggccggccccgtcctgcttgagcccatcggcgcattgaaagcccacgtccccgccgacaacaccggcgatattatgggcgaggtcacgaagcgccgcggccgcgtgctgggcatgaaccccgatgacgacggcctgcaggtcgtcgaggccgaggtccccgtggccgagatgcaggacttcaccactttcctgcgccagctgacccagggccgtggctacttcacgttcgagttcgtccggtatgagaccctgccgcagatgctcgagaacaaggtcatcgagcaggcaaaggcattgggcaactttgcggatgaggattaaacgagagatgttctttctttgcaaagaaagaaccaaagaaattctaaacaagtaaaataaaagcacctgctgaccggtatgcgtgtgaccggccagcaggtgctttttgggtaaaatatgtaaagcttctttgcttactttcttctcgaagaaagtaagagaaaagggagtctgcggaaaggttcaaagcccctcaggcctcgcaggctcggccagcttcccgcaatgcgaggagccttttacagcctcccctcacaggggaggtggccgagcgcagcgatggccggaggggcttcttgccgttacccgttagcaccagcctcccgggaaagcaccaggccgggcatgcccggcccctacagcgcagcaaaatgaaaggcaagcccccccatcacgtgatcttcaacgcccgctgcacgcggtacacaatgtacttgaacagcccggcaatcagactgcactccacccagacataattgggcaggttccgccacttgaatttcggtttgtttatcttcgacagcgccgcccacgcctcgcggaagcccttcgcgtaatccccgccgaagccgcgcagccggaacataagcactttgagcagataccccagcagcatcgggataaaattcaaagccaacatcaaaatcggctggttcttgtagggcagcagaatgctgttgcgcccgctctggatgctcttaaacgggttgtagcgcaccgcgccggtggtcgcgccgcagatgtggcggcagcgggccgtggggcaatagacgttcctgtagccgaaattgttcgcacgccagctcaaatcgacgtcctcgtaataggcaaaaaacagctcgtcaaacacgccgatctcgtccagaatcgacttgcggtagagcgccgcgccgccgcacgcgctgaacacacggcagggctttgtatagcggctggcctttaagccgtcgccgcgcttgcaggcaaagcccaggatcgtgacgtagtcgcccgcgtcgtcggccagctccggctcatagtagcgcagcatcaggctgctgaccgcaaaaattttcgggtcggcgtcggcggttttgatcagctccgccagccaatccggctccgcaaaggcgtcgttgttgaacaacgccatgtattcgcctttggcaatcgcaatgccctggttcaccgcatgggaaaagccggtgttcccggcgttctcaattaaagtgtagcggtcccgcccgcagtagctgcgggcgatgtccaggctctcgtcggtggagccgttgtcgatgacgatcagctcaaaatcctgctcggtctgcgcccagacggactcgatggaatcccgcagccagcccgcgccgttcaggttcgggatgatgacagatgctttcatggcgcctcctcaacggtaatagtagtaggccagctggctgtgcagcgcggcggtaaacaccatcgcggccacagccacaaacaggatgaccagccccgccacgaccagcgcacggatcaggtacgcccgggccagccgcctgcgggcagggtcctgcgtgccgccaaagctccacaccaccgccagcacaaacccggcgatggggatggcgaacagcagcatggccgccgtcgtcgcgctctggctcatggcgtcgatgcggtcctcctccaggtcctgctcgtacagcggctcgccggtctgaacggtaccctccggggactgacgcatcgactccaacagagcctcgcccatcgggatatgcggcagcggtgcgccgcacttggggcaccgctcgtcgtacggggcagtcagcagaccgcagtttttgcaaaaatgtgccataaaaacctcgcttattcgtcgaatgccagaccgcggtccagctgggtgttcaggatgatctgggtgttggtggagcccatcttctgcatcttggtcagcaggtgctccagcgcgtcaatgtcggtgcagcttaccttaattataaagttgtagctgcctgtcacgcggaagcactgcaagacctgcggctcctgctcgatcatggtcagaaagctcgcgcgggtcgctgcgtccaccagtaccgagatcagcgcctcgacccgggcgggcgcgtcggggtggcgcagcacgacagtgtacccgccgatgaccccctcctgctccaggcggtggatgcggctggatacggcgggactggtcaggctgacccgctgggcgatgtccttaacgggcatacgcgcattttccgccagcagttgtaggattttgtggtccaaatcgtccatggattgactccttgtcattgttttgtgtaatgcgcacaaaaaaataaagtgaagtatacaatcactgttatctttaacaaaattggaaaagtatgcttttttgtgcgcttgctaaataaaattaagtaggaatgactttattataatcttttgaaaaccaaaatgcaagtctgacatttgacattttaagaaaacttgctataatgatatttgtaatcaatcaagacattcactgacctttatatactttcccacccctctatgcacagagccccgcaggtatcccctgcggggttttgtgtttgtgttggcaggacacaacgcgggaaagtgtgcaagaattgggggctttttgcttcccccgcgggggaaggtggcccgcagggccggatgaggggcgtgtgcacggcagcagcctgtaaacgggcagcatctgcaaggtcgaccctcatcagtcagtggtcggggccactgacagcttccccctccggggggaagccatgcgcgcgaaaggctgcgtttttacattttaaaccccgccccgtttgacggcgcccggactgccgtggtataatataatttccgacacataacgtgcatttttaacggaggaatcaatatgctcatccctgtgctgctttttattgtcggtctgttgttcctgatcaagggcggcgactggttcgttgacggcgcgtcctcactggcccgccgcttccacctgccggagctgctcatcggcgcgacggtggtctccatcggcacgacgctgccggaggtcatggtctccacgatgtccgcgctgtccggccatggcgagatcgcctacggcaacgccatcggctcggtcatctgcaatgcggcactgatcgcggccatcacgattgcggtgcgccccggcagggtagaccccaaaacgctgaaaacccccgtcgccttcttcttcgcggcggcggccatctactgcattgcggcctatgttttcggcagattcacccgcgtcatgggcatcatcatgctggcagtgtttgtggcgtacatggctgccaacgtgctgcagatgaaaaacacccccgccggtgagcaagaggcgtccgaggaggaggaaatgcccctcgccaagacgctgatcctgcttgtgctgggcgcggtgctgatcgccgtcggcgcaaacctgctcgtggacaacggcaccctgatcgcgcaggccctcggcgtgcccgagagcgtcatcgccctgacgtttgtcgcgctcggcacctcgctgcccgagctggtcacggccatcacctcgctggtcaagggccacagcgacctgtcgctgggcaacatcgtcggtgcgaatgtctttaaccttgtgctggtcagcggcatgtcgatcacgctggcacccttcaccatcccgcagagcgccacgctgttcggcatcaattccagccttgtgctggatctgccggtcatgctggccgtcatgctgatcctgacggtccccgccctcgtcaagggcaagctgaaccgcgcccagggtatcctgctcctggcgatctacgccgccttctgcgcggtgcagtttgcgctgtaaagaaaaaggcttcatcgcccatgtggacatccccgccgacgtgcggcgcgcctttgcacagctccaaaccgtctgcggcaaggagccccgcgccgccaaccaaaagacagaatagaatttccatgcccggcatacacttccgcgaggtggtgtgtatgctgggcatttttggtttgtttttgcaggcggcggcagggcatattctgtatctggcgctgcatctcgaaagcgggtccttcccgcgtccgctcccgccggacagggagcgcgcggcctttgccgatctgcaaaagggcggggcagccgccgcacaggcgcgggatacgctgatccgccacaatctgcggctcgtcgcgcatatctgcaaaaaatactatgccgggaacagcgcacaggacgacatgatctccatcggcacgattgggcttatcaaggcggtggatacctttgaccccgccaaaggcaagcgctttgccagctatgcgagcagatgtattgagaatgaactccgcatggatctgcggcgggggcggcggacgggagtgacgctgtcgctgcaggagccgctcgaggcggacgggcagctgacgctggcggacaccctgcccgatgaagccgacatggaggccggctgcgagagccgcgccgacgccgcccggctgcgcgctctggtggacgctctgcccgcccgggaacgcgctattatgcggcagcggtatggatttgacggtgcgcccaagacccagcagcagacggcgcaggcgctgcacatcagccgcagttatgtttcgcggctggaaaagcgcgcgctcgagtacctgcgcggccggtggccggcggaatgacaggaacggtgcaaagaggatgaaatcaacgaaaaaatgacgggggggggggtacacgaaatgccatttgcggcaaatgtgtggcatgatgcggcagaacgcgccacatatatgccacacatttgtaaactgtcgaatctatgacataaatcggaaaatacacgaagctgcccgctaaatgtgccagatttgtaaactgttatgaaataaccagaaaaacttgaaaaaattttcggaaactcattgacattttgctgacaagcggatactataggagtgtagacattttttaaagcgaggtataccaacgtgcatctgacaaaaagcgaacaacagatcatggaaattttttggcaggcggatcacgcgatggcacagacggaagtcgtgaaaacctgtgttgaccgtaaatggaaggaacgctcgattttttcgatgctgaacagcctgatggagaagggtgttctgcgggaggttggcttcgtgcgcagcggtaagacctatgcccgcacgtttgagcctgccatgtcccacgctgagtacctggcctcggtcattgcagagcagctgcccgcgaagcagctgcccgagctgatcgcggccctgatgcagaaggtggaaacgacccctgccatccagaaggaaatgcgtgccgccctgcgcgaaaacgcacagtaatcaatgatttgttcaaaaaagcaccgccgacccgtgacccggatcggcggtgctctttattaggaaggatggctctgccggggcgaacttttcgttcgcccgttggccgtatgcggcaggggcaaggtgcccgggcggatatggaatccgcccctacgctgtaggggacgatgcctgcatcggttcggagggtctgcggctgccgcgtgtgcccggcgggcaaacacagcgcaccccccagccgccttaaaaagcgggcaaattaccccaggatgccgctgtttttgatcgcctgtacggcctcgccaatcttctcaacgggcatcgtcagggcaaaacggacgtaaccctcgccgctcgggccaaagctcgagccgggggtgcagatgacgccggccttgtcgatcagggccaggcagaattccatgctcgtcttgtacccggcgggcaccggggcccagacaaacatgctgccgtggctgtcgggcacattccagccgatgccgcgcagaccgccgcacagggcgtcgcggcggcgctggtactcgccgcactggtgccgcacgccgtccagcgggccggtcagggcagcgatggcgaccttctgaatgggcaggaacataccgaaatcgatctgggtgcgcagctttttgcaggcggcgatgacatcgcgccgccccaccaaaaagctgatgcgtgcgcccgtgacgttgaagctcttgctcaaagagaagaactccaccgcgcattccccggcacacggcgtgttgaagatgctgccgccgtgggcaccgtcaaagataatatcgctgtaggcgttgtcatgcaccagcagaatgtcgtacttacggcagaaattgacgatttcggcgtagagctccggcgtgccgatgctgccaacagggttggcgggcaggctgaccagcatgagcttggccctgcgggccacgtcctccgggatggaggtgacgtcgggcaggaagtggttctccttcgtcagcttgtagtaccacggctcggcaccgcccagcttggagccggtcataaagacggggtagcaggggtcgggcagcagcaccagatcgccgtcgttgcagagcgccaggcccagatggccgatgccgtcctggctgccggagaagctcatgacctcgtcgggggtgatggtgtccacgttaaagcggcgtttgtagtagccgcagacagcctccagcatctcgggcaggtcgcgcaggctgtacttccagttttcgttgtcctgcgcggcgtcgatgagcgcctgcttcaggtagtctgccggtgcaaaatccggcgtgccgacgcttaaattgtaaagatgacggccctcggcctccaacgcgacctttttgtcgttgagcgccgcgaaaatctccggcccgaacaggtccagacgacgagaaaactccatatcccaaaacctcgcttattgatgtagttttatacaaaaaacgcacattttcttgtataaacatccccattatacgccgccgcgccagcgcttgcaagggggttataaaagaggtataataaaaattaaattgaaatacggtaggggccgcatatatgcggcccgcagctgtatggctggcggacgtctgcgggaaggccgcgggccgggcatgcccggcccctaccggtgcattactatcaggagtattatcactatggacaaacgcaataaaacagctctggcttatctgctcgtcggtgtggcggcggcggggcgcgccctgctggccgtgccggaaaatgccgccatacaggaggtctcgctcaccgtgctggcccttgtgggctatctgttgctggcctccaaaaccaggctgcctaccgtgttcggcgcggcggggcttgtgctggagctgatcctctgcggcagccagaccggcggggcgtgggcacggctggccccggcgctgcgcgcggcagacctgtggctgttctggggcgcggcgctcgtgctggtgcggctggcagggcggcagcaaagcaaaatgccgtacattgccgccgtgccgctggccgtctacaccgtcacgcactttatcccgtcgctgacctccgtcgctgccgtcagctttgtggtgttcagcgtcgtcatgctctggtttgcggccattatgatccgcgcctacaacgacgcgcgcataaaaaaatagggcgattttgcgcaaatctgttccgcgataaagtgacaaatgccgcaaactgtgttatactgaatacgattataaaaattcagccggaaggaaggtttttactatgatcccttttaacgtaccgccctgcgtgggcaacgagctcgactatgtcaagcaggccatcgactctcataaaatctgcggcgacggcgcctttaccaagcagtgcaacgcctggttggaggagcgcttccacgcccagaaggtcctgctgaccaccagcggcactacggcgctggatatggccatgctgctgtgcgatattcaccccggtgacgaggtcattctgcccagcttcaccttctccagcaccgccaccgccgctgtgctggccggggcgaagctcgtctttgtggacatccgccctgatacgatgaacatcgacgagacgaagatcgagcaggccatcaccgataagacgcgggtcatcgtcgccatgcactacgccggtgtcgcctgtgagatggacaccatcatggacattgcccgccgccatgacctcaaggtcgtcgaggacgcggcgcagggcgttatgagcagctacaagggcaaggcactgggcaccatcggtgatttcggctgctactccttccatgagacaaagaactactcgatgggcgagggcggcgcactcgtcatcaacaatcccgcgtacaatgagcgcgcggagatcctgcgcgagaagggcacgaaccgcgccaagttcttccgcggtcaggtggacaagtacacatgggtcgattttggcgacagctacctgcccagtgagctgaacgccgcctatctgtgggcgcagctgctccacgccgacgagatcaacgacaaccgcatggcgacctggaacgcctaccacaatgccttccggccgctggccgacgcaggcagggtcgagctgcccaccatcccggcggactgcgtgcacaacgcccacatgttctacctgaaatgcagggatctggaggagcgcaccgcgctgatccgccacctgaaggcaaacgatattctggccgtgttccattatatcccgctgcactccgccccggcgggccagaggtttggccgctttgacggtgcggacgtctacaccaccgccgagagcgagcgcctcgtccgcctgccgatgtactacggcctgaccgaggcagaccgcaataaggtcattgccaaggtcctggaattttatgcgcaataaggccctgcccggctgggcgtacacactctgcaccgctgccgccgcgctggtgttcctgctggcgtatgagctggtcgtctacagggtgccggtgacggagatcttcctgccggtcagctcctggagcgacgaggtcatctacagcaaacagctggccgccgccgtgcagtacggcgcaccgcaggggtacttcggcttcaatgagttgcacgccgccgtcggcacctacgccgcgtgggggccggcggtttttctggtctatgcgctgccggggctgcttttgcgcgggcagaatgcctttttgtggtgcaacctgctgttcgtcgtgctgggctggacgtttttcgcccgggccgcacggcttggctggaagcgccagctggcctttgccgcggcgctggccgccatgaacgcgccgattcgctatgtgttctccgccatgcaggagccgctgcactatgcgctcatgctggcggtgctgggctgcggcattctggcgcggcgggacaaaagccgcgccgcgtgggcggggctgtgtgtgctgtgcgccgtggccacgctcgtgcgcccctatgaggccgtgctctggctgttcccgctggcgctgtgccggcaggaccgccgccgcatcgctgtctgcgtggcgggcgggacggtttccttgggcggcacgctcgtgctgatgtccaaattctacgcgccctacttctttaccaatgtcgatgtaagcccgctgcaggagctggcccgcgggcaggtggtctccgccgtcagggacgtggcacacaagctgctggacgccctgcgcaccgtggccgaaatgctggccgaccagctggcaaaccgcagcgggggacagtacctgctgtttttcctgctgctgggcgtaacgctggtctgcctgatcgtggatgcccgcgccgggcggcccgtgttctggaagggctgcgccgccgtgactgcggtcatcgtctttctggcgctgctgctgatgtaccgccccgttgagggttcccgccatacgcttgtactggatgtgctgctgctggcggcgctccttgtggaggacgcccgccccgccgcgggcacggcagccgccgcgctggtgctggccgcgctcggcgtgctgaatctggcgtacggcttcaccatgccgcgctacagcgccgaatgggacgccgcggtgcagcaaatcgaggccgcgctgaccgagagctggtccgctgtgacgagcgccgacccctgggacagcaccgtggcctacgcctttggcgaccctgtacactgcggtctgctctacggcgtgccggacggcatgggcatccagtttgacgaggctgcctacctgaccgacccggcccatgagattcattcccgctacgtcctgaccgccgccgacacccccaccgccgcccgcttacaagccgacggctggacggtgctgtacgagagcgacaggggcgtgctgtacgaacggtagtgcgctgccgtatttttcttggccccctctgcgagggggctcccgccgcagcgggtgggggagagagtcttgccccaagtgcccatctgccgtacacctgccgggtcgatgcaagcatcgccccccgcaccgtaggggcggattccatatccgcccgggccgtctgcccaaaacaacgaggtaaacccatgaacacacccactctccccgtcctgaccggcacagcggtcacgctgcgccccatcaccgacgccgacacggaccttattgtcaagtggcgcaacacgccgtctgtcgtgcagaacttcattttccgccagaccttcacgccggagatgcaccgcagctggctggcgacgaaggtcgccaccggccaggtcgtgcagtatatcatcctcgacaacgccgacggcaagcccgtcgggtcggtctattaccgcgatattgacaaccacaaccgcagcgccgagtacggcatcttcatcggtgaggaaagcgcccgcggcaagggccttggcaccgagacggcccgcctgttcaccgattttggctttgcggggctgcacctgcaccgcatcagtctgcgcgtgctggccgaaaatgccgccgcgcgccgcagctatgaaaaggccggctttgtgcaggagggcgttttccgcgatatggagctgctggacggagcctaccgcgacgtcgtctttatggccaagctggtggagaactgacgtgaaaaaaccgatgcagaaaatccgaacctgcctgcaaaagacccccaatgcgctgctctgcgcgttgggggcagtcgtgttccttgcgggcttttactttttgtgctaccgcacgccgctgaacgaggtctggctgcccaccacgatgaacaacgacgaggcgctctataaccgccaggtcgtcagtgtgctgacccacggcgggccgcaggggtacttcggctatcaggaatccaccgcggatattggccgctacggtacctggggcccgctgctgatttgggcctacgcgctgccgggtctgctgttcggtgccagcgtaaacgtcgtgctgtggtgcaatttgctgctgattgccgtgggcatcgcggtgtttgcccgctgcgcgcggctgaattactggcagtgcatcgcgctgtgcggcgcactgttcagcatcatgctgccgcttcgctcctgcgtcagcggcgcgtcggaggccatgcactatatgctggcgctcctcatcgtcggcacggcggcggccctgcaccgcagcggcaagactggctggctgattgcctgtgccgcggcctgtgcggtggaaacgatcttccgcccctacgcgctgctgttctgggtgttcccgctcacggcggtctggcagaataagcgccgccgcgcggcctgtttgggcacggcggcgggcgggttcgcggtttcgctgttcgccatggccaagctcgctgcgccctatttcagcgacggcggcatggactttgacggcatccgtctgttattgcagctccatcccgtggcggcggcccgctatgagtgcgcacgcgccgcggccctgctgcacgcggcctggcgggacgatattctgcccacactccacggtgagacgacctacatcggcggcggctgtgtgacgtttttggccgttgtgctcgtcgcggtggtctgccttgtctgggataagcacaaaggccgcccgctggtgctcaagggctgtgcgctgttttgcagcgcggtcattgcgctggtactgctgttcatgtacaacatcgacccgcgccacatgatgctgctggccatcctgctgctgggggccgtcgttatcgaggacgccgtgcccgctgccgtctggctgccggtgctcgtcgtcctgctgctgccgatgaactttcagcgcggcagcctgcccgagaaaaacgccgaaatggccgcccagatgcagaccgtcgaggccgccctgaccgccagcgtgcaggatgccggggctgacccctgggaccacacgctggcctacgcctatgacgacggggtgttccacggctacctctacgccgtgcccgtgggtatgggcattgagtttgataaaaacagctacctgtgggatgccgaaaacccgatctattcccgctatgtcatgtgcggccacggcacccgcgtggaggaacgcctgctggccgaaaacgggcaggagcttgtctccaccgaggatttggtcgtttataagcgcagttgagaggaagtacacagctatgcagaaaatatcttacgtgatcccgtgctaccgctcccagcatacggtgggcggcgtggtggcggagatcgccgccaccatgcagaccctgccgcagtatgactacgaggtcattctggtgaacgactgctcgccggatgataccttcggcacgatccgcagccttgtggcggcggacagccatgtcgtgggtgtcgatctggcgaaaaacttcggccagcatgcggcgctgatggcgggctttcacaagtgcagcggcgacatcgtcgtctgcctcgacgacgacggccagaccccggcggacgaggtcggcaagctgctggcaaaaattgacgagggctatgacgtcgtctacgccagctatgacacgaagcgtcaggccggctggcgcaacctgggcagctgggtcaacagcaaaatgaccgagatcatgctgggcaagccgccggagctcgtcgtcaacagctactttgcggcgcgccgcttcattgtggacgagatgctgcgctatgagcactgctacccctacgtcatcgggctggtgctgcgctccaccaagcgcatctgcaacgtgccggtgcatcaccgcgcccgtgaggagggccgcagcggctacacgctgagcaagctgttgaatctctggatgaacggctttacgtcgttttccgtcaagccgctgcgcattgcgacctacatcggcacgctgtttgccgtggcgggctttctctactttatctatatcatcatcgaccactttacccgcgcggcggcccccatcgggtgggcgtccaccacggcgctgctgctgctgctcggcggcatgatcctggtcgtactgggcattatgggcgagtacgtgggccgcatctacatgtgcgccaacgccgcgccccagtacgtcgagcgcgaggtcgtccggcatgaggagaacgacgcatgaagcaggcaaaatggttcctgctgctgcatgtgatcctgggcatctatgcgggcagcagcgtgtgcagcaagctggccgcgcagcagccgtttttgagcgcggcgtttatcgtgctgtacggcctgatgctgctggcccttgtcacctatgcggtgggctggcagcaggtcatcaagcatctgccgctgacgacggcctacgcgaacaaggccgtcaccgtggtgtggggcattctgctgggtctggccgtttttggtgaggccgtcacgccgcgccaggtcatcggtgcggtcatcattatatgcggcatcgtgctttttgtgcgggccgacaatgagggggagggcggcaaatgagtcaggcacagctgccctatgtgctgctgtatctgtgcagcacgttcctctccgcggtctcgcaggtgcttttgaagaaggccgcgctgcgggagcacaagtcggtcttggcggagtacaccgactggcgggtgattttaggctatgccctctttgtgggctgcacgctcttaacgatgctggcctacaagggcgtaccgctcaacgtcgggcctgtactggaagcaacaggctatatttacgtcacgattttcggcgttacgatcttccacgagaagatgaaccccaaaaagctcgccgcactggcgatgattttggtcggcatccttgtatatgcgctgtaactaaaaacgtcctgcctgcaacattgcgcagacaggacgtttttttgggcatttggaatttctttggttctttttttgcaaagaaaaatcgcaaagaaagaacctacgtactctttattacagcctttccggtacgcggcgctcgcggcgctgcaccgggcttctctgcaaaacggtggcggcataatccagcaacagcgccagcagcagaccaaacaccacgtcaatgacactgtgctgtttgagcagtatcgtggacagcgagatcgacacacacagcaccatggcggcggagcgcatccagcggcggcgcggggcatcaaagattgcactgcggtagtacgccagcatcagcgtgaccgaattgaacacatggatggacgggcagacgttcatcggcgtgtcgctgcggtagatcatccgcacaagctgcgcaaaaatgtcggtgcccggcacgtatttcgggcgcagggccaggccgttaggcacaatggcatagaacagaagcgtcatcgtcatgccggtgaacagcggaatgcacagccgccagaaatcctcccgcggggccttatacagcagataaaacagcgtaaacggaatccacggaaaccacaaaatatacggtacaatggcatatttgcagaacgggatcaaatcgtccagctggcagtgtacccacagatccggtgtctggatcgtgcgatccagcagcgcaaaaaacgataagtaaaacaaagcatagagcgccatgaaccagacaggatggcgcgaacaccagttacgcatacatttacaccctttcgatgatgtactattatacgccgcacgcggcgcacaaaacaagcgacaatccgcacaattcgcagctgcgttttcgacaggatattgtggagattttgtccctgccgccttctgtatactaatacgaatagccgcgcgggaataatgcgttacagatgtgaaagagttgtaaacaaacaaatggcggagcggtaggggccgcaaaaaggatcccgtcactaagggacgagctcctcggcttatactgtattttactctcccagtaccgcgggatggccggtcggggtgtgctcactctggaacttcagcgcggcggcgatgaagcccttgaacagggggtgcgcacggttcgggcggctcttgaactcggggtggaactgcgcgcccagatggaaatcgcggcccgggatctccacagcctccacaaggcgtccgtccgggctggtaccggcgatgaccagacccttctcctcgaactcggcgcggaactcgttgttgaactcatagcggtggcggtggcgttcgtcgatctccgtcgtgccgtagcagtcggccatcttcgtgcccggtgtgatgacgcaggggtacttgcccagacgcatcgtgccgcccttcgtctcaacgccctgctggtccggcatcaggtcaatgacgttgtgctggccctcgggcgtaaattcgctggagttggcgtcggcgtagcccagcacgttgcgggcgtactccatgaccatgatctgcatgcccaggcagatgccgaaatagggcacgtggttctcacgcgcgtactgcgcagcctggatcatgccctcgatgccgcggtcaccaaagccgcccggcacaatgatgccgtccacatcgcccagctcgtcggcgcagcaggcctggtcgacgagatgctcactgtccacccacttgatctcgaccttgctctcgttctcaaagcccgcgtggtacaggctctccatgacgctcaaataagcgtcgtgcagcttgacatacttaccgaccagcgcaatcttgcaggtcttgctgcgggtcgcaatgcggctgatgagcgccttccactcggtcagatcgctcggcggggtctgcaggtgcagttggcgggccacgacgttcgtcagaccggcggattccagcatcagcgggcactcgtacaggctcggcatcgtcaggttttcaatgacgcagtcggggcgcacgttgcagaacatgctgatcttgcgcttgatgtcgttgcctacagggccgtcggcgcgcaggacgatgatgttcggcgcaatgcccatgccctgcagctccttgcaggagtgctgcgcgggcttggacttgtattcgtcggagccggagatgtagggcaccagtacgacgtggatatagcagcagttctcggggccctgctccagaccgacctgacggatggcctccaggaagggctggctctcgatgtcgccggtggtgccgccgatctcggtgatgacgacgtccgcctcggtgctcttggccagattatagatgtagctcttgatctcgttggtgatgtgggggatgatctgcacggtctggcccagataagcgccctgacgctccttgttcaggacgttccagtagaccttgccggtggtcaggttcgagtatttgttcaggttttcgtcgatgaagcgctcataatggccgaggtcgaggtctgtctcggtgccgtcgtcggtcacgaacacctcgccgtgctgcagcgggctcatcgtgcccgggtcaacgttgatgtaggggtccagcttctggctggccaccttcagcccgcgggtcttgagcagacgccccaggctggccgctgtgatgcccttgcccaggcccgacacaacgccgccggtcacaaaaatatacttcgttgccataattcaccctccatgtcggcggatgccaaacaacagcgcccgccatatcccaaaaaattatcctttccattatacatcggaaaaaacagcttttgcaatatggcgggcatattttctttattaaatttgcaaaaagtgggttttactgtggattcttcagcgggcgtccgtgtacttcaggatctcgccgatcagcaccttcatgtccagcggcttgcccacgtggctgttcatgcccgcgtccaggcaggccttcacgtcgtcggcaaagacattggccgtcatggcgatgatgggcgtgccctcgccgggccccttgccctcatacgcccggatgcaccgggtagcctccagtccgttcatctcgggcatcatgacgtccatcagaatcgcgtcataggtgcgcggcgcagcgttctggatggcctccagcgccagtctgccgttctcaacggcggtgatgctggcaccctgctcctccagcagggctgtggcgatctcgctgttcagctcgttatcctcggccagcagcaggtgcagaccagccagcggcagcaccgtttccgctgccgcgggggctgccgcggcagtctctgcccccgcggcggaggcatcgccccaactgctgccggatgcggctgccgatgcggcatgccgcacgaccacggacggctcggtcttgggcggtgtgcccaagggcagcgacagccgcacaatgaaggtcgaacccttgccgggctcactctcgacatcgagcgagccgtgcatctggtcaacgagcttctttgtgatggccatgcccagacccgtgcccttgtagtgggtgcggctcgagcgctgctcctgcgtgaacggctcaaaaatatgctgcaggaattcctcgctcataccgatgccgttgtccttgatctccatccgcaggtggacaagaccttcttcaaacagcgtttccttggcgcggaagttgatctcgccgccgtcgggcgtgtacttgacggcgttggaaagaatgttgataagcacctgccggatatgcagctcactgccgatcaggtacgggtgccagaacgggccgatctgctttgtgaaggtcatgtgccggtccacgatctggccctccacgatggagcagcaggaatccagcagtgcccgcagatcaaacgatgtgtccagcatctgcatattgccggattcgattttggtcatgtccagcacgtcgttgatgagggagagcaggtgggacgccgcaccgcgcatcttggtcatgcagtcccgcacgcgggccttgttgtcaaagttgtcctcggcaatgtccagcatacccataatgccgttgatgggcgtgcggatgtcgtgggacatgttggacaggaactccgtcttggcgacgctggcctcctcggccttgcgcagggctttttcggtctcggcgcggaaccgttgggcgcggatgaccagtgcgatgcagaccgcggtaaccagaacgcacaggcaggtcagcacgataatggccggatactgataggccagccgcgtcagagagaacggctgctgccccaggttgatgtaggcgttggtgatggtgctgatctcggcgcgggtcaggctgtcgatgctcttgttcagcacagtgcgcagcagcacatcgtagtcctgccggacgccgatgcagaaattacgctgctcgccgctcagcatcgagcgcagctcgttgcgcgtgtcgtcaaagaccgtgcgctcggcctggtaggtgtaggtatagtaggcatcgacggtcccggcgtgcacggcagccaggcagtcatcaaaggaatccaggtattctacatgagccgtgtcgctcaggccgggcatttccagcgcggagggggaaaaatcgtatgcgacagcgacattgttcagcgcgccgttatggcggcgcagcagcacccaggaaaactccgccgacagatagctgtcggtcagcttgtagccgtagttctccgcctgggacatgtcgtcggtcaggtcaatgacaaaatccgcctgcccgtccgccagcatggccttgtactcgctgcggtccgcgggcttcaggaatttgtagcgcagccgcgcccggcctgctgccttttggaaaatatccaccatgatgccggtgggcatgccgtccggcgtcatataggagtaagggtagcggtccgggttgacaagcaccgtgaacaccgtgtctgcgtcgttgcaggcgatgacatagtcttcctcggcgtcggtcaggtaaattttgctgctggtatggctgccggtgtagtatttgttgaacagggtcgtgcgccagctggggtcgttgcggttgattttgctgatggcatcgttgaccagctgctgggtgacggtgtcatccttgcgcatggctatgtaaatactttgctcgtcgaaggtgtcaatgatccattcgttcttcgtctcgcgcagccggttggaggctgcggcagtgatctccccgttgcgcaatgcactggacagctcttcgtcggtgtcatagtacaccggggtgtagcggaaaccgtgctcctcggcgtaggctcgaaagctctcattgcggccattgccgctgcggctcatgccgacagttatgccgtcgaaggtgtcgtagtcgccggccacaatgctgcggttgccggctttgacggtcagcatcgtcgccaccgtgccgatgggctcggcggaaaaggcaaactgctcgtcgcgctccgcggtccttcgcagcaccgggatcaggtcgatctgcccggcagccagctgctgcatggcctgttgggtgttgccgtccaggcaggagtatgcaaaggttacgttctcatgctgggcaatgtcctgcagcagctcataggcgtagccgctgcggctgccgtctgcagcggtggccatgtagccggtgtaggggtagaagccgacgcgcagggtgcgcagggtggtccggccaccgtccgcggcgtgcacgggcatggcaaagccaagcagaacgctgacagccaggctgaacaacagcagcatggctgccccgcgtctgcttacgccgggattctccttcttattcatcgaaaacagctccggtctttttagcgcggcagccgggcagggatgcagggcccgcggcgccgcacgtatattttgcaggcatggcccgggcagcttcggtgtcgtccgccgtgggcatcatctcggatgtttttacagctcccggatcgcggccagcacttcctcatgcgcggccaccaccggcggccagaggctggcatcctccagcggcttcgggccgcggacggcgtcgcagagcgtggcggcggtcttatacaggcggtccatgccaaggttctgggccacgcctttcagcgtgtggctggcgcggaaggcaagctcccagtcctgcgcggccagcgcgtccttcagctggttgaagctggggtcgccggggtatttcagcacaaacttcttgatgagtgcctcgctgggcagtcggctgatggttgccttgtaatcgccgccgatgcggtcataaaattcctgcagtgtcataggggaccttcttctttcttacaatttatcggattcctgatttggctttggtttttctgcttcttctgcggaaaatgctgcggtgatacatttgttccggcactccttggcctgatacagcagcttgtccgcctgacggatgccggggtcaagggtgcaggcaccgtacacaccgccgatgctgaccgtcagatgcaggtcggggtattcgatcatgtgcagcgcctgcaccgtcgcgcggatctgctcaagccgctttataaagacatgctccgggatatgcgggaaaatcagcaaaaactcgtcgccgccgtaccgcaccagtgcatcgctgcggttgcgcacgcaggccgttaccgcactcaccagaatgcgcagcgcgtcgtcgccggcctgatggccgtagacgtcgttgatctgcttgaactggtcaaggtccagcatggctacggcatccacttccatgagcttccgcagctgcttctcaaagaagcggcggttataggcgttggtcaggacatcatggtagaggtcatgatggtagtcaaaaaactgctctgcagggtcggcctgcccggcagcgccgatatacgcgggtacgctgtcatcgctccacagggagcacaggcgcacgtgatgccagcgaagctcgccgtcaacgggcagcagcatcgaaagctcggtgtaggggtgctctgcgctggtggcgcgcagagccttctggatacgcgcaatatccgcaggggcaaacccggtttcctcgacttcatcgggcaggtgcagatccttgggcacgcccatgtgctccgccgcccacgccgagaaggaaagatgaccggtggcactgtcatagtcaaactgtatgcagcggacgctctggttgaagaaccggcccttctgctgcatgcgggacagcgactgcactatatgattctgcccgggcagtgcgttctcccgcaggagggcatcggaaatatgctgtgcatctgccagacggtgcagctggttgccggtgtccgaagcaatgctcagctcggcatgcagctgcgcgccgcactcggtcaggcattccagcagcagcgggttgaactgcccgcactccccgttcaggatcatcttcaccgcggtgtcgtggtcaaacgcttttttgtagcagcgctcgctcgtcaatgcgtcgtatacatcggccaaagacacgacctgcgcggcgatggggatctgctcacctttaagcccgtccgggtagccgcgcccgtcccagcgctcatgatgccagcggcatatagcgtaggccgtcttgacaaggtcggactcctgctggaacggcagcttttccagaatctccgaaccaattgtggtgtgggttttcatgacctcgaattcttccttcgtcagcctgccgggcttgttcaggatggattcgggaatgttgatcttgccgatgtcatgcagcgccgaagcggtgctgatgagcgaaatatccgcggcggtcaggtggtatttgtcggttttctgcacaagcgtgtgcagcagaatatcggtggctgtctggatatgcagcacgtgcataccgctttccccgttgcggaactccacaatatggctcagtatgttgatcatcgtggagttgcttttctctttttcatagacctgctcggccacaaggcggaccagccgcttctgtttggcgtaaagcatcagggtattgatgacgcggcggcgcacgacggccatgtcaaacgggcggctgatatagtcggtagcgcccagatcataggcacgctcgacgtagctggacgcattctccgccgaaatcatgatgacggggacctcgtcgatccagtggtatttgttcatcatggccagcacttcaaagccgtccatctcgggcatcataatatcgagcaaaagcaggtcgatgtccgtcgcggactgcaaaatggccacagcctgtctgccgttttccgcctccagaatctcatacccgtcacccagcatctccgtcaggatggcgcggttcatcgcggagtcgtccgcaatcaggattttctctttatcactcatgacttcacctataattacaagcggagcaaacgcgcggtaaaaatgtacattctccaatgctttatcattatagtataataggaaccgcaaaagcaaccaatttgtgcaaaacaatcgaaaaatgttccaaaagagcaaaaaagatgaaaaatatgccaaaaggaaaaagcctcccccgcgatgcagcgatagcgggtggtttgtagggagcggtcttgaccgctccgtgcccgccggtggcaccggaaaacaccccggggaggggtaaatcgctcccccgcgtagaacgtaggggccgggcatgcccggcccgcagccttgcggcaggcacaccgttcaagggccgctgcgcaaggccgcgggccgcgacaaaaaaggcgggtgctccacctgcgtgaagcatccgcctgaccccgaaattattttctctttctctccgtaaccacggcccaaaccatgctcaccgctgcggcggccagtgcggggtagagcaccagacaaaacgcctgataccacgtcggcacaaaatactgccatacggcgggcagggtgtcggcggcgttcagcgtgatgtcgctcattgtcagcgtcacggccttgttttcctcggggctgcaggggtcgagccgcagcgcggccagactcgtgcgcggcagtgtgtagacgtactgcccgcttcccagactctgcgggaacacccggcggtccgcggagtaatcctcgccgaccttcgtcgtgtagtacaggcacatttcacgcgcctcaccgtcaaattcggcggtgtaagaaatcgtgcgcaccacgcggctgcccacgtcctccaaaatcatctgcgggtcgccgtcctgtgtcgccagcgtgccgtccgcgccctgcacaaggcccaccagctgccagtcggtcacggccatcgtctcctcggccagacggccctgcgcccgggcggcggcgtcactgccaaagtgcaccgcgcccagcaccagccagacggccagcgccagcagatacgccgtcagcggcagcgcgccgcggcgggagaaccagtttttcaaagccttcactgcgcgctcacctccatcggcatcggggcaaagcccgcatcggtcacgcggtagagcagcgtctcgccgctctgcgccgccgccagcttgtcggtaaacaaatcggcgtagctctgcacaaaaatatcgtccagcgtctggatgtacagcaccgtgcagccgttgccgcgcacgatgctgtccagctcctgcgccgtaaagccgtggtaataggtgtttttcacaccctcggcgggctgcaattcgggcagacccagctcgccgccgccgccgatcatcttggtttcgccggtgtcggggtcggtcgtgaccgtgccggaatagtcaaccaaaatcgggtaaaagtcaaacacggcgctgaaccagccctcgccgttgtcgccctgcccgacataaaagacgcggtcatcgggggcgaggtagctgcacaccagctcggcctcggcgcgctcggcgcggcggtcggtgaactcgctgtcggcaaagcccagcacactcagctgcggcagaatcagctggccctggcggaacagcatcccgcaggccagcaccagcacaaacagctcaaacacagggcgcggctggcggcgggtcgcagaaaaaaccgctgtcgggccgtctgccccgcccttgactgtgatctgcggcagcaacgccaccgacagacaccccagcgccagaatgaaccagccgatgtagtagctgtaaatgtagcggttgtaatcggtcagctgctcggcctgaaaggttttgaagataaagccgtagctcagcgccagcatgaggttgtagcccaaaaagcagatgccggacagcgcaccgatgaccgcaatgcgcgccttgagccgccgcgacgccgcagccaggatcgccacggcaaacacgatggcgatcagcgcgaccacattgcggccctgcccgatcatgctcagcttgccgtcactcgtccagaattggtggcccatgtcggccatcgcagtgcggaactgggcctcgcgctcggcgtaaaagccctccaccggctgccccagcagaattttaatgccgttgaccacgacggcggacagcggggcgctcgtctcgccgacgccggaatcactggcgctgcggctgacgagccagccgacatagcgcacattccacagatagtaaattgccatcggtgcggcaaagcaggcaacgctgaacccggtgcgggggagcagaccggccttgaaatcgccgtcgtcggcaaacagccactcgtccacagccaccagccccgccgccaccagcgccaatacaaatgtgttggccttgatgttggcagacagcgccagaatcggcagcacggcccacttaggggctgaattttggcgcagcgccagccacgcggccaccgccccgccgaacaccagccccgcaggcacgtcgccgtagctggtcatgtaggtggtcgtcaggtagatcgtgtggttgtagttcgtgaagaagaacggcacgcaccacagcacggcggccatcggcacggccacgcgccatttttcccgcgggacagcccccaaaacggcggcaaacacggaaaaatacaaaatgtcatatccgacgtaaattttccaatctgcataatcgccgaaaaactggaagaaatacgccagcagcggcaggccggggttctgggtcgcggcccagggcgtgcccagctcggcggtggcgtacaggctgtcgttgaccttcgtgatcttgaccgccgttgcccacaggctcagctcgtcaaagtccgtcgccataggctgccgcacaaaaaagtagaccgtgaacgccagcgccatgccccagaaaagcacgctgcccggggtgaaaaggcgctgcgccgcgccggtgctgcccctgcaggacgccgcgacccagacgccgcccgccagacagagaagatacagcagccacgcggcggggtagagcacgcccgccattgcggccagtgtcagcaccgcgacgatggcggacagtgccgtcagtggtgcgacggatgccgggacgcggcatttcaacgtcagcaccgcgcagccgcagaacagtgccgccaccgccgccagtacgcagagtagttccatagggtcagctcctttacggggaaatagtaggggaggaattcatccctcccgtgaagttttccattgccgcacacgggcacggagcggtcaagaccgctccctacagggcacccgtaaacgttagtccgtagggaggggtcttgacccctccggggaggtctccgccggcgcacacaccccgggagggataaatccctcccctacgaatccttctttataaagaaggaacaaaccgcgctcgccatcgccgccgccactgccggcacaaacgccagcaccagccaccagcctgccgtcgggacaaagcgggtgtaccatgggcgcggggggctcagatcaatgccggtaaacagcgtcggcacgccgcccacgctgtccgggtcaatgcgcagccccgtgacccactgcccgcccaaatcaaacgtgtagacgccgggggccgtgaccttggcgtagaccttctgtgcctcggtgtagtcggtctggccgggcttcaaatagtacagcgccacgccgcccgggggcagtcggtgcgccgcgtccagcacggcggtctcgatgtacccctggccctgccagtaaatatgcgggtcgctgtcggtggaaagataccacgccgggtcgtcgtccggcggcgtccaccattcgttggacgaatagggcgcaaagctctcggtcaccagctcggcggcgtccacgtgcgtctggggcattttgccctgcagcttgtagttcagcatgacgccgcagccgacgagacaccgcaccacccagagcaccgccgccagcagatacgccagcaaaagcagctgccgcgccttcaaaagcggtttacgcatttactccaccccgctttctgccacagctgccagcttgaacggcactgccgcgtccgcgccctcaaaatgatagagcgttgcgggcatgtcgttggtcagcccgccctcaaacagggggctgaactcccgctgcagatagtcgtccgcgcggtcgatcaggatataatcgcagtccttctcggccatgtaggcgaccagcgtgtccggcacgcagacggccttgtagtcgtagagcgtccagttttcgctctcgaccagattcataaaatcgctgtcccagcggtcctgcgtctcgcccaggcggccatagaagccgccaaagccgttcacgacctgcgcggtcagctcgtaccgataataataccatcgcgtggcgtcgtcgccctggctgatgaccagcacgcggtccggccagcccagcacggtgttcatcgtgtcggcgcggttctggacgtcggcgcgcagcgtgtacaggctgtcggcaccggaccagaagcccgccgcgggcacaccgcgccagcagaatacggcaaaaatcaccgccgccgcgccgcccgtcgccagctgcgccagccgctcccgcgcgccgcgcgccagcagacagagcatcgtcagcatccacgcctgatagtagggggccagatagcggtcatagtccttgagcgccagtccctccaggtcggagaagttgtagttgtacagaatcagatggaacagatacagcgccgcaaagcagaacgcaaaccccagatgcgcggccagcacgcggcggcgcggtgcgcccctgtcagcggccagccatgccgcagcggcgaccatcgtaatggcagctacagccatgatgccgccgcccaaaaggcagatgcgccgcgtaaagaacgcgctgcccatggcagccatgatctgcgcgaacttttcggtgcggcccatgcccagcagctgctttacgccgccgaccaataccgcgccgtagctcaggccctcactgccgacgctcgcggcggtgtccgccgtgggggtgacagccgccgtgtagcggccccagcttgaaaacaccgccagcacgataacagccagtgcgcccgcccggagcagagccttggggaacgcctttctgcagggctcgtctgcggccagccacagatccagcccgatcaggaatgccgcgatcagcccgtaggcaaagcagatgtccttggtcagcgtcagcacggccagcggcagcacaacaagccagtaggcaattttgcggcgtcccaccgcgaaatacaggcagagtgtgccgccgaacagcatcgcgagcggcaggtcggccatggcgttgacgtactgcgctgcgtagctgcccgtgggcgtggccgagaagaaaaacggcagcaggaaccccgccgcaaacacgagcacgccgcccgcccagcgctcccgcggcagggcggacgcagcggccagacaggccagcgccagcgtgtcaatggcggccagacaggcccactcggcccaagggccgaagggctggaacaaaaatgtgatcagactcgttgccgggtaggtgaaggacgccttcaggttgaccgggtcggccacatagaatgcgccgcgctccacgaccatcttgggggccaggccccacgccgtgaactcatcccactgggtaaacatcggctgctgtacacagaacagcacccagataaacacagcaccgcctaaaaacagcgtgaaaccggggacggaggccgctcttttccaggcagcggccaccccggcggggcggtattgcacaagcccgacgacccacacggcggccagcgccaacagtacagccacagcgccaacgcgcaggaaacccgcgaccccgcagagatacagcacgaccaccgcgccgctcaataccggcagcggcagcaaggcgggggagagggtaaaccgctccgccagaatcgcacaggccccgcagagcagaagcagcagtaccagcgcgtagagtagatgcagcatgggcgtgagcctcctttcgtgttgtggtaagccttccccccgtgggggaaggtggcccgtagggccggatgaggggcggccttgccataattgcccgtgaacggcgtgccggagcacacccgcccctcatcagtcaccttcggtgacagcttctcccccgaggggagaagccttttctttacttataaatcgtatacaccggtcccacaaagtaatgctggaacaaaagcacggccccggcaaacgcataccagccgcacagcgttaccgccagcgtctcgcccttggccgcggtcagccgcggggccagcacccgccgcagcacagccgccgcggccagcaccaacagcagccagaccggcaggaaataccgcgtctgcaagccgacgatgcgcaccatgcccaccggcgtgtaggtgatgtacatggcggtcatcgcgcccacggcgtagaccaggccgaacgcgcccagccagcccatgcggcgtcggcccagcgtgtcggtctgcgcggtgcagagcatcgccgccgccagcagcaccggcggtgcggtgatgctgataaacgcaatcggcatatccttccagccgaacagccccagttggccgaggaacccgtcgttctcatacagtgtgcccagcaaaaccgcgatgtaacgcagcggatttttcaaaacaaacagcagctgcgcaccgccgttcacggtggtgccgccctggcgggcaatcgcgccgtagttgtggcgcaaaagcgtgccgtactgctccacaccgagggtcagcgccagtgcacccgcagcggtcagtacggcgtacacggcgcggctgaaacgcaccttccactcggatttccgtaaaatcagcggcagcacgacccacagcagattgatatacggcttggtgccgttggcgaacacgcaggccagcgcataaaaaagcgccgtcttatcgttccattcgtcccgcgtcagcagggccagcatgaggtaatagcagcccaaaagcgtcgcgtcgtagctcagcgacgcacccatgtagagcgacatcggcataagcataatgcacaaaaacgcaggtctgcatttgtgcgcactgcgcagcgctgcatagcacagcgccgtgtaggccagcaggttcacgagccgcccgccgtacaggcagcccagtgcgccaagcccaaacagccgcgccagtgccatgcccagcgcgccgggcaaaaacggaaaaatcagaaagctgaccggctcggtcacgcgctgcggcacagagtccctatacaaccaggtaagatactgttcaaaactgtcccggatgctctccacccggccatccttgccgtactgcttcagcgcgtacccggcggagttgaacggctgttcggcgtgggtgtcggggtcggtgcccagccctgccgaggtgtgcgcgttgacccacgcgccggggaacgccgcaacaagctcgtccacgtcctcggggtagccgcgctgggcatcaaaatcgaaccggcccatggatatagcgtaggtgcgaagataatggtcggtctcgtcgggggtctgcatcggcgggttggcaaaggcgaacagcacgccgcacagcagaatgcacgccgcgccctttttggcaaagtccctgacccgccgcagcgccagcgccgccgcaccggccagcacggccagccccacgcaaaggccggtcacacccgccgcagatacgccgcgggcgtccagcccgtagaacacgcgccagtagtagctgacgacgacgcccagcgaggcgcagaccgccaacacgaaagcccaccgggcggcgggctgctgcacggtgggtagggacaacttctttttggaaacgtttgacataaaatcagattcctgtaggggcgaggcatgcctcgcccggctgttcgccgcgccgcaaggtatccggcttggcaaggtcgggggccgggcgtacccggcccctacagtgcatgaaaaatctgcgatgttacagaatatactgcccgaccttgtactgatccaggttgccgcgcaggaactcgatggtcgcagccaggccctgctcaaaggtgtactggggcgcccagccggtcagctcacgcagcttggtggaatcgcccagcaggcggttgacctcgctcttttcggggcgcagacgctcggcctcgcagacgatcttggcgttcgggttgatctgggcgatcagctcgttggccagatcaccgatggaatgctcaacgcccgtcgcaatgttcagctcctggccaatcgcggcgtcgcagtcggcaatcgtcataaagccgttggccgtgtccttgacatagttgaagtcgcgggtcggggtcaggctgccgagcttgatctcggtctgaccggccagcagctgggtgatgatggtcgggataatggcgcgtccgctctggcgcgggccgtaggtgttgaacgggcgcacgatggtgacaggcaggtcaaagctgcggtagaagctctcggccaggcggtccgcgccgatcttggtggcggagtaggggctctggccctggaacgggtgcttctcgtcgatgggcacgtactgcgccgtgccgtagacctcgctggtggaggtgacgagcacgcgctgggtgtccagctcacgcgcggcgttcagcacgttcagcgtgcccttgatgttggtgtccacgtagctgtccgggctgtggtaggagaaggggatcgcgatgagcgcggccagatggaacacgcgctcctgcccgcgcatggcggtgcgcacgccgttggggtcgcgcacgtcgcccatgaagatgtcgatttcgctgcggatctccggcggcagggtgtcgatccagcccagcgagccaaaggaattgtacagacagaacgcgcggaccttttcgccgcgcttgacgagttcttcggtcaggtggctgccaataaagccgtctgcgccggtgaccataacggtgtgtgccattgcttgctcctttttaaaaaggggacaatgccccatatttcaactttattacaaaacagtataaccgatttcggggaagatttcaactgtaagttatgaatagtgaatgggcggctgcacgaacgcggccctcatccggccccgtccgctgacggatgagggcaaacctcgtcttacagcccgtttacagtttttgcaaaaaatccctatttccctattgacatacggttaattccgtgttatcatacagtcaacctacaaatcacataggtttattacaaaaaggcaaggaggtgcaaagtatatggctcacgttttcggtgatctgctgcgtcagaacttccgctgtggccgaatgcctaactcccgggcaaatgcagtccgggcgcggggcaatgctttgcactgcctgtaaaacctgcgccgcactgcatattctgcccgggagttgtaccaaaacgacccccggcttttcttttaaaataaaaaaacagaaaaaaacagaaatgaggattttatcatgagcgagcgtaaactgcattttgagacccttcagctgcacgtcggccaggagcaggccgatcccgtcaccgattcccgtgcggtgcccatctaccagaccacctcctatgttttccccaattcccagaatgccgctgaccgctttgcactgagggccgagggcaacatctacggccgcctgaccaactccaccgaggatgtttttgaaaagcgcatcgcggctctggagggcggcgttgccgcgctggccgttgcctccggcgccgctgccatcgactacacccttcaggcactggcccagaacggcgggcacattgtggcgcaaaaaaccatctacggcggcacctccaacctgctggcccacacgctgcccgcgttcggtgtgcagacgacttttgtcaacgcccatgacctggccgaggtcgaggctgccattcaggacaacacccgcgctgtctatattgaaacgcttggcaaccccaacgccgacatccccgacattgacgccattgccgctatcgcccacaagcacagcattccgcttgtcatcgacaacaccttcggcacgccctacctgatccgcccgatcgagcatggtgccgacatcgttgtccattctgccaccaagttcatcggtggccacggcacctctctgggcggcatcatcgttgactccggcaagttcgactggaaggccagcggcaaattccccgccttctcggagccgaaccccagttaccacggcgtctgctttgccgaggctgccggccctgccgcctttgtgacctatgtgcgcgccgtgatcctgcgcgatctgggcggctgcatcagcccgttcaacgcatgggtgctgctgcagggtaccgagacgctctccctgcgtctggaccgccacaatgaaaacaccaaaaaggtcgtcgagttcctgacccaccaccccaaggtggagaaggtcaaccaccccagcctgcccgatcaccccgaccacgccctgtatgagaagtacttccccaacggcggcgcatcgatcttcaccttcaacattaagggaggccagaaggaggccttcgagttcatcgatcatctgcagatcttctctctgctggccaatgtcgccgatgtcaagagccttgtaatccacccggccaccacgacccacggccaactctccgatgcggagcttgccgatgtgggcatcggccgcaacacgatccgcctgtctatcggcactgagcatgtcgatgatatcatcgccgatctggcacaggctcttgacgctgtcgagtaatttgtaaagacttttagaggaaacagggattctatagaacaccgccgcccgtgggttgcaagccccatgggcggcgggttttgtttgcaatttttacggaagtgttgtatgctttgtaggggccgggcatgcccggcccgcgggcttgcggccggtacccgctgccgggaaaactgtagggcggcatgccctcatgccgccgccaaccgcgccatgtgacccgtttacggtacggccacgcggacgctcacggcggggtgagggcaccccgccctacgcatacgagacaaacggtgcgcctgccgtattactgcagggccgggcatgcccggcccctacaccgctacaaggaaaaatgaaaacatgaatatcatcgaaatcacagatttatccgcccccgagctggctccttacaccaagctcaccgaggcccagctgcgcaataagctggagcccgaaaagggcatcttcatcgccgaaagccccaaggtcatcggcacggcgctggacgccgggtgcgaaccgctctcctttttgatggagcgccgccagatcgacggccccgccgctggcgtactggcccgctgccccgacgccgctgtctacaccgcggaccgcagtgtgctgcaggccctgaccggctacgcgctgacccggggtgtgctctgcgccatgcgccgtccgcagccgcgcagcgtcgaggcactgtgcagagacgcccgccgcgtcgcggtgctggagggcatcgtggattccaccaacatcggggccatcttccgcggggccgccgcactgggcatggacgcggtgctgctctcgccgtcctgctgcgacccgctctgccgccgtgctgtccgcgtcagcatgggcacggtgttccaggtgccgtgggcaacgctgggtgacagccctgccgactggcccgaggccgggatggcccgcctgcacgcgctcggctttaaaactgccgccatggcgctggacagccgcgccgtcagcattgatgaccccgcgctgcgcgccgagccgcgccttgccatcgtgctgggcacagagggcgacggcctggcccgcaccacgattgcccactgtgactacaccgtcatgatccccatgcagcacggcgtagattcactgaacgtggccgcggcaggggccgtggcgttctgggagctgcgggcaagataaaaaatagcgaacatcataggggcggattctatatccgcccgtgccgcgctgcctttggcacaattccacgggcgcatatggaatgcgcccctacgggtatttcccggcagtgtgctgcaccgcaaacttcctccgtcaatctgccacaaaaatattacaaaacttttacgccctgctgaccgaaacgtcggcggggcttgttgtttttgacggagcaaaatgttacaataattatacaagcacgcaaaaagcgtgcaataacaaatgcggaggttttcttccatgggcttcctgaaaaaattcaccaagcaggagatcagctggatgatgtacgactgggccaacagcgcccactcggtcatcgtcgtgaccatcctgcccatcttcttcgacaccgttgcgggctacactgccgacagcgtgtccagcatgtccacctggggctttgccaccagcctggctatggccattgtcgccctcagcgcaccgttcctgggcgtgttcggcgacatccgtggtatgcgcaaaaagctgttcacggcatttatgctcatcggtgttgtctcggtagcagggctttccttcacgccgttcatggacttcaccgcctcgccggaagcggcgggcagggtcgcggcgatggtgctggtgctctacatcacaagcaccatcggctttgatgcgtcctgcatctactacgatgctttcctgaccgacgtcacgacggaggaccgcatggactcggtctcgacgctgggctacggcctcggctacatcggcggctcgacgatccccttgctgattttcctcatcatgaacgccgtcggcgtgccgatgctgacctgcctcgggttcatctttggcctgaccgccgtgtggtggctcgtgttcagtgtcccgctggtcaaaaactgtgagcagacctccggcaagccctataagaagggcgacgtgggggccagcattaaaaacgtgttcacgaccatgaaggagatcggcgcggataaaccaatgctgatctacattatatcgtactttttctacatcgacggtgtgcataccatcatcagcatgtctacaagctacggcaccaacctggggctggactccgccggtatgctgctggcgctgctgctggtgcaggtgctgggcctgccgttctgcctgctctacatgaagctggccgagaagttcggcgcgcgcacgatggtcggcgtcggcatctgcgtttacatgtttatctgcgtatttgcgttctttatgaacagcctatggcagttctggatgctggccgtgctctgcgccaccagccagggcggcattcaggcgctgtcccgctcgatgttcggcaagctcattcccgacaagtcccgcagcggcgagttcttcggcttctttgacatcttcggcaagttctcgtccatcatgggcccggcgctcgtcggctttgtcagtgcctttaccgccaacaaaatgctggccgaccagggtctgaccgccgctacagccaccgccgagcaggtcgatgccatcaatgccgccgccggaccgttcggcattttgtccgtcatcctcatcatcattgtcggtgccgtgctgtactttggcgtgctgccgaaagttatgacgaatgacgagaggaagatttgaagcagaatgccttcccccttgggggaaggtggccgaggccccgcccgaggtcggatgaggggcgaattgccggatattgcccgtaagcgggaaataccgtaagctctgccctcatcagtccgctgcgcggacagcttccccctcgggggaagcctttttgaaaatttgactttttcccttccacgcagtacaattatacctacgctgatacgaaaggggaccctacatgccggaaggctatacccatgtgcgcaccgcaagaaaagctgcggaaaccatccactacaaaatccagtgcccggcggcgtttgcggcgggtgccaacggcccggacagctttttctgctttgaaatctggaaaaagcgcgccaagcgccgctatgacctgcccggcctcggcaaccgcatgcacgaggaaaagaccggcgcgttcctgcgcagtctttgcgccaacgtcaagacccgcccgcaggtcgagtacacgctcggctttttgagccactacgccgcggataccgtcgtgcatccgttcatctgtgccatgtgcgcgcccggccagccctacgcgggcaagggcgggcacggctatctggagatcgcgctcgactcgacgctccacgccgaggacaccggctctgcgctggttcccgttgacgacgtcagccccctgcccacaggggaggagctggccgacatcacggcgctgctgcacacctgtctgctggaaacctacggcgaggacatccccgtggagtacctggccgatgcgttctggcacacctacaggctgcgcgggctgttccccagtaagcacggcttgcgccgggtgtttttctggctcgtggagccgctgttcggcgggcgcggcttcatcacgggccacgtctcgccgcggcagctggacaagcgcctgcccgacgactggaccgacccgtttaccggcgagcatcacgacggcggcctgtttgcgctgctgccaaaggcagtctttcgcagtgagcagttcatgggtgcggcgctgctgtactggatgaaccggctgccccccgcagaatttgccgaaaagctcggcagtatgagctatctgcagggcatcgccacccccgagagcgaccctgacacaacaaatcaaaccgaaaaggagaacaccgtatgattcgcattaccatgcagaacggcaagaccatcgacattgagctggaccacagcgcagcccccatcacctgcgagaactttgagaagctcgtcaaggacggcttttacaacggcctgaccttccaccgcattattcccggcttcatgatccagggcggtgacccgcagggcaccggcatgggcggtcccggctggcacatcaagggcgagttcctgcagaacggcgttgccaaccccatcaagcacacccgcggcgtcatcagcatggcccgctcgatggacccgaactccgccggcagccagttcttcatcatgcaccaggatgccccgcatctggacggcagctacgccgcctttggccatgttgtgaacggcattgaggtcgtcgatgagatcgccaatgttgccaccgactggaacgacaagccccgcacgccggttgtcatggaaaaggtcgagatcgtctgacagcaataaagagagctatgcccacgggcatagctcctttttattataaggcaacaccgcacaattcccgcctagcggcttaagcaccgctccggcggctgcggtacggcatctgcgttgccaaaatgctcgataagacatccagtattttctgcgcttttggcttagcagctgccgcacctcgctcgccgtatcggcacttagaattatgcggtattgccataaggcttcccccacgggggaaggcgtttgattttaaatcacataatcattccccggctggctggtgttcaccaggtccgccagagtgatgccgtcgaaatagtcgttgatcatcgtattcagcttgcgccacatcggcagggtgcggcactcggccatgcggcggcactccacggggttctgctccaggcaggccaccggggccagactgccctcgctcaggcgcaggatgctgccgacggtgtactcctcgggcgctttggtcaggcggtagccgcccgacttgccgcgcagaccggtcaggtagcgctccttgacaaggctcttcacgatggcctccagatacttttcggaaatttcctgccgtgcggcgatctccttcaggggaatatagccgtcgtgctggtgctcggcaatatcgatcataacacgcagcgcataacggcccttcgttgaaatcatcatagtggtatgctccttactgttcttataacctattatacaggttggtaaataggatggcaacacctttttgcaaaataattttggaaaattccctattaccctattgacaaacggggaaatatgttgtacaatcctatcaacctacaagaaaggtatgaattgatatgcgaaagggatttgtgccatacgcgcgatgtcgccgtcatgagctgtaaaaccgcaaccgatttacaaataaacagaaatgacgatggaggaaactaccatgagcaaaatttatacttccgcagaccagctgatcggccacaccccgctgctggagcttacccatattgaaaacgccgagaaccttgaggcaaaaattctcgctaaactggaatatttcaaccccgccggttccgtcaaggaccgtatcgccagggccatgatcgacgacgccgaggccaccggcaagctgaagcccggctccgtcatcattgagccgacctccggcaacaccggtatcggtctggcgtccgtcgccgccgcccgcggctaccgcatcatcatcgtcatgcccgagacgatgagcgtcgagcgccgccaactgatgaaggcctacggcgccgagctggtgctgaccgacggtgccaagggcatgaagggcgccattgccaaggccgacgagctggcgaaggagatccccaacagctttgtgcccggccagtttgtaaacccggccaaccccgatgcccacaagcgcaccaccggccccgagatctgggaggacaccgacggcaaggtcgacatcttcgtggccggtgtcggtacgggcggcaccgtgaccggtgtcggcgagtacctgaagagccagaaccccaacgtcaaggtcgtggccgttgagccggcttcctcccccgtgctgagcaagggcactgcgggcgcacacaagattcagggcatcggtgccggctttgtgcccgacgtgctgaacaccaaggtctacgacgagatcatccccgtcaccaacgaggacgcctttgccaccggcaagcaggtcggccacaaggagggcgtgctggtcggcatctcctccggcgctgcgatctgggccgccatccagctggccaagcgccccgagaacaagggcaagaccatcgtggccctgctgcccgacaccggtgaccgttatctgtccaccccgctgtttgcggactgattgcaataacaggaaacctttgctataataagggtactgttgcatacgaagtgaaggccgtaggggccggacatgtccggcccgcagcttttccggcaatgccctgataaggcgaggccgcgggcgaggcatgcctcgcccctacaactcaaaagcaaaaatgtgcagcacgaaaaaaccgtgctgcacatttttttaaccaaggaggcccctatgtcaaatacccccggcgcgttgatcgccatgagcggcggcgtggacagcaccgtcgccgcctacctgatgaagcaggcgggctgccgctgcatgggcgcgaccatgcgcctgtaccagaatgaggatctgggccagagcgggttccacacctgctgctcggcgaaggatgtcgaggacgccgccgaggtcgcgttccagctcgacatcccgtttgaggtcgtgaactacaccgaggaattccgcgaaaaggtcattgccaagttcatcgagacctacgaggcgggcggcacgccgaacccctgtatcgactgcaaccgcacgatgaaatttgacaaaatgctggactttgcccgggagcacggcctggactatgtggtcacaggccactacgcccgcatcgagcaggaccccgccacgggccgctggctgctgaaaaaagcactgtacaccgataaagaccagagctatgtgctctacgttctgacccaggaccagctggcgcacacgaagttcccgctgggcggcatggacaaaccgtccatccgcaagatcgccgaggagcagggcttctgcaacgcgcgcaagcacgacagccaagacatctgctttgtgcccgacggcgactacgtcggctttatggagcgctacactggcaaatattacccggacggcgactttttggacgtgaacggcaacgttgtgggccgccaccacggcgcggtgcgctacacctgcggccagcgcaaggggctggggctggcgttgggcgcgccggtctacgtctgcggcaaggatatggagaagaacaccgtcaccgtcggccccgagagcgagctgttcaagacgacgctgatcgccggggacttcaactggatttcggttcccgagctgaccgccccgatgcgcgtcaaggccaaggcccgctaccgccaggtcgagcagcccgcgacggcctacccgctggaaaacggccttgtgaaggtcgtttttgacgagccccagcgcgccatcacccgcggccaggccgtggtgctgtatgacggcgacgtggtcgtcggcgggggaacgatattataaaaatagattaaaaataataaatatggtggagttttcgccccgcggggcgaaaacaaaaatacggtgcagctgcgattttgcagctgcaccgttgttttttataaaggatgcagggggcggacatggttcgcccgcggtacatagcggcaaccgccatacacgcgggtcgatggcgggcatcgacccctacatcgtaggggcggattccatatccgcccggaaaccctgtggctgcggcaacgtccgcgggtgagcagtgcccgcccctacaaaacgcggcttaccgttacttacagcttctccagcgccgccttcacgcgcttaacggtctcctctttccccatcatcgcggccaggtcggtgccgccgcccggggtgcgggacttgccggagagggcaatgcccagcgggaacagcagccagccgttcttcttctccatgctctcggccagcgtcttgcacgcctcaaagatcgcgtcgcgggtccaatcggtctgtgcctccagcacgggcagcagggcggtcagggcctccttcgcggactcgggggtcgttttctgcttcttgttgcggtacatctcagcgtcaatgggcagcacggcgtcaaagaagtcgagctgcggcgggatgtcctccagcacctcgcagcgaggctgcaggttggcgcagagcaggtcacggtcaatgctgcagtgcacggcgctgtcgatgaacgggtcggccaggcggcggaattcctcggcgggcagggcacggatgtaggcagcgttgatggcacgcagcttcagcgggtcaaagatagccggagacttggaaatgcgggacgggtcccagatcttgatcatctcgtccagagagaagatctcctgctcgccctcgggggcccagcccagcagcagcagatagttcagcacggcggcgggcagatagcccttcgccacgaggtcctgatagctggcatcgccgttgcgcttcgacagcttgttctgcgcgtccttcatgacgggcgggcagtggatgtagacgggcttctcccagccgaacgcatcgtacagcaggttgtacttcggcgtcgaggacagatactcgctgccgcggatgacatgggtaatgcccatcaggtggtcgtccacgacgttcgcaaagttgtaggtcggcataccgtcggtcttgatcaaaatctggtcgtccagctccctgacatcgacctcgatatgaccgtagacaacatcgtcaaagcccgccacgccgctctcggggatcttctggcggatgacatagggctcgcccgcggccagcttggcggcaacttcctcggcggacaggtggcggcagtggccgtcgtagtgggtcatttcacccgcagcgcgctgggcctcgtgcatttcgttcaggcgctcctcggtgcagaagcagtagtaggccttgcccgccttgacaagctgctcggcgtactgcttgaacatacccatgcgctggctctgcacgtaggggccgacgggaccgcccacgtcggggccctcgtcccaggtcaggccggtagccttgagcgtgccgtagatgatgtcggtagcgccctcgaccagacggccctggtcggtgtcctcaatgcgcaggatgaaggtgccgccgttatggcgggcctgcagataggtgtacagtgcggtgcgcaggttgccgacgtgcatatagcccgtgggcgacggcgcaaaacgggtgcggacggtagacatagttattacccctttataagacattcaattggtttcattataggcggacggaaaggcggtgtcaatgggagaaaaggcttccccctggggggaagctgtcagcggccctgaccgctgactgatgaggggaaaccttgctaccgtgatttgtttacaggcagcaacgacaagcttttccctcatccggccctgcggggccaccttcccccaagggggaaggcaaagcgcacgggcaatcaaaccaaaaactcctcaaaccggtgcaggtcgtcaattttgactgtgccgcggtaatacacgccatcctcgcggtattcctccgcggcgacgctgccgcggctgcggagaatgtccgccagcgccagcttgtcatagggcagcacgatctcaatcgtgcgcacgcggtggttcagcacctcgtcgagctttgccagcagtgcgggcagaccgtagccggttttcgcgctcgtcagcaggatatccgggtcaaaggccacggtgttggcggtgtcgcacttgttgtagacgaccagctgggggatgtccgcgcagtcgaggctgcccagcacctcatcggtcacggccagctgttcggcggcctgtgcgtcgcccgcgtcggccaccttgacgatgacatccgcgaacgcggcctcctccagcgtggatttgaacgcctccacaagatggtgcggcaggcggctgacaaagccgacggtatccaccagaataatttgcagaccgctgggcagcaccagcttgcgggccgtcgggtccagcgtcgcaaacagcatgtcggcttcaaaaatctgctcgccgcacagcgcgttcagcaggctcgacttgccgacgttcgtgtagccgaccagcgcgaccacaggcacattgttcttctggcgggcccggcgggtctcgccgcggcgcttttccagctcctttaagcggccctcgagatgctcaatgcggtggtgcagatggcggcggtccagctcgagctttgtctcaccggcgccgcggcgggcacccccgccgcccccgccgccgccgccctggcggctcagggcttcgcccagcccctgcagacgcggcagctgatagcgcagcgtggcaagctcggtctgcagcttgccctcgttcgtcgtggcgcgtgcgcggaaaatctccaaaatcagcatcgtgcggtccagcacctcgacttgcagtgccgccgacaggttgcggatctggctgccggtcagctcgccgtcaaagatggcggctgccgcgttcacattctggcagacaagccgcgcctcggcgaccttgccctcacccagcagcgttgcggcctcgggcgtcgcacgcttctgcacgacctcggccacggcgtccatgccgttggcgtcggccagcgcccgcagctcgtccaggctgcgcgccatatcgtatctgccctgatccagcgccagcagcaccacgggcagcttctcggcgtcggtggctttctgggcagtggtgccaaagtctaattctgtcgtattatcggtcataattcctctttcaaaagatggtaggcgcggcaggggaccggcgtgccgtcaaacttgcggtccgtcacgtcatggtcgtagacaaagcctgccttctgcaaaactgcgctgctggcaatgttctcattggcgtggacggcggccagccagtctgcgcccacggtgtcaaaccagtagtcccgcacggtacagagtgcctcggtggcgtagcctttattccaccacttgcggcccagcgcatagccgacctcccaggcggggccaaggcgttcggtgttcaggtgccagcccatcttcagcgccggggcagggaagaggctgatcgtgccaaacagcacctcggtgtgcttgtcggtgatgccccactggtaaaaggccgggtcatcatagtgcttttcccactcgttcagcgtctcggcggtctcgccccagctgcggtgggcgttccagcgcaggtattgagttacctgcctgtcgctggcccagttgttgaacatcatttcgctgtcgtcgatggagagccgccgcaggaccagccgctccgtctccagctcttgtgtgccgcaatgcttcatgttgtcgccttactttctatggaagatgccgcgcaggatgccaaggcccatgctccagagtctggcgagctgtgcgcggtagagggtgcagtagataaacaaaatcacgcctaccagcgcaaattttataaagaagtgctgccacagcagcgtgccgatggccgtgaccgcgaacgccagcagaaagccggagatcgtcttggggtagctggccaccgtgcggtagtacatctgccccgtgatgctgcggtacaaaaacgcaagaccgttgctggcggccagcgccagcgccgcgccggtcagcccgaacgcgggcacaagcagggcgcagagcccaaagttggacagcgcccccagcccgatgccaatcgtgtcatgccacggcttgcgggcaatcgagttgccgtagaccgtgccctcgcacagaatgttgaacacaacggcgagcatcagcagcgggaaaatggcaaggcagccgcgcttgtccggaaagatgacaaagacgatgtcctcgaacatgaccagcacgcagaagaagccgaagatcagcaaattcagcacgtcatgcacgcggcagatgcgctcctgctcgtcgcggtaatggctgtagacgtagggcccccagtaggtggaaaagcccgcctgaatggccgtgacgagctgcgccaggctgtagccgaaggcaaacaggccctgggcgttctcgccgctggcgttgccgacgaacgaaaggcagatgccgctggacaggctgaacaaaatctgcgccggggccagcgccacgccgtagggcacggtctggcgcgcgatgccgcccagctgtgcgccgggcagcggcgcaaacacggcggcgcggtatttatacccaaacgcaatcgccacaacaccaaaacttaggatcgccgcaaccgccagaacaaagacgttggatgtaaaaaagcccggcagcaggtaaaacaggttgtagcagccctgcatccagagtgtctccgccgtgtaggcgcgcaggtcgttttccaagcgcagcagcacgtttaagtagcgcaccagcatatacagcgccgcgttgaggaacagcagcggcacaatgcccggcccggcgctgcccagaccgaacgccgctgccagcggctgcgcaaagaacacgctgcccgctacgcccagcagcatcataaacgccgccgaaatccgcgtgcaggccgcgaacagctgccgcggctcggccccggcgggcggctcatggtaaaagcgcagcagcgcctgatccagccccagaatgccgatgttcatgatcgtggccgtgtaggtcatgaaggtgaccggtgcgcccagcacctcagcgggcagcagccccttgacgatgagcgccagccccgtgatggcaaagcccagataggtcgccaccgaatatttcatcacattcccggcgaaggattcaccggaggattttttgttttctgacatatgtgtgtcccatcatagcgttgtaggggccgggcatgcccggcccgcggccttgcctttgccgcgcgtttgccgtacagtgcagggccgggcatgcccggcccctacgcggtggtcgttatttcacaaacggcttgatccttgcttccatcgccgcgacctgttccggcgtcacatgcgccttgtccacgtagccgtagatgcgctgggcaaaattggccagcggcgggcagaaggcaaagagcttcttcggctcccaaccgcggcggtagagaaagtgtacccccgccagcgcgcagaatttcagcttgttgaaatgcggcgtaaagccgtcgcccatcggctcgtcccgcggggggttcttgtacacgtcctccagcaggtcggccatccgcttgtaggcgggcgtctcaccggggtcaaaatagccctcgatgacgtccttcgcaatcgggaacggcggctccggctcggccatggcggcggcgaactcgtcgtagcgcgtcacgtaatgggcgtccttgtaaatgaccgggtcgtactcgtgttcaatggggacggggcgcaggatgtggcagctcttgccggccatgtagacctcggcaatggcggtgctcatccagatcgagatcgagtccgccgcgacgatccactgcttgactgagtccgcaaagatcacgtggaagttggggcgcttcttcgccagctcctccagcgcggggctgttccactcgctgggatggcggcggtagacaagctccacctccgggtgtgcgcccagatattcatcgaaccaacgcagcgtttcctgcatcgaaatgcggttggttttggcaaagcccgtaaaatcggtgcccgccattttggaaagctcggcgacctcgtcgtcgttcatgctggcatagccgaagctggaaatgtacaggtgcagctgcttggccgggtcaaggccgaactccctgcagagcgtttccttgtccttaaagtagccgtcaaactccgggcgcagaaagtccatcatgaccgcgccggtcacgggcgtgtttttggcgtccatgccgtgggcctgcaggcgggcggcggtgcgcttgccccagcaggtctgcacgcagcgcttggcgttgccgttcatgttgaaccagtcgccctcctcctgcgtgtcggagagcatctgctcccagtgcaggttgacgattttgttgcagcggccaatattgttgtacacatggctgttgatggcctcgttgtcatacatgcagctggcgacgagcacctcgggcttgtctttgccgaacagccgcagatgcttggggtccagcagctggcggatctccgccgtgtagccgcgccgctcgagctcgagcttcagcaaaaggtcgctctcatactcgcggacggtgtgctcatacaaaatcagaaagtctaaagccatgtgtacctcctaaaaagccttcccccttggggctgcgcccgcaggcgcgtgtcggagcgcaaccgccgaaggcggctcttagcgcggagactgaaggtggccccgcagggccggatgaggggagagcttatggatattgcccatttatggtcggctgtggaaaactttgccctcatccgtccgctccgcggacagcttcccccgaaggggaagcctttatgctgctatatccccaaccagttcttccgtccacatcggcagaccgtatttttcatcaagatggaatccgtcaaaaaactgcttgtcatcgtcggtaataacgctgccgccccactcgtaatccagcagggtaaagccgcattcatcagcccaggcggccagcgttggcagcaccgtgccctgcatggtctcggtgatgccgaacatatcgcagacctcggtccgcacgttgtcggccatcggcggcaaaactacgatgagccgcacgccctcgctttggcagcgccgggccagcgtgtgcaggcggttgaactgctcgtcattcagcgcccagcttttgcagcgcggcgtgatggtcgcggtgtagtcgtataatttgcggtgcagcggcaaaactgtgccatcgtcggccagataatccgccgcggcccagtcgccggattcaatcgtatcgggtgtgccgcgcagtgtgcccatggcaacggtcagcgcgttgacgttgtactcgaggttgaagcagtaggccagcggattgttcagcgtttcctccagcgtggcgaagcggtccgtgttgtagcccgcgttcagcgtgtagaacgagacctcgaccagcagtgtgtctgtgttgtggccggaatccagcagatagtcggccaggtcaagcgtctcttttagcgatgcaccgccgaacgcaaggttctgccacgactgcccggacaggctgtccacaaggcccatgtcaaagtgggccagacggctgtcacccaaaatcaaatttgtaccgggctcctgctggtacgcccgcacccgcgcaaccggctggctggacgtagcggaggccttcagcccgaaatagttgttcggctcaaatgcaatgaaaaaggcgagccagagcagcacgggaattgccagcagcgccagctttttgagaatgtttttcacggaccggaaacctccttccctaatttttgtagaacgtaggggccgggcatgcccggcccgccacctgacggtaaatgacatctgatgggaaagctgcgggcgaggcatgcctcgcccctacagcgcagctgtcagaaccccgcgtacataccaaatccgctgctcccaaacccgccgctctgcatgatatagcctgccagcagggcgatgacaagggcataatatacggcccagcgctgcttttcattggccaggcagatttcggacggcttgtttttaaacgcaaacgcccgacgggtgtcaaggtaaaacgccagcgccagcaccagcgccacaaacccgtagtacgccgcgaccatgatggcattggcataaaatccgtcggacgcggcggtgtacagctccgacgcaaaccgcgcggggccccagcccataaagcagcggcccagatacgcgaacgcatccccgacggtcagcggtgcggcggcgggggacgaccctacacggaagaacaccatgctcacgcaccacagcacaaacacaccggcgcgcttggcccacagcacgcgggccggggctttctttttcggcttgcccaaacgacggtgcagcagctcctcgcccaggcggtagctggcctgcaaaaggccccacaccacaaagggcagcgtgttgccgtgccagaagccggagataaaaaacaccgtgaacacgcaaaattccgcgggcaggcggctgattttgccgcccgttagcccggagacatccgcccacgccagcggcatgaacagataatcctgcagccacgacgaaaagctgatgtgccaccggctccagaagcccgaaaaattcgtggcaaagaacggcgtcttgaagttctcgggcagctccagccccagcagcagacccacggcccgcgcgacctcggagtagccggagaagttaaaatacagctggaacgtgtaaaacaccgcggccagcaccagcataggcccgccgtagctgcggtagttcgggaacacctcatccaccagcagccccagcacgtcgctgacggccaccaacttaaacaggcccagtgccatcagccgcagcgcgcgcaccgtgcgggctgcgtcaaagcggtgctcctctttaaactggggcagcagcgccccggcgcggcagatgggcccctgcgtgacggtggcaaaaaagttcaaaaacagcgcacagtcaatgaaattcttctcgacctcgcagtcgccgcgcgcggcatcaattaagtaggagatcgccgcaaagctgtaaaagctgatgcccagcggcatggcgacggtctgccagccgccgtccgacgcgaacgcgccgttatacttaaagaacgccaggatcgccagcagccctacaacgccaatgcgcaggaacgccgttttgcgggcgccttcccgcgcggtcatgccgcgcccgcacaggtaggtgaacacggcaatggcaatcgtgaccggcagcatcgacggcatcgccagcgcgtaaaatacccagctggccgccagcagaaacgcgctctgccagcgctgcggcagatgcaggtagacggcggccacgaccagcagaaagccgaaaaatccaaaactttgcaggctcatggccgcacctcccctttataatcatcagtaatttcttattatacacgatttcgcgtcccagcgcaagggattggggcataaagaaagcggcaggccgaagcctgccgctttaagggtcataattttaaagcttttcgccaagccttttctcgaaaaggcttgttactccgcaataatgctcttgccggtcatttcctcggggacgggcagaccgatatagggcagcatcgtcggggcgatgtccgccaggcagccgccctcgcgcagcttcacgtcgcccgcgccgatgaccgcgaagggcacgacgttggtggtgtgggccgtgaacggggaaccgtcggggttcttcatcttctcggcgttgccgtggtcggcagtcaggaaaacgacgccgcccgcgttcagcaccgcgtcggtgacctcgcccacgcacttgtcaacagcctcgacggccttgaccgctgcgtcaaacacgccggtgtggccgaccatgtcgcagttggcgaagttcaggatgatgacgtcgtacttgccgctctcaatgcgggccttgcactcgtcggcaacctcgtaggcgctcatttcgggcttgaggtcgtaggtggcaaccttcgggctggggatgaccttgcggtcctcgccctcgcagggctgctcaacaccgccgttgaagaagaaggtcacatgggcgtacttctcggtctcggcaatgcgcagctgggtcttgccgtgggcggccagatactcgcccagcgtgttcttcagctcaaccggcgggtacgcgacctcgcagttgggcatcgtggcgtcgtactcggccatgcagacatagtggacctgcttgcggccgccgcggcgctcaaagccggtaaagttgtcgtcgcagaagatgcgggtcatctgacgggcacgatccgggcggaagttcatgaagatgacggtgtcgccgtcctgcacgcggccaccctcgcaggtgacaacgggaatgacgaactcgtcggtcacgtcggcggcatagctggcctcgatggcctcggcagcgttggcggcgtggttgccctcgccgtagacgaacgcggcgtaggccttctcctcgcggtcccagttgttgtcgcggtccatggcgtagtaacgtccggagacagaggcgatcttgccgatgcccagcccgtccagcttggcctgcaggtcggccaagaagcccttgccgctgtgcgggtcggtgtcacggccatccatgatgcagtgcaggtagacgtccttcgcacccatgtgcttggccatctccagcacgccgaaccagtggtcggcatggctgtggacgccgccggtgccgaccagacccatcaggtggatagccttgcctgcgtcgatggcagccttcatgttcttgaccagcacggggttcttgaacatctcgccgtccttgatggacttggtgatgagggtcagctgctggtagacgatacggcccgcgcccatgttggtgtggccgacctcagagtttcccatctggccgtcgggcagaccgacagccatgccgctggcctggatggtggtcatggggtaattggcaaagatcttgtccagattcggcttgttcgcggcggccacggcgttgccgtaggtctcgtccggcgtccagccgaagccgtccatgatgcagagcataacaggttttttagacataaatttgtagactccttaataatagggttgtaggagcggcatacatgccgctcctacaaaaggggatttagcccttcgtggcagcgtcaacgatgaccgcaaactggtcggccttcagggaagcaccgccgatcaggccgccgtcaacgtcgggcttgctcagcagctcctcggcgttcttcgggttcatgctgccgccgtactggacggtcagggccttggcggcgtcctcgccgtacagctcgccgacgaccttgcggatggcggcgcagacctcctcggcctggtcagcggtagcggtcttgccggtgccgatggcccagatgggctcgtaggcgatgacgacattcttcagctcgtcagcggtcacgccgttcagcgcgatcttgacctgcatacggaccagctcctcggtaacgccctgctcacgctggtcaaggctctcgccgacgcagatgatgggcttcaggccgccggccagagcagccttggtgcgcttgttgacggtctcgttggtctcggcaaagtactggcggcgctcgctgtggccgatgacgacgtactcaacgccgaggtcggtcagcatgtcagcgctgatctcgccggtgaaggcaccggacttctcaaagtggacgttctcggcgccgacgtggatgttggtgcccttggtcatctcgacagcggtgacgagatcggtgaagggaacgcagatgacgacctcgcagccggcgtccttgacagcggggatcagctcgctgataagggccttggcctcggtagcggtcttgttcattttccagttgccggcgatgatagctttacgattctgtttatccatggtgattactccttccataataagccttccctcgcgggggaaggtggtgcgaagcgccggatgaggggcgggtgtgcggatatgacccgtcaacgggataatatggcaaactcgaccctcatcagtcgcctgcggcgataacttccctttcgaggggaaagcctttacataaaaagcgcggcggctctgccgccgcgctcctgcgggtatccttacaaattatgccttctggatgacggcgatgccgggcaactccttgccctcgaggtactcgagagaagcgccgccgccggtggagatgtgggtcatcttgtcgcccaggcccatctgctggacagctgcagcggagtcgccgccgccgataacggtggtagcgtcgctctcggccatagccttggcaacagccagggtgccggcagccagggtcgggttctcaaacacgcccatggggccgttccagacaacggtcttgctggccttgacggcgtcagcaaacagcttcatggactcggggccgatgtcgcagccctccttgtcagccgggatcgcggtgacgggaacgatcacggtatcgacgggagcgtcgatgggatcggggaagtccttgatgcaggcggcatcgacgggcagcagcagcttaacgcccttctccttggccttggccatcatgtccttgcagtagtcgagcttgctgtcgtcgcacaggctcttgccgatctcgtagccctgggccttcaggaaggtgtaggccatgccgccgccgatgatcagcgtgtcgaccttctccagcaggttggagatgacgttcagcttgtccgcaaccttggcgccgcccagaatagcggtgaaaggacgctcgggatcgttcacggcgttgccgagatacttgatctccttctccatcaggtagccgacagcggtatccttgacatagtcggtcacaccggcggtggagcagtgagcgcggtggcaggagccgaaggcgtcgtcaacgtaagcgtcggccaggctggccagctcctcgctgaaagcgggctcgttcttggtctcttccttgcggaaacgggtgttctgcagcagaacgacctcgccgttgcccatagtggcaacagcagccttggcgttgtcgccgacgacattgtcatcgtccgcaaaggtaacaggctggcccagcttctcgctcaggcggacagcaacgggggccaggctgaacttggcctcggggccgttcttcggcttgcccagatggctgcacaggatgaccttagcgccgtcggcaatcagcttcttgatggtcggcagtgcggcgttgatgcggttatcgttggtgataacgccgtccttcatcgggacgttgaagtcgcagcgaaccagtacgcgcttgccggcgtagttctcatcgtcaatggtctttttacccaaacccatagtaaaagctcctctcggtatgtttcacatttttggcggggcgcaccgcgccccaagtggtttatccttattatacgcataaaaccgaaaatgcgcaagtgtttttgatatatttttaaccgctttgggcggctgtgcctgtaaattttttgtgtatggccctattggccgccaagctcccgccaggtgacggccactttgcggcgggcgcgatgctctgcgtcggggcaaaggttgcgcacgcggggcatttatactataatgtagaggtcgatgctcgtcatcgacccgggagctttgccgcaaccgcacacgtccgcggatgaatactgttcgccccgcaaccacgccgccatacacatcccccccacaaggagccgccatgaaacaaaaaccgccccgttgggtacagatcaccgccgccgtactgcgccgctacctggcgctggacatgacggtctacgccggatccgccacgctgtttctgctgacggcgtccttcccgctgctgatgtgggtgctgatgcttgtcaacctggtgcccggcttctcggtagaaggcgtcgccgagctgctggcggactttctgccgcagatccccgagatacagactgccatcctcggccttttgcaaaatttaagcggccagtctgcacagtttgtggcgtcgctggctgtgctgacgaccatcgtctcggcgtcgggcggtatgaacgcactgcagatcggcctgcaaaggctgacgcccggctcgcaccggacgtttttgaaccgcctgctggcgattggctacaccttcgtgtttgagctgctgctttttgtcatgctggcgctgcagggcatgcactctctgtttgcgcgctttgccgatacattgccgttttttcgccattacgcggccattgtggccccgctgcagcgggtggccagcattggccggatcgtctcggtcccgctgctgttcgggctgcttttgctgatttacacctacgtccccggcgggcggcgcacgccgcgcagccagctgccgggcacgatctttgcaacggcggggtggttggtcttctcccgtgtgttctcgttttacatcctgcatttctggcgtctgtcgtatatctacggctcgctgacggcggtcattctgattattttgtggctgtatgtgatcatcaatcttctgttcattggggccgggatcaacgcggaggtgaacggaaaaacggagcaatgaccgcggcggcatgagggcatgccgccctacagcgcaccgtatcgtcaggtgtagggcgggggggccttcaccccgccgcagttttccgctgcctgccgtaaacaggcaatctccgcacatgcgcccctcatccgtctgcgggcggggccgcagacaccttcccccgaaggggaaggctccgcatccataaacaaaatctgccgacccaacatcgggtcggcagattttacttagggcaacaccgcataattctaagtgccgatacggcgagcgaggtgcggcagctgctaagccaaaagcgcagataatactggatgtcttatcgagcattttggcaacgcagatgccgtgccgtagccgccgaagcggtgcttaagccgtaaggcgggaactgtgcggtgttgccttagtgcaaattaccgcttaatatcgtaattcatgttcatcaggttgcggatgctctcgacgtcgtcggtaatgttggcgtcgccgtggatcgtatgcttgatggcgctggacgccacagcaaagttgaccatgtccatcggcttgtagtcgtgcatcatcgcgtagatcaggccgctggcaaaagcgtcgccgccgccgacgcggtccagaatgttgaaggtgtagagcttggactcgaaggtgtgcccctcgtaccacatgaatgccttcaggctgttctcgctgccggagtgaacgtagcgcacatggcgggcaatgcacttcaaattcgggtagcggtcaatgaaatgctggaagatctcgtcctcctgctcatagctgggctgcaggggcacgccgtccttccagtcgcctttggaatgatcttcgtcgtccctccacaggtggtacggctcaatgccgaacagcacatcgacatagggcaggcactgggtgcagtagtcgcgggcctcctcccagctccagagcgtggagcggaagttgccgtcaaagctgacggtcaggcccttctccttggcggcgcgcaggcagcgcaggatgaaatccgcacaatttttgttcagcgccggggtgatgccggacaggtgcagccagtcaaagccgtcgaacagctcgtccagatcgaccttcgtcaggtcgtactcggtcagggcgctgtgcatacggtcataaatgactttgctggggcggatgccgtagccggtctccagatagtaggtgcccaaacggtggctgggggtctcctctttggtggagaggatcatcggcgtgcagtgtacgtcgttgcagcgcagccagcgcacagcgcttttgcccagagagttgttgggcacgacgctgaagaaggtggaatccacgccgaggttcgccagcgccagcgcgatgttggcctcgctgccgccgtagctggcctcgaaagaggaggccatgcgaatcttctcatagttcggcggggtcagacgcagcatcacctcgccgatggtgatgaatttctgcgggctgtcgttgcccatcaggatcggattgctgtgttccatttggaattcctcctgtttttgccgtatttcgttagtttatattgtacgacataaggggcagatttgcaagctgaaaagcgcaaaatttgtgcggttagttttttaacgagaaatgtaggcggcgttcccgacgccccgcgaagaaagcctcccttgtcaaagggaggtgccgagcgcaagcgaggcggagggattcctggccgtctgcgggtgtaacgggcaatcaggcaaggcccgtcggaatcccccagtccgctgacgcggccagccccctttgacaagggggcctttttttgcgcgggcgaagcccgttgcaggcagcatagcaaagccgcgggccgggcatgcccggcccctacagggcagtgatttaaagcaggggccacccggaacccggcatctgcctgaaattacatttctttctcaaacttatcgatcttcccgaccttaccgatgaccgcgacggtatccccctctttaaaggtataatcggcggagaactccacgttcgtctgctggccatgctcgacggcgatgatgttgatgccgtaggccttgcgcagatccagcgtccgcacactcttgcccagcatcctgccgcccaccgtgatgcgccgcacctcgacgccgtcgccgagggcgatgtagtccagcagattgccagagatcagccgcttgccgatgcgcacggccatgtcggcctccgggtagacgacctcggccccgagacgcttgagcacctcgccgtgcacctcactggcggccttggagatgacgtgcggcacgcccagctttgtgacgagcatcgtcgtcaggatgctgatgtcgatctgttcgccgatgcagatcgtgaccgtgccgcagttctgcatgccggtctccttcaaagaggtctcgttcagctcgtcgatgacaaacgcatagtcggtgtagccgcgcacggccttgacctttgcttcgtccttgtcaacggcaatgacctccttgccggcggcggccagcgtcttgaccagcgccgtgccgaaccgacctaacccgattacgccgtagctctcggcggcatttttctttttgtcaaacatacgtgtaccctttctgcgccgcgccgggcggcagagtatgtaggggcgcattctatatgcgcccgcggagccgtgcctgtggcaggcgggcacgggcggatatggaatccgcccctacggtggttgccttgcggcttcgcatttacccaatcgtaatggcttcttcggtatagcgggcggtgggctcggggcgctccacccagagggagagcagcgtcaccgcgcccacgcggccaatgaacattgtcaggatcagaaccacccggctggcagggcataactccgccgtgatgccggtggaaagccccgccgtgctgtaggccgagatctgctcaaacagcaggcggccaaaatcgagctgcggctccagcacgcagagcgcaaacgtgccgcagcccacgaccatcagccccataagcatgatggtcgcggccttggacagcgagccgtccggcagacgccggtgaaacccgccgagccgccgcttggagaagatggaccgcacctgctgcatcagcacaaaaaacgttgtggtcttgatgccgccgcccgtcgagcccggcgatgcgccgatgaacattaagatcatgatgaccagcagacccgcgttgctcatgctgcctaaatccacgctggaaaagcccgccgtgcgggccgtcatgctctggaaaagcgctgccagccagcccatgtggtcggtcagctgcaaaagcaccgcgccgcccaccagcagcaccgctgtggtggagagcacgaccttggtgtggaacgtcattctgcggaactgcccgcggcagcgccccacgtccagaatgaccatgaagccgatgccgcccacaatgacgagcgcatcggtgacgaggttcagcagcagatcgttccgataggggatcaggctctgcccgccgcccagtgcgtcaaagcccgcgttgttgaaggcggcgatcgagtggaaaatgctcagccacaccgcctgcagcggcatgtgatcgcgggcaaatgaggggaagctgagcgccgcaccggcgacctcgcagatcagggtcaccagcaggatggcccgcacaaggcgcaccatgccctccaggctctcgacgttcagtgcctcccgcacgagagagcggccctttaagctgatgcgccgcccggcgaccagcgccagccccatgccgatggacgcgacgcccagaccgccgatctgtatcaaaatcgcaatgacagcctgcccgaacaggctgaacgtgtcgccggtgtccaccacgaccagcccggtcacacagacggcgctcgttgcggtaaacagcacgtccagcgggccgacgtgtgcgccggggtgtacggcaaacggcagcatcagcagcgccgcgcccaacaaaatcagcagcgcaaagcccacggcaatgatgcgcgccgggggctgatttttcaaaaatctggcaatggcattgtgtatggcgctgcgtagctgctgcatggccgccctccgataagcaaatccgataagcaaatataaaagcagcgggccctccgattgctggaaaagcccgcacagtcccgcggaaaaacgggtcgttacccccactatagcatgaatgccgcacagcgtcaaggcgcttttttgccctgcataccttgcgctttgcgcccaaatgcggtatagtttaaataactagaaacctgaatcaggagaaaccgaatgaaacaacaaacaaagggcggggctttgcacaggctttggcaggcgctgccgtggctctggatggcggcggcgtatctgtttgacctgtggtaccagcttgtgcccggcaaatggatcgtcgattccgacctcgcgtcggagatgatcctctccgacctgctcaacaaagagggcagcatcatcagccacaactggttctactccacggaattgaaggtcgtcaacctgcaatggttctaccggctggggctgctgcttttcccggatgactggcatctggcgcgcacgttcggcatggccgtcacgctggcgctgtacgcggcgtgtatgctgttctttgtcaaatgcgccaggctcgggcggcccggcctctggatggtgggcacgctgctgtggccgttcggccagcactatctggtctacgccatctacggcgggtactacctcgtctataccttcttttatatgcttgtgctggcgctggtgctgcgcagcctcgacgccgacaaaaagcactgcgcactgcaatggctcgcggcctgcatcgtcacggccatcgcgggcatgaacggcgtcaagcagcttatggtgttccacgcgccgctctgcattgccgcggcgatcctgctggtgcttgcactgcacgacagcggcacgtccgactggaaaacggccctgcagcactgccgccgtcaggtgcggctgtttgcggcgtcgcttgtcacggcggtggccggcgcggcggggtatttcatcagcaacagcgtcatgtcgcggctgtatgatttcaagtcctacagcttcatcgtctgggaccgcgacgagaactggttcacgctggaccgcatcctgatggacttcttccatgagttcggctaccagaacggctccggcatcttccacttcggcggcattgcggcgggcatcggtctgctgctgggcgggtggatgttcttctgcatcgtgcggctgctgctgcggctgaaaaagctggagacgaacgaccagctgcttgtgctgctgctcgtcgccatgctggcggtctgcggcatctcctacgcctacttccacgagtattacctctacttctggctcatgaacatgccggtggccattgcggtcatggcggtggagctgaaaaccgaggacttccgcctgcccggcgcgcggcagctgctgggtgtggtgctggcaggctgcttcacggtctgcgccgtcaacaccgtccggcaggagatcgaaaacccgtatctcgcccacaaggggctggacgccgccgccgactggctggtggacaacggctacaccgaaggctacgccacgttctggaacggcaacgccatgacagagctgacaaacggaaaattggacgtctggacgctgcaatcgctggatgaggactacgtccccaactggctgcagcgcaaggaccacctgaccaccgacccgcagcacccgttcctgctcatcgacaccgagactgacggcccggcggagagcgcgggccttgtgcagaacggcgaatgcaccgaggtctacaacgacggacggttcgtcatctatgacttcgccggcgcggacgccgtgcatgcggcggcacggtgacttgcctccctctgcgagggaggtggcccgtagggccggagggagagaactgtgccattgcccgaaatcgttcgggatgccgcaaggttctctcccccagccgctgcggcggcagccccctcgcagaggaggccgagagtggggcgtcgaggacgccgccccctacaaccccaaatccaaccccaacatataaataaaggagtgttcttatgcgttactgcaaaaaatgtacgatgcccgacacccgacccgggatcaccttcgacgcggagggcgtgtgcagcgcctgccgccactacgagagccgcaaaaatgtggactgggatgcccgcttcaaggagttcgaggcctactgcgacaagtaccgcggcatgaacggccccggcggctatgactgcgccgtcgccgtctccggcggcaaggacagccacttccaggtctggatgctgaaagaggtcatgcacatgaaccccatcctgttcagcgtcgaggataacttccccatgacgcaggcgggcatccacaacctcaagaatatcagcgaggagttcggctgcacgatcatctcctgcaagcccaacatcaaggtgcaaaagacgctgatgcgcaaattctttgagaaatacggcaagccgacctggtacgtggaccgcctgatctacacattcccgctgcacatggccgccaagttcaacaccccgatgctctgctacggcgagaacgtcagctttgagtacggcggcaacgccgataaggagacctactccgccatgggccagatcgagaacggcgtcgccgtcggtatgccgatggaggaactgctgggcgacggcgtgaccgagaaagacctctctctgacgctggcccccagcgccgaggagcgcgctaagctcgacccgttctacatgagctactttgtgccctggaacagctacaagaactaccagatcgccaaggcccacggcttccacgacctgacccacgagtgggaccgcacccaccacgccgagaactttgaccagatcgactcccgcgcctatctggtacacagctggctcaagtatcccaagttcggccacgccgccgccaccgactacacggcccgctacatccgctacggcatgatgacccgcgaggaggctatccccatcatcaaggagcgcgacggcaagctcgacccgctctgcgtgcgtgacttctgcgagttctgcggctacaccgagaccgagttctgggccattctggacaagttctacaaccgcgacctgttcgagaagaacgagtacggcgagtggcagctcaagcaccccatctgggaggaaaacaagtaatggtacgtcatgttattttgtggaaattaaaggagatgcccgacgccgaaaaggccgccgtcaaggccggcatcaaggaagggctggagggtctggccggtaagatccccggcctgctggatgtccgcgtctacaccgacgccctgcccagctctgccaacgctgacctgatgctggacacgaccttcaccgacgccgccgcgctcaaaggctactccacccaccccgcccacgtcgccgtggcagacggcaaggtaagaccgtacaccgcggtaaggacgtgcttggattttaacgtgtaaccgtacagaaggagactttttcggatgcttttttccagcgcgacctttttgtttgcatttctgccggcagtcacactgctctattatataatccctgcgcggttccgtactgcccgaaatatgctgttgacgctggtgagcatcctcttctacgcttggggggagccgcgctttgtggtggttatgctggccatgatcgccgtgaactgggcgttggctctgctggccgaggcacagggtgacaagtaccgcagaatggtacttgtcacagcggtggcggtaaacattggtttgctgtttgtctttaagtatctgacatttgtgctggaaaatacaaaccgttttctgggcctgtccattcaggtgccgagcattacgctgcccattggcatttcgttttttacctttcaagcaatgtcttatgtgatagatgtctgccgcggggatggcaaggcgcaaagaaatatcttgaatgtgatgctctatattgcgttttttccgcagctgattgcagggccaatcgtgcgctactcggattttgcagaccaaatcaactgccgaacggaaagctttgatggttggagtggtggctgctgccgttttgccttgggccttgggaaaaaggtgattctctccaataatcttgcctatgtggcggatgcggcattttcctccattgggaatatgtcggtcttgttggcttggctgggggcgattgcatacacattacagatttattttgatttttccggttattctgatatggccattggcctggggcggatgttcgggtttcgcatccgggagaatttcaactacccgtatattagccgctctgtatcagaattctggcggcgctggcatatctctctgggcagttggttccgcgattacttgtacatccctttgggtggcagccgtgtgaaaagccgtggacggcttattttcaacttgtttgtggtgtggttttctactggcctttggcatggtgccaattggacattcattgcttggggtctgatgtattttgtgctgctctgtgttgaaaagctcacaggttttgaaaagtgctctgtgccgctatggctggcatggatatacacgatgctgtttgttgttcttggatgggtgcttttcagagcggaaaaccttactggcgcagtaaagtatgtgctggccatgtttggcattggcgcatctggcttgctggacgccaaggcggcgtactatatggcagaatacaaactgttcttcctgttggcgattgcagcctcgctgccgattgcaggttggttgggtaaggccaaggaacatctggatggtgcgattagcgtgctatacccggtttggatcattggggtgtatgcagtagcggtttcatttattgtaaagggtggttacaatccttttatttacttcaacttctgacaaggagatttttgtatgggaacccggaaatctgcgcggctggcggctgtctgtattggtgcggctacatttgtggcggctgttcccgtgctgtgtgccgagcttcaacaggtgggcagccaagaaaccgcagacatggaagatgcctttgaaacaacagcacagcagacaattccgggttaccacaatgtaattgagctgaatacgctgttccagatggcactaggcaaaaatgtcattgaggacgctgccgatgacaaggtcgtccggctaaaaaatggaatgttgacatttgtctgcgatccagccgatgtaacagactcaataaatggtattctgaacctgaaaaaagtctgtgacgaaaatgatacgcagttgctttacattcaagcgccgcaaaaaatcagcaagtttgacccggaacttcccgccggtgtacaggattatggcaatgaaattgccgatagttttttgcagggtatagacggaaaaattccctatattgacctacgcgagaaaatctatgatgctggaatcaaccagtatgacttgtttttcaaaacagatcaccactggaccccggagggggcgttctggtgctggggcaaggtggcgcaaacattgaaaagcgactatggctttgcctttgatgacaagatcacaaacatggacagctacacggtaaagacataccaggattggtttctgggcagtcagggcaagcgtgtcggtactgtatatgcaggtgtggatgatttctccgtcatcacgccgaattatgaaacgaattttgatttcacggttcccgataagggcatcgaacgccacggcagctatgcggacaccctgctcgtcaaggacgcctacgagacaaaggattattacaacggtaacccgtatgctgcatacatcggcggggactacgcgttgaaccatatcgtgaacaagctggcaccgaacgacaagaaggtcctgcttgtgcgggatagctttgcatgtgcattcacgccgttcctggcgcagtcctgcgcgcggctagacacgatcgatatgcgggcgttccaagggacgattgcccagtatattgtggaatcaaaaccggatattgtactgtttttgtataatacctcggccctgcccggtgcagcaaactttcagtaaagaacgataggaaaaaatccgagggagacaatactatggcaactacccttatccacaacggcctcgtccatgacgctgtccaccgcgacgcctgcaaggctgacattctgctggccgacggcaaaattgccgccatcggaaccgatctgacctccccggcggacgctgctgtgtttgacgccgatgggttggaggtttatcccggctttgtggacgcgcacacccatatcggtctcgacggttacggcatcgggtacgagggctgcgactacaacgagatgaacgacatctggacgccgcagctgcgcgccatcgacggcatcaacccgcgcgacccctcgctggccgacgcgcgtaaggcaggcgtgacctgcgtctgcaccggcccgggcagcgccaacgtgctgggcggcaccttcctggcgatgaaaaccgtcggtgagcgcgtggacaacatgatcgtccgcgaccccgtcgctatgaagtgcgcctttggcgagaatcccaagcgctgctaccgtgacaagtgcgactccacccgtatgtccacggcggcgttcctgcgcggtgcactgatgcaggccagggactacggcgcgcgcaagcaggcggccaacggtgacgtgaccaaaatgcccgcctacaaccagaagctcgaggccctgctgccggtgctggcgcgggagatccccttaaaggcccacgcccaccaggccaacgacatctttacggcgctgcgcattgcgcgggagttcgatctgcgcctgacactggagcacgtgaccgaggggcatctcattgcggacgagctggcaaaagaaaaggacgtgccgatggctgtcggcccgagcctgacgtttgccagcaagtttgagctgcagaacaaatcctggaaaacccccggcgtgctggccaatgcgggctgccacgtgtccatcatcaccgacaactcggtcattccgcagcagtatctgccgctctgcgcaggcatggcggtcaaggccggcatggatccgttcgacgcgctgaaggccatcaccatcaacccggcggagcacatcggcgtggcagaccgcgtcggctcgctggaggtgggcaaggacgcggacgtcgtcatcaccgcaggcagcccctttgaggtgctgaccgaggtaaaggcagtctttattgacggggcgcgtatcgagcaggcatgattagtggaaaggatcgtagaggccatgcgtttgccaaaacaaccgctgcaatgccccacaatggctaccgccggaaatgtactgacactggcagcgctgctgctgccgccgctttacatgccgaatggttatgttgggctggtgggtgctaaatttcatctactgctgtggctggcagggattggatgtgctttgctgctttgctgcctgcaaaaaagcctgcgcaggaatgagcatccggcaaagcaggcgcaaattgccggtctgccgctgttgctgctctgcttaagctacacagtagcatggctttttgcggagaatcctgccgtggctttgtggggattgcagggacgctacaacggccttatcatgctgttggcctgtacggtgctgtactttgcagtacagctgacaggcggcgggattccggctgcatggttcggacggctgttggcaggagcaggatgtgctgttacgctgctgtgcgggatgaatttctttatggttgacccgttggatgcctattacagctttttgcctgaaagcggggagctgttcctcggtacagtgggcaacatcaatttttatggggcgtttcttgacctttgcctgcctattgccgtgtgggagcttttgatgacaccagacagcgattcggcacggctatggggcgcggcatcggtttgcctgggagcaggccttgtggttgcaggcagtgatgcggcctggctgggggctgtaagtgcggtggcggtgctttgcatggcgcggcgcattacagccgggcggctttcccggctagcctatgctgcggctgtctgggcactttgcacaggaacaatgggtttgctggctcgcttgctgcctgcccgcgcagagtggcgtaccgtgtcgaaatttgttacacagccgatggtggcgcttatactggctgcggtgtgctttgtcgctggcggtctgctgcgccgacggcctaaggtaaacagctggcgtgctgtgcgcgtgctggctgtcgcggccgtggtgctggccgctgttctggtgctgcttgccaattttaccgtggtgctgccgcagccgttgacaaggctgttgttctttgatgaccagtggggctccaaccggggctttgcatggaagcggctttggacggtatggaaggatgatttgacaccgttacagatgctctttggattaggcggcgatgctgccaatgcacggctgaacatagatgactactctgtcaaatatatgatgctgctcaacggtgatgtttttgactcggcacataacgagtatctgcagcacctgatctgtggaggggtagttgggctgacttcctggctggcctttctgggattacatgtccgccgcggactgcggacagcgccggggcttgccgcagcaatccttgggtatgtagtacaggcatttttcagcatcagcatgccgggcgtgttgcctctggtgtttgtgctggcggcgctctgcgtaaagccgcagccgctggctgcccgtgggtggtatcgcagccttttgggattggtaatggctgccccgccgatactgctgctggcggcagtctaaagctttgctgttatggcagaataaaagtgaataattggtgaaaatgtccattgacaaaagtaaccggggggggggtatactctcattagactatatggcttgtgaatgcagccatttaaattatgagaggagtcctacccgaaatgaaaaagtttctttctatggtttgcgcagtagcgctggctgccctgtgcgccgtgcccgccttcgctgaggctacgcccggtgaggctgctaacacggctgccgcaagtattactgcagaaaacgcatctacagaaaaaggtgcaagctttgcgaagagcattgctgattactacaccgccaaccccaccgtgcctgtaaccaagcagaacgctaacgcagctgcgaccgttatcaatgcccacgcggacaaggctatcgcggacggcacttttgataaggacaccatcaagaaggtatatcccagcacggggagcgttaccaatgccgttgctgtccagacaatcgagaagagtcagatttctaatctttccctgacgaagaaggatgacaatacgctggtactgtctgctacttggaccggtacgcagccgtctgcgggtgccaacattgccgtctatggtatggataccagcgcagcttaccagatcgtctttgtggatgatgccggaaaccgtacaacgattgattctgtatccaaggttgctgacggcgtggtcgttttctgggttccccacttctctacctatgagatcgtaaaggtcagcgctgctgcagatactgccccggccaccactgccccggctaccaccacggttgacgctgccgctgttgatgctcagttctatacctgcaaggcctgcggttaccacaactggactggcactgtgggcggctacaagtgcgaccactgcggccacatcgaggcgaaggatctgagcagctaccccaatgtcaagggcactgctacgctgcccactgccacctctgctgctgcctccaacaacatcatcaaggcgaccggtgctgatatgagtatggtcgttctggctgttctggctctggctgccgctctggttgccggtttcgcctgcatcgttcgcaagcagggtctcggcaagtaaaaataaggaaacatgctgcttatgaagagttctgattctcacaaagcagtgcatgcacacggcaagagaaagaacctggttctttctcttgttttttgtgtggctgcactctgcgtagtgcttctcgtgctggtggggccgggccgtatgctggctggtgcggcggcacgctccggcgttgaaaccgccctgcctgcatcggtggcggcggtgtctgatgcccagcccaccgcggccccggagcaaacgcccgcccagcccgagactgtcaacatcaatgatttcggcggctaccccgcggcgggggatgctctgggtgaaatcacgatttccggtacatcggtggactgcacgatttactacggtgacgaagatccccagctggacacgggcgcgggcatctataccggcggcaagatccccggtgagggtggcacgattctggtggctggccacacagcaacctatttccgcgattttgagcatgcccagaacggtgcaatgattaccgtcaccaccgcctacggcacctacacctacgaaatcacggatatgcgcgtggccaacgccaacgatacctccgcctatgacatggatgcgccggaggaaaatattatcctgtacacctgctacccgctgggacaggtgtccctgacggatatgcgttattttatctacggcaagtatgtcagcggtccgcggctggaggggctgtcttgagccgccctggcaagcaggctgcagccgctcggctggctgtggctgttcagctggtaggcagtgtctgtgcgcttctgctggcggtctgtctggcgctgtcctttacgctcctgcgggaaggacattttgccgcttgtctgaaaaaatccggttatctggacaccgttcacgctgctgtgttggacacctgcagtcagtacgctgctgccattggaacgactgtcgatccgcttgccaatgccataacacctgacgctgtgtacgcaggcgtgatgcaccgcgccgacagtctgtggcatggcagtaccaacgatgagaccgacccctttggcagcctgattacaacctatcaggacaccgttgcgcccgagccgcctacttacgatggctaccgcattttacagtataactgccaaatggagtggcagagtgcgatggcaacgccgttttcggcggcgctgagtatggtactgcaataccggggcattgtggccattgccatgtatctctccggcctgttgcttatgggctgcattgcattgcaatatctgttggccgaccggtggcgtatgttttgcggtgggctgctgcgtatggcggatggctgcctgggagcaggtgtcatactggcgctgtggctgacccttggcagcggatatcgcagctggactgcggcaggggatatcggttatacattgttctgtcagtggttcggcgcattcgccccggcggtggcaggctgtgcggcagcggtatcagctgtgccggtgctgttggttctatgggtttgcgcccagttccgccgtgcgaaatctgcctgatgccctcttgcatcctgcataaaactgtgctataatatccccatacggcaaaggcgccgtctgatagcattgctatcggacggcgccttttcattttgatacagagccgattggagtgtaaagaatatggaaaagattccccgccatgtggacattgattacagcaaatacgcccccgatatcccggaggacaagctcgaagcctactacggcctgcccaagcacgtacagttctgcaaggaatgcgtcatgagcaaccagaagcccaactcctgctatgagtttgagcatacgatcaactccatcaagaaaacgatggtcattcaggaggacggcgtctgcgatgcctgccatgcctgccacaacaaggccaacggccatattgactgggccctgcgcgagaaggagctgcgcgagctctgcgaccagtaccgcaagaacgacggcagctatgactgccttgtgcccggctccggcggcaaggacagcttctacgccgcgcacctgctgaaatacaagtacggtatgcacccgctgaccgtcacctgggccccgcacatctacacgccctggggctgggagaacatgcaggcgtggatccacgcgggctttgacaactacctgtgcacccccaacggcatgacccaccgcctgctgacccgccttgcgacggagaacctgttccacccgttccagcccttcattctgggccagaagcagctggcgcccaagatggccgcgaagttcggcatcccgctggtgttctacggcgagaacgaggccgagttcggcaacccgattgccgacaacaactccgccctgcgcgacgaacatttctttgcggtcaacgactacgaccacatttatctgggcggtgtcagcctgcgccagctggaggaggactacaaagtggacaaggccgatctggccatctacctgccgtccgagacttccaaccttgagaaaaaccacattcaggtgcggtatctgggctattacgagaagtggcatccgcagggcgcgtactactacagcgtcgagcacggcggcttccgccccgcgccggagcgcacccagggcacctactccaagtacaactccatcgatgacaagatcgacgacttcttctactacacgacctacatcaagtacggcattggccgcacgacctacgacgccgcgcaggagatccgcaacgaggagatcacgctggacgagggcaaggcgctctgcaagaagtttgacggcgagtacccggaccgttttgaaaaggaaatcttcaaatatctgtcgctggaccgtcagcacttcccctgggccagccagctgtttgagcagcccaggatggaccgcgactactttatggacctggcggaccgcttccgctccccccacatctggaagtgggaggacaatatgtggaagctccgccacaccccctacgagggcgacagcgaggtactgtggggcgacccgaggggaacgcaccacgaaatttgagcgaaaaggcttcccccttgagggaagctgtccgcgaagcagactgatgaggggtggactttccgcggcaacccatttgcgggcaatcgcggcatacgcgcctctcatccggccttgcttcgcgcggccaccttcccccacaggggaaggctttagaaaggttcagctatgagcaaaaaaatacgacttatcgcaagattggacgtcaaggacaccaaccttgtcaaggggatccagctcgagggactgcgcaagctgggcgacccgaatgcgtttgccaaagaatattatgaggccgggatagacgagctgctctatatcgacatcgtcgccagcctgtacaaccgcaataatctaagtgatattgtgcgcaaaaccgtggacgacgtctatatcccggtctgcgtcggcggcgggctgcgcagcgttgaggatgtacgccacatcctgtcgatgggtgcggacaaggcggccatcaacacggcggccatcaagcgccccgagcttatcaccgaggtggctgaggcgttcggcagccagtgcatggtgctgtcgattcaggccaagcgcagccgcacctggcccggcaagtgggaagcctactacgacaatggccgcgcccactccggctatgacgtcgtcgagtgggccaagcgcggcgtggcgctgggcgcgggcgaaattctgctgaccagcgttgacaacgaggggttacagcagggtatggaccttgaattgatcgaggccgtgacgaaagccgtgaacgtgccggtcatctgcggcggcggtgtcggctgcggcgacgacattgtggacgccgccaacgcgggcgcggacgccgtggcctgtgccgctgtgctgcattacaaaaaagaaaccgtgacggagctgaaagaggacatccgcgcgggcggggtggaggtgcgccaggtatgaaggtaacagtgattgactacggcctgtccaacctgttgagcgtccaccatgcgtttgcccactttggggccgaaacgctgctgaccagtgacccggcggacgtgctggccgcggaaaagctggtgctgccgggcgtcggcgcgttcaaggacggcatggacggtctggcacggttggggctgatcgagccgattcgccagaaggccgccgccggtacgccgctgctgggcatctgcttaggaatgcagatgctgtttgacgagtcggaggagttcggcctgcacaagggccttgggcttattccgggccgtgtggtaaagatccccgacacggatatggacggccatccgcagaaggtgccgcacatcagctgggacccgctctatcccggcggcgggcgcacggatttttccggcacggcgctggccgcgctcaagcccggcgaggagtgctattttatccacagctacgaggccaagcccgtccgcgatgaggaccgcctggccgacaccgtctacggcgggcgcgagatctgcgccgccgccagccacggcagcgtcctcggctgccagttccacccggaaaaatctggggcggtaggactgaaaattattgaggagtttttgaaatgaccgagcggtaggggccggacatgtccggcccggggctttgccataaaagccggcttgccgtacagttacgggccgggcatgcccggcccctacatagcaatcatttacaacgccctgtgcgattccgcacagggcgttgctttttcccccgcaataggctataatgtaccttgtataaatgtgcaaaggggaattgctatgtcctgtgacttgctcgtcggctccaccgggtttgtggggggcaacctgctggccaaacataccttcgccgcggaatgccacagcagtgacataaccgcacagtacggcacccgcccggacctctgtgtctacgcgggcgtgccggcggccatgttcctggccaacgccgacccggaggccgaccttgccgtcatgcgcgccgcgcgggagaatatccgccaaatcgcgcccaaaagacttgtcctgatttccagcattgccgtgctggcagacagccgcggcgtctatgaggacagccccgcgcaggacaccgaaggtttgcccgcctacggcaaaaaccgtctgcaattggagcgctgggtgcgcgaggacttccccgacgcgctcattgtgcgcctgcccgcactgtacggcgccggcatcaggaaaaacttcctctttgacctgcacaccatcaccccggccatgctcaggccggaaaaatacagcgagttggcggcaaaatcgccgcttgtcaaatcagcctacacgctggcggacaacggcttttacaagctgaacggcatcgccgacccggcagcgctgcgcgccttttttgcagccaacgacttcaacgccctggctttcaccgatgcccgcagccgctaccagttctataatttaggtcgcctctggtcggatatggaggctgcccgcgccgctgatgtaaagctgctgcacctctgcacgccgccggtctctgccgcagaggtctacaccgccgtgaccggcaaagcggactggcacaatgaactgcccaagcccccgtttgactacgacctgcgcagccgccatgcggcgcttttgggcggcagcggcgattacctttgcacaaaacagcaggaattggatgatattacgcgctttatgcgcggttggagggactgacccatgccgagctatcagcttgccatctcgaacattgcatggcagaaggatgatgacgaaaccgtatacgcggccatgcagcaggcgggcttcaccggcctggagctggccccgacccgcattttctccgaagcaccgtatgaaaacctgacgagtgcgctgctgttcggcggctacctcaaaaaccgctggggcttctcggtgcccagtctgcaaagcatctggtacggccagaagggcaatatctttgaccctgccgacaccgagcacctgctggactacacggcgcaggcgttccagtttgcccacagcctgaactgcccgtcgctggtgttcggctgcccgaagaaccgtatgcgcccgctgggggccaacgatgccgccgccgaggcgttcttcatgcaggcgggcaacctggccgcgcggtacggcgtgcatctggcgctggaggccaacccgccgatgtacacgaactacctgaacggcaccgccgacgcctttgcgctcgtcaagcggctggacaaccccggcttgtcggtcaatttggatctgtccaccgtgctggcgcagggagagcacttgcagagcttcatcgatgatatgcagtatgtcagccatgtccacatcagtgagccgggtctggtcccgattgagcgccgccccgagcacaaggagctggcgctgctgctgggggctgtcggctaccgcggcttcgtctccgtcgagatggcccacaccgacgtggatacgatccgccgcacgatggactatattgcggaggtgttcgcatgatcgagtatgagcgtacaagcttgaacggcgtgcccgactacacagctgtggagtttgagggccgccgccatgactactgtctgctgatccctgtcatcaacgagggcgcgcgcatcctgaccgagctgggccgcgcccagaaggcgggcatcgaccagctctgcgacatcgtcatctgcgacggcggctccaccgacggcagcatgaagcgggagacgctggcgctctaccacgtcaacacgctgctgacgaaaaccggccccggcaggcagggcgcccagctgcgcatgggcatgtattttgcgctggaccgcaattataaaggcatcctgaccatcgacggcaacaacaaggactccatcgaggacgtgcccgagtttatcgcaaaattgcaggagggctatgacctcgtgcagggcagccggtttatccgcggcggccacgccatcaacacgccgccggtgcgctatgccgccgtgcggctcatccacgcgccgctcgtcagcctgggggcgcaccagtggttcaccgatacgaccaacgcctaccgcgcctacagccgcgagtacctgacccacccggatgtccgcccgctgcgcgatgtctttggcgggtatgagctgctggcgtatttaagcatccgcgcgacgcagctgggcctgaaggcctgcgaggtccccgtgacccgcgcctaccctgccaccggcaagacgccgacgaagatcagcggcttcaagggcaacagcgacctgatgaaggtcctgctgaatgtgctggccgggaagtataatccgtaagttatattttacaaagaggtaggggcgagcagtgctcgcccgcggcacttggcggcagccgcaaagtgcccgggtcgatgacgagcatcggcccctacaatgccggggaagatcccatatccacccggcaatcgtccgaaggaatgtaaaaaggggaaacgctctatgacctacgataaaatcatccttggcgcggggctgtacggcctgtacgcggcgcagaaatgcggcgcggcggggcagcgcgtccttgtgctggagcgcgaccctgcgcccttcatgcgcgcgacctacatcaaccaggcccgtgtccacatgggctaccactacccgcgcagctactccacggccatcaagtccgcccactattttgagcggttctgcaatgattacggcttctgcctgcacaccgagtttgatcaggtctacgccaccagtgcgcacttctcctggacgaacgcggcggaattccaccggttctgcgcggcggcaggcatccgctgcgacgacgttgcgcccgagcgctacttcaacccgggcctctgcgacggcgcgttcctgaccaccgagtacacctacgatgcgcagatactcaagcgctggtttctggagcagctcgccgcactgcccaacgttgaggcactatacagccacaagccgacggccatcgagaaggtcggcagcgcgtggcgcgtgcaggcgggagacatcaccgccgaagcgccctacctgctcaacgcgacctatgcgggcgtcaacgacgtacacgccatgctcggcctgccgccgttcggcattaagtacgaaaagtgcgagatcattttgtgcaccgtggacaaaagcttgaaaaacaccggcatcacggtcatggacgggccgtttttcagcctgatgcccttcggccggaccggcctgcacagcctgacgagcgtgaccttcaccccgcatgagacgagctatgacagcgtcgcaaccttcccgtgccagcaggaatgcggcggcgtgtgcaagccgggcagcctgtacaactgcaatgagtgcccggccaagccgcaaagcgcctggccctacatgagccagctggcccgcaagtatttaaaggaagaatacggctttgcctaccacagcagcctgttcagcatgaagcccatcttaaaggccagcgagatcgacgactcgcgcccgacggtggtccgcgtgatgaacgacgagccgaagctcgtcagcgtgctgtccggcaagatcaacacggtatacgacctggacgaggtattggatgtatgacgcttaaagacaacaattttatttcggcagtcgtttacctgcacaacgacggcgtgcgcgccgtggagttctgccgcacggtggccgcagagctggacgccaactttaaacaatatgagctggtcgtcgtggacgacgcctgcaccgacgacacggtcaaacagctgcgcgcctggggcagggagcaggacgccccgctgacgattttgcacatgagcatctaccacgggctcgaggacgccatgaacgccggtctcgatgccgccatcggcgactatgtctatgagttcgactccaccgagctctgctacgcgccgacgcttattatgcaggcgtacagggcggcgctggacggcagcgatattgtgtcggtctgcccgcgcaccgtgcgcggcggcagcagcctgttttataaggtgttcaacgcccactcccagagcgcctaccgcctgcgcaccgacgcgttccgtctggtgacgcgccgcgccatcaaccgcgtccatgcgtccagcacgcacctgccctatcgcaaggcggcctacgcggccagcggcttacggatggtcgatctggaatttgacggccagctgaccgttaagcagaagggccggttcaatctggcgctggacagcctgacgctctacacgaacttcggcttcaaggccagcgtgaccgtcacgctctgcatgatggcgttggcgctggccgagctgatctataccctcgtcatcttcgccaccggccacccggtagagggctggacgacgacgatgttcgtcatcaccgtcgggtttgcggggctgttcgccgtgctgaccatcatcgtcaagtatctgtcgctgctcttaaatctgacgttcaggcagcagaaatatcttgtggaaagcattgagaagctgcaaaaataacgcatgaggaagttaccgatgaagcattttcgcccgcggctgtcccgccgcgctttctgggtgatctgcgccctgctggtctgcctgcgtctggcgctgacgggctttcagcaggcgtacatctgggtgggcggtgcgccgctggacgacgagctgatgttccgcgcggccaaccatatcacagccgggcagtggctgggcgcgtatgattatctgacgctgtccaaggccatgttcttcccggtgtggctggcactgctgcacgcgctgcacctgccgtatcttatcagcggcgcagcgctctggtgcggggcggcgctgctggcggcgtttgccttttcgacgctgtggcgcaaaaaagacaccgaacagggccgcgtgcttacgctcggtctgtttgcggcgctggcgtttttgccgtcgagctgggcggcctacacgctgcgcgtctaccgggacaacatctttccggcgctgtgtctgtacttctttgcgggcatggcgggcatggcgctgcgcgcggtgttcacgccggaaaggccgctctggccgtggctggccgcggcgggcgcgggtctggcctgcggctatctggaccgcgaggacgccgggctgttcctgctgccgtttgccgcggcggccaccgtcattgtggccgtggtactggcgggcaagcgccgctggaaggctctggccgcgcaggtcatcccgtatgtcatgctcggcgtcggcgtgctgaccttctgcaccctcaactacacacactacggcgtgtttgcgctgtccgacttttcggaaggctcctttgccgcggccatgggcgcgatgatgcgcgtggacaccgacagcaccgcgccctacctctccgtgcccgctgacgcccgcgagaaaatttacgacgctgtgccggaattggagccgctggcctactggctggaggaggatgcccagctgcagaatgatttccgcgacccaaatctcgacgactaccgcgcgggcagcttctattgggccatccgccgcgccgcgcagtttgagggcatctacaccgacgctaagaccgccgatgcctactggcagaccgtggccgataagatcaacgtcgcctgcgacgcgggcacactgcccagccgcaccggcaggcgcgtggcgacgagccagccgatctcggcggcttacgtcccttcgacgctggccgagacctggaacggcttttggcatgtgctgggcctgcgggactgtgcgccctatgagacgctgcggtccatcggcaccgaggacgactttgccgcctggtccggctacctgcactgcggcttcaacagcgccgccaacgcgggggaggacacgccctactacagcccgtaccaaaaggcggtttttgccgtcatgcagggctggacgcgggtctgcagtattttgcttacggtgggcgtgctctgcgctgtgctgtgccagctggcagagcttttgccgaagcggcgtcaaaaatgcacggcacagactgttgtgccgtggctgctgctgttcggcatcttcggcattgcgctgctgcgctgtgccatgatcgcctttgtcgaggtgtccagcttcggcatcggcaccagcacgatgtacctggcaacggtgcatccgctgctggtcctgtacgcatttgctgggctgcttttgtacggcagaccgagaaaaactgacaaacgaagggagaacgcatgacagatctactggtcatcggcggcggcgcggcgggcctgatggcagccggggccgcttgtgcccgcgggctgaccgtgaccgtgctggagcacaaccccaagggaccgggccaaaagctgcttatcaccggaaagggacgctgcaacgtcacaagcgacagcgatgtgcgggagtttctgccctatgtgcggcataacgggcggtttttgtattcgagcctctatgccttcccaccgtcggcggccatggagctgttcgagtcgctcggcgtgccgctcaaaaccgagcgcgggcggcgggtatttccccggagtgaccgcgccgccgatgtgctggccgcgctgcgcgattatgcacgcgatgcggaatttgtgcgcggcagcgcaaaaaagctggtcatcgaggacggcgtctgcaagggtgctgtgacggaccgcggcgagacgctgcgggcagaaaacacgctgatcgctacgggcggcatcagctatcctgccaccggcagcgatggcagcggctacaggctggcgcggcaggcggggcacacgatcatgccgccgcagcccagcctgtgcagtctggtcagccccgacccggcctgccgccgcatgatgggcctggccctgcgcaacgttacgctgacgctgctctgcgacggcaagccgctgtttaccgagcagggcgaggcgctgttcacccacttcggcctgtccgggccgctcgtcctgtcggccagcacctacattgaggatataacgaagcaccgctatatctgtgagtttgacttaaagcccgcgttggatgaaaaaacgctctatgaccgcctgacccgcgactttgcggagcagggcagccacagtgcgcagggggcgctggcaaagctgctgcccaactcgatgcgccccgtcgccgtcgaaaagtggggcatcgaccccgccacgaaggccgcgcagatcacgcgggagcagaagcaggcgctcgttgacctgtgcaagcactggcaggtgccggtcagcgcgctgggcgataaggagcacgccgtcatcaccgccggcggcgtcgatgtccgcgaggtagaccccaagacgatggccagcaagctatgcgcgggtctgtactttgccggggaggtcctcgacgtggacgcccgcaccggcgggtataacctgcaaatcgcttggtcaaccgccgtggcggcagccaaggcgctgtaacccccgccttcccccgcggggggaaggtggccccgcagggccggatgagggcagaccttacggcagctgcacgggaaggagaaaccacccggtaggggccgggcatgcccggcctgcggctctgcggcggtaaccctctaacgggcagcccccgcaagctctccccccatcagccgcctgcgggcggcagcttctcccccaaagggagaagccaaagacgattctatttaaagggatgataactatgatttccatcgcaatcgacggtccgtccggggccggtaaatccagtctcgccaaggcgctcgccaaagacctcggctatgtctacgttgacaccggcgccatgtaccgctccatcggcctgtacgccgtccgtgcgggcgttgacccgcatgacgccgacgctgtcgccgcactgctaccgcaggtcaagctcggcatccgcctgatcgacggtgcgcagcacatttatttaaacggcgaggacgtcagcacggccatccgcgccgaggagatcggcatggctgcgtccgccgtggccgcacaccccgcggtgcgcagctttctgctggacacccagcgcggcttggccgaaagccagaacatcctgatggatggccgcgacatcggcacggttgtgctgcccaacgccacggtcaagatcttcctgaccgccagcgccgaggcccgcgcccagcgccgtgccaaggagctggccgagaagggccagcccgcggactttgccaccgtgctggccgacatccggcagcgcgactaccaggacagccaccgcgccgtggccccgctcaaacaggccgacgacgccattctggtggacacaagcagcatcggcctgcaggagagctttgacctgctcaagcgcacgattcttgcgcacatctaagggggctgacgatgcttttatactggattctgctgcccatcgtctgggtgctggcccacattctgttccggttcgaggtcatcgggcgcgagaatttgaaggccgtccgcgatggacgcgcctacgtcatcgcaccgaaccacattgccaaccttgaccctgtcttgatcgctataacgatatttgactggaagcggctgcgcattctggccaaggaggagctgttcaaaaatccgctggccggctggttcctgcgctgcatgggcgctgtttccatcgagcgcggcaagggcgacaccaccaccgtcgaaaagctgacgaacgagtgcaaaaatggtacgggcatcatgatcttccccgaggggacccgcacaaagaccggcaagctgggcgtgatcaagagcggcgcatttgtgatcgccgccgccgcgggtgcggacatgctgcctgtgcgcatcatctacggcaccaaggacggcaggctgcaccttttctgcaagctgcgcatcgtctttggcgagccgatccccgccgcggacctgcagatcagggaccagagccacaaaatggcggagctgcgccgcatgaagaacctcctgcgcgacgagctggaacagctgctggccgacaacgcctttgccccgcgccttgccgaaacggcagcggaggaacccgctgcaccggacgacaagccgcagctgccggaatgacattccccttggccccctctgggagggggctccgcccgcagacggtgggggagagagctttgccgaggcccgaagcttcggataaagacacggctctctccctccggccctgcggggccactgctccccttctggcgcaagcgccatctcccccgtttcgggggagtctgtctcgcagagggaggcaaggagtttacaaaaggagcttatctatggagatcatccgtgccaaaaccgccggcttctgcttcggtgtggaccgcgcggtcaagctgacttatgatttattggcgcagggacgcaaggttgcgaccctcggcccattgatccacaacgcccaggtcgtggccgatctggaggcgaagggcgctgtgacctgcccggatattgacgccgtgcccgacgggtatgaggtcatcatccgcagccatggcgtgcccagaagcgtctatgataaaataagcacacgcagcctggcgtatcacgatgccacctgcccgtttgttgcaaaaatccataaaatcgcgatggaagcggacaaaaacggtgcgcttttgcttgttgcaggcgacgccgaccaccccgaagtacaggggattgtcggccatacaagcggccctgtgcaggtttttgccaacctggaggagctgcaaaaattgctccccacgcttttgcaacaagaatccatctacgtcgtcgcgcaaacgacatttcgcgtggaaagttgggaaaattgcaaagcttttttaaaaaaagagtgtacaaaagccagaatttttgatacaatatgtaatgcaacgtgggcgaggcaacaggaagcggaagacctcagccaaaaatgcgatcacatggtcgtcattggtggtcatcattcttccaatacccaaaagctgttacaggtcgccgcgcggcataccaaggccatcaacgtcgagactgctgatgaactcgaccctgcatggcttgctggtgcggcgcgtgtgggcgtgacagccggggcttcaacgccttcgtctataattgaggaggtacttaacagtatgagtgaagagatccgtgacgacatgagcttcgaggagatgctcaaagctaccgaagccaatgcaaatgtttacaccggaaagatcgtaaaagccaaggtcatcagcgtttccccgacggagtgcatcgtcggtgtcgacggctccaagcacaccggcattgtgcccctgcgcgagatgagccatgaccccaacgccaagatggaagaccttgttaaagagggcgacgagctggatctggttgttgtcaagaccaacgatcaggagggtgttgacaccctgtcccgcgtccgttttgaggcccagaagggcatgaaggacgtctccgaggctgccgagaacggcaccgttatggaaggcgacgtcatggaggccaacaagggcggcgttgttgtcaacgtcaagggcgtccgcgtctttgttccccgttctcaggccaccatgcgccgtgacgaggactacaccaagctggttggccagcacgttcagctggtcattaccgagtgcgcaggccgcaagatcgtcggctccatcaacaaggtcactgctgaggccaacaaggccaagcgcgaggagttctgggccaatgttgaggtcggcaagcagtacaagggcgttgtcaagagcctgacctcttacggcgctttcgttgacgtgggcggtgtcgatggcctgtgccacatcagcgagctgagctggaacaacatcaagcatccctccgaggtcgtcaaggtcggcgacgagatcgaggtctacgtcaagagctacgatcccgagaaccagaaggtctccctgggctacaagaaggaagaggacaacccctgggtcaagctggagaatgaggttcccgtcggcaccgagttcaccgctcccgttgtctccatcaccaagttcggtgcttttgtccgcatcatgccgggcattgacggtctcgttcatatcagcgagatcagcaatgagcgcgtgaacaaggtctccgacgtgctgaaggtcggtgacgaggtccgcgttaagctgaccgccgttgactttgaccgcaagcgcatcagcctgtccatgaaggcctgcctcgacgagaacggcgaggacgctgaataattcttagtcattgcgcaaccgtatggggcctgcctgttgtaacaggcaggcccctttttgtacaagtaacctgtagggggcggcgtccgcgacgccctgcgggcgggcagtgcccgcccctacaaacgtaaaacgggtacatcatgcaaaaactcaaagacatcatccaaaaatactatgagggtctggcctacctgtttttcggcggggtcgcaacgctgctgaacctggtcgtctttgcgggcttccaggcggcgttcggtacagactttgccgcgggcatcggcaatattctggacaactgcatctgcatcctctttgcctattggacaaatcgcacgttcgtgttcaaaagcgcgaacaagggcaaggcggcctgggcggagttcgggcagtttgtctcctgccgcatcgccacgatggtcatggatcaggtcatcatctggctgggcgtcagcctgctgggaccgcatgtcgcgtttgccgcggccaacggcaagctgtgggccatgggcgtcaagctgttcagccaggtcatcgttatcgtgtccaactacgttttcagcaaattgtttatctttaaaaagaagtaacgcatcatccggaaggagcataccatgcttatttttaaagtggcaaaatttgtgctcaagcacccgctgctgacccatggagccaggcagctcgtgcacaaaaaactacgtcccccaaaggaggcatcccctatgaaacagaaagttcgcggtcacgcattccgtctggtggggctgatcctgggcatcatcggtgccacggtcagcatcacctccatcgttttcgctgccctgggcctgcatcaggcacgcctgtgcaaacattgtgagaaaggggaaaatttccgatgaaatacacgaaggaagaaatgctgagcaaggtcgaccacaccctgctcaagcctgaggcaacctggccccagatccggaccctctgcgatgaggccatcgccaaccactgcgcgtcggtctgcatcaacacctgctacgtcaagcaggccgtcgagtacatggcgggccgcgtgccggtctgctgtgtcgtcggcttccccctcggcgctatggacaccaagagcaaggcatttgaggctaaaactgccatcgagaacggcgcgtccgaggtcgatatggttatcaacatcggctggctgaagaacaagcagtacgacgacgtccgcaatgacattgccgccgtcaaggctgctgtgggcgacaaggtgctgaaggtcatcatcgagacctgcctgctgaccgacgacgagaagatcaagatgtgcgacatcgtgcccgaggccggtgccgacttcatcaagacatctaccggcttctccaccggcggtgcgaccttccacgacattgagctgttcgcaaagcacgttgcgggtcgctgcaagatcaaggctgcgggcggcatctccaccgtcgaggacatcgagaagttcctcgagctcggcgcagaccgccttggcacctcccgtgccgtcaagctgctgacctccggcgaggccggcagcgggtattaagggaatgcggtgttccttctttgcaaagaaggaaccgaagaaattctaaacaataaatgcgggagactgcttttcgtcagcagtctcccgcattttgttttgtgcagcggtaggggacggcgtccccgacgtcccgtaagttggcagttgccctccgggcagggtgtagggcggccagccctctggccgccgcaaggggcgtattgccttgtggtgtgcatctttttttaaatgggtgtgtggggggggggagaaaaaaacatgaccgcgccaacaaactggaattttcaaattagtctttgcaaataacctttgaaccttcaccatcaattacaattccctgacggttgttaattgggcatagattcaaatccgaaaaatcagtcattattttctcggtaactttcttaaatggtgctgtaagataatgcggaagaacatagaaatcaatcaaatcaagccctgcatcatcttcttgtgagtagtcctccggcttttcatccatctgctcgatatattggatgcttggagcgcatataatcgcacctgccgattcaccaatcatcagttttccctttgccaattctttcttcaacagctcatccgttcccgttttacggagctggtctataaggaaaaaagaatttccgccggtaaaatatatcacatccgcatcttcaaaaacagactgtatcgttgaataagcctccgttgaaatatcaatttcagttacgattgctcccaactttttgaataattttcgagccgagccgacataaccggtgtagccttcacgcagcgaagctgttggaataaatgcgacttttttattttcaatttcttcctttatcagacttcctacacttgaaaagtgcgaacataaaaacagtttcatccatatcctcctttacaaatcccaatttattgaactaggttaagtatatcatactctcctgcaaaagtacaccctgcgccccggtcataccccgccccccgcgccgcatacctttataaaccataaaagggggcgtacctatgcaagattcacccatcgtacttaccaccctcgccgggctgtccaccggcctgggcgggctgctggctgtgctctgcccgccgtcggagcgtctgctggcggccagcgcgggctttgcgggcggggtcatgctcacggcgtcgctggccgacctgatgccggaggcgctggcgttttacgggggctacctgccgccgctggcctgcggcggggcggttgtgtcgctgctgacgctcgggatgctgaccgcgggtctgctggggcggctcctgcccgaggaagctgcactggccgcccgctttggcaaaagcggagacccggcccgcgccgcggccatgcgcacggctcttgtcacggggctggcgctgctgctgcataatttcccggagggcgtactgaccttcttcgcgggcacggcggatccgtcgctcggtctgcgcaccgccgcggccatcgccctgcacaatatcccggaaggacttgctgtggccgtgccatttgcttacgcaacgcgccgccgcaccgcgggtgtgctggccgcgctcgtctccggcctggccgagccgctcggggcggtgctggcgtggctgttcctgcgtcggctcttcacgccgggctttctgaacggcaccgttgtgctggcggcgggcgtcatggtctgggtggcactggcccagctgctgcccggtgccctgcaccccgcccaccgcaccgcgggcattttgggcgccgccgtcggctgccttctcatgctgttaggcattgcggcgctgccataaatgtgctatactatatctgtatatttgtgcaagaaaggagcaagccacatgttgaaaaaaatcgcggcgctgctccttgtgtctgtgctgctggcggggtgcagtgcggcaggggatgtcgagaccctgctgcgcgcgccgcagctctccggcgagagcgcggccctgcaaaaggcgctgaacaactatctgggcggcagcgcaaccttaaagtatcccgccagcggcgatttcctttcgccgtttgcgttcggcgactgggacggcgacggcacagacgaggccgccgtcctctacaccaccgacacgaccagttccaacgtctggctggccgtgcttgagccgacgggggagagcagctggcgcgtcagccgcgtggtggagggcctgaccagcgaggtgcagagcttttccgccgcgcacctcagagacacgtcgagtcagcagctgctggcagggtatgtctcgccccagggcgaccaatatctggttgtctatcaatatgacggtgatacgttatctacggtcatcagcaagagctataccgacatgatcgtcgcggacttcaccggcaagggcgacacgcaggacctggttctggctctgccgccggacactgagctgggcggcgtgacgctgcagctgctgaccgccaacgacggcgagttccgctcgacccagacgctgaacctgggcgagggcgtctacagcagctgcgcggccctgcacgcgggcaccggcagcgacgacggcatgtacctggtcatggatgcctggaccggcacaagcagtctggtatcggacatcattctgtatgacgaagcaacgggctttttgcagccctaccgccccagcggcatgagcgacattcagcgcagcacgctgcgctaccaccgcgagctgctgagccgcgaccttgacgacaacggcacggtggacatccctgtggagatcgacgacggcggcacgctgcaaacgccgatggacaagcggctgagctttctgctctggaaggattacacctcgatggcgggcggcaacagcaagtttggcgtctacgacagcgagtataacatttttatggaactgcccgagtcgatgcacggcaacatcctgatccgctccaaccagagcggcacgggttggctgatctgcaacgccgagggcacgacggtctactgcgagatgcgcgtcgttgaccccgcggacaacgcggccaccggcgtcggcaactatctgcgcattgcaaacattggcagccagcagctgcaagcccgcgttgtaacgtcgtattatggattgagcctggatttcatcagccagaacacggtgctgctgggatcaaattgatacagaaagggaaatcgggtttatgaaacgagttttggtagtcgaagacgaagccagcatccgcgaaatggtagccctgaacctgaaaatggccggctgggaggtcgtcgaggcccccagtgccgagcgcgcgctggaactgatgcacagcggggaacgctgcgacgcggcacttttggatattatgctgccgggcatggacggcttgagtctctgcgagacgatccgccgcggcgacagagacatcggcattatcatcgtgtcggccaaggggcaggagagcgataagatccgcggtctgtccatcggcgcagacgattacattacgaagccgttttcggtgtcggagctgatcgcgcgtctggaggcgctgacccgccgcatccaccgcggcagcggtaccgccgccaagcccgccgaggagccggagcagctggtcagcggcccgtttgtgctggacgaaaagagccgcattctgtacaagtctggcaagcccatcgacctgacgcaggtcgagttccaaattatggagctgttcttccgcaatccgggtaccgcgctggtgcgtgaaaaaatcctggaaggtgtctggggcaaaaattatttcggcgatgtgaagatcgttgacgtgaacatccgccgcctgcgcatgaagatcgaggacgagcccagcagcccgcagcatatcctcacggtttgggggtatgggtataggtggaatgcgtaaaccgggaacagcagtccgtaggggccgggcatgcccggccctccaccttgccattaccgcccatttatcttttgcatcgtagggagggggcttgacccctccgcggggcgtcgaggacgccgccccctacatccttcgccgcaaaccttccaccaaccgtaggggaggaattcatccctcccgcgccgcttccgtcatctctcaccccgccctctcaccacctaccaaaatcccacaggaaaggagctcaccgccatgcaatccaccagcattatccgccgctggatacgcggcagcctgctgatcacggtgctggtgctcgtgctggcggagggactgttcctgtactacagctacaacgacctctacggcggtgtcgagcgcgcggtggaaaatcgtttttccaccgtcgtgggccgcctgcaggccacgggcacggcgggggacaccgcaaccaccgccgaaagccgcgccaatgtcctgcggcgcgtcgtcgagcagttcgacgagaaggacaagtttgaatttatgctgctggacgcacagggcgttatcctggcgacgagcagcggcaccatgaaccgcgacctgacaaacggcaccgactatggccgtgcgctgacgtccgccaacgggattgggtcggctatcttcacgacaccccagggcgagagggtcatggccattacgatgcttgcgccctacgcggcgggcagcatcgccgccatgcggatggtcacaagcctgactctcgttgacggccagtggtggcgcaccgtcgccatctgcgttggtctcggcgtgctggtgctggcctttacggtgtggagcggcttgttttttgtgcgctccatcgtccgtccgctcggtgaagtcgaggctaccgccaccaaaattgcgaagggtgacatgaaagtccgcctgccggacacccgctacgacgacgagatcgggcggctgtgcaagacgatcaaccagatggccgaggatcttgccgagaccgagcggttgaaaaatgagttcatctcatcggtcagccacgagctgcgcacgccgctgacctccatccggggatgggtcgagacgatcagcaatatcgacgacccaacgaacgaaaactaccgccgcggcctctcgatcatcggcaccgagacggaccgcctttatacgatggtcgaggagctgctcgacttctcccgcctgcagaacggcatcaagatgaactgcgaggtgctcgacttcgtcgccgaggccaccgacgccgcgctgttcgtggaggcccgcatccggcaggaggggatgcagctcgtctactccgagccgcccgagccgtacccggtctgggccgaccccgcgcggctgcggcaggtgtttgtaaatctgttcgataatgcgatcaaatattccgagccgggcggcacgatcttcctgacgctgagccgcacgccggtcacggtcagcgcgtccatccgcgaccagggccgcggcatcgcgcccgacgacctggaaaaggtcaagcagaagtttttcaaggcgaaaaactcggtgcgcggctcgggcatcgggctggccgtcgtcgatgagatcgtcggcacgctgggcggcaaatttgacatcgcctccacccttggccagggcacaaccgtcaccgtcaccctccccgtctaccaccccgggcaggagcacctgcatgacaagatttaaaaaggcttcccccgtgggggaagctgtcaccgaaggtgactgatgagggcagattttgcgtcagaactgctttgcggtttactgcgcgggcttccccctcatccggcgctgcggcgccaccttcccccacggggaaggcagaaaatttgacaaggagaaccatatatgtccaaagaatttcgcacctccgtcggcggccaggccctgatggagggcattatgatgcgcgggccggagaaaatctgctgcgccgtgcgtaagccggacggcaccatcgacctgacctatgacactgtcaccgtccactggtacaacagggtcccgctggtgcgcggtgtctgtaacatggccgaaaacctgtacaagggctaccggtatttaatgcacgccgccgatatagcggtggagggcgaaaccgagcccgccgagtccaagctggacaaatggttcgaggaacacgccacccccgccgtgcagaacgtgctcatgacctgcgccgccttcgttggtgttgtgctggcgctgttcctgtttacgtttttgcccacgtttttgaccggcctcgtcatgaaggttgtcccgctggggcgctggccgcgcgtcatcctcgaaggtgcgctgaaaatggccatcttcctcgggtacatgtttctctgcacgcggttcaaggacctgcaccgcgtctttgagtaccacggtgccgagcacaaaaccatcgcctgttatgaggcaggtctgccgctgaccgttgagaacatccgcaggcagagccgcttccatccccgctgcggcaccagctttatgatccttgtcatcattatcagcatctttttgtatgcggtgctgccgtggaccagcacgggaatgcgtattgtgtacaagctctgcatgttcccgcttttggtcggtgtttcgtatgaaattctgaaatgggcgggccgttccgacagtgtgctgtccaagatcgtctcacagcccggcctgtggatgcagcgcctgacgacctttgagcccgacgactcgatgatcgaggtcgccattgccgctgtgaccccggtcctgcccgaaaaacaggaggaagcccgctggtgaatactgcttatcaaagtctttgcgcccggctcatgatggctggtgtgcccgatgcccgctttgacgcggtgcagctgtacaaatttgtcacgggccgtgacccgcgcctggacaacggccccacccccgacgaggcttcgagcctgcgggtcctgggcgagcgccgcgctgcccgtgagccgctgcaatacctgctgggcgagtgggattttatggactttacgctcaaggtgggccgcggcgtgctctgcccccgcgccgacagcgaggtcgtctgcgaggcagccatcgagctgttgaaggacgcagaagcgcccgtcgtctacgacctctgtgcgggcacgggctgcctgggcctgggcattgcccggcatctgcccggcgcggctgtgacctgtgtggagaaaagcgccgacgcctggccctacctgaccgccaatgtggcgggaaccggcgtgcaggccgtgcaggacgacatctttacctattataataggctgccctccggcggggccgatctcattatctcgaacccgccctacctgacggcggaggagatggcacacctgatgccggagacggccagagagcctgccatagcgctggacggcggcgcggacggcctcgatttttaccgcctgctgaccgcgcactaccgggacgcgctgcgcccgggcggctggctggtgctggagatcggctgtgcccaggccgccgacgtgctggcactgggggcggctaacggctgggtcaacggcagttgccgtaaagactacggcagcaatgaccgggttgttttgctgcaaaaacctgaaaaaagctgctgaaaatccgatttatgggacgcaaaacacacaacaaaatgttgtaatttactcgtaaatcgtatataataggtacaaacgcaaatcataagcatacttgcagataaaaggagaaccgcaacatggcagcaaaaaaagataccgcacccaaaacggcagcccccgccgccgataagaaggccgcgctggaaaccgcgctggcgcagattgaaaagcagttcggcaagggcgccgtcatgaagctgggcgcgaacgtcacgatgcaggtcgacgcgatccccaccggcagcctgggcctggatctggcgctcggcatcggcggtgtgccccgcgggcgtatcgtcgaggtctacggccccgagtcctccggtaaaacgacgctggcactgcaaattctggcagaggcccagaagatgggcggtgaggtcgccttcatcgacgtcgagcacgccctcgacccgacctatgccgccgcgctgggcgttgacattgacagtctgctggtcagccagcccgacaccggtgagcaggccatggagatttgtgaggctctcgtccgttccggtgccatcgacgcggttgtcgtcgactccgttgcggctatggtgccccgcgctgaaatcgagggtgagatgggcgacagccacgttggcctgcaggcccgtctgatgagccaggccctgcgcaagctgaccggcgtcatcggcaagacgaacaccgtctgcatcttcatcaaccagctgcgcgagaaggtcggcgttgtctacggcaaccccgaggtcaccaccggcggacgcgcgctgaagtactattccagcgtgcggatcgacgtgcgccgcatcgagggcctgaaggactccaccggcgcgttcatcggcaaccgcacccgcgccaaaattgtgaaaaacaaggtcgcgcccccgttccgtgaggccgagtttgatattatgttcggcgagggcatctcgaagatcggtgaaattcttgaccttggcgtcaagctgggtgtcgtccagaagagcggcgcatggttcaactacggcgagatgcgcctgggccagggccgcgacaacgccaagcagttcctgaaagaccaccccgaggtctccgacgagatcgagaagatcgtccgcgcgaactctgaccgcctgctggccgccggtaagaagggtaccgtcaagccgctggacccgagtgaggtcatcaagcccgcggcagccgctgaagcccctgccgctcccgccgccaagacgacgggcagcgaggtcgacctcgatattatggtcgatgaataagccatgccgcgcttaacgcaaatcaaggagacaaaaaaaggccgtctggcgctgtttttagacggcgagtttgccttctcgctggatgaggacaccttcgccgctgccgccctgcaccaggatgacgagctggaggactggcagatcgaggagctgcgcaagaaaagcgagacccgccgcgcgctggacaaggccatggattatttatccctgcgcgaccacgcggcaggggagctgtaccagaagctctgccggaagttcgacgcccacagcgctgcctacgccgtggcgcgggcgggggagctgggacttttaaacgatgtctcgtttgcccgccgccgcgccgcggagctgctgcgcaagcgcaagtcccgccgcgagattttgaacgatctttcggccaagggcattgaccgcgacaccgccgccgatgtggtggaggagctgtttgccgagacagacgacggcgaaagccccgagctggagacggcccgtgcgcttgtgcagcggcagtacgccgccaagctcgccgccggtaagcgcgaccaggtcgccgccgccctcgcccgccgcggattttcccatgcggtgatacgggaagcgctgtccgacgacgaataaaatccagctgccctgtaggggccgggcatgcccggccctcggcctgccgattgcatccccttaccggttcgcattgtagggaggggtcttgacccctccgcggcggccagagggctggccgccctacaattttcggcaaacatctgccgccctgcggggtgtcggggaaccgcccctataatcctgcgcaaaccatacaatattatattaaaggactacccaatgaaaattgccattatctccctcggctgcccgaagaaccaggtcgatgccgacgtattctgtcacgccctcatcaaggacggccacaccaccgtggctgaccccgccgaggctgacattatcatcatcaacacctgcggcttcatcgagtccgccaagaccgaagctatcgagaatatcctgatggcctgccagtacaagcaggaaaatcctgacctcaaggtcattgtgaccggctgcctggctgagcgctacaagcagcagatcattcaggagatccccgaggtcgatgctgttgtcggcattggctccaacgccgcgctgcccgccatcgtccgccgcctctgtgccgacggtgcggaccagatcgagagctacggccccaagagcgatatgcggctcggcggtgcgcgcgttatctcgaccccgcggcactatgcgtacttaaaaattgccgagggctgcaacaatggctgctattactgcgccattccgctgatccgcggtgcgctgcgcagccgtgaaatcaacgactgcgtcgccgaggcccgctggctggcgggcgagggtgtgcgcgagctgattctggtcgcacaggaccccaccgcctacggcgaggactggggcagacccggcgccatctgtgagctgctggaccgcctgcaggaaatcgacggcatccgctggatccgtatcctgtacgcctatccggaacgtatcagcgacgcatttattgccgccatggtccgcaacaccaaggtcgtgccctatctcgacctgcccatccagcactgtgatgacgcggtgctcaaggccatgaaccgccgcggcggacgtaaggagatcgaggacgcgattgcccggctgcgcgcggccatccccggcatcacgctgcgcacgacgctgatcgcgggcttccccggtgagaccgaggagcagtacgcagagctgtgcgacttcgtcaaaaccgtcaggtttgaccgcctcggctgctttgcctactccgccgaggaaaacaccgtggccgcaaaaatgccgaaccagatcgacgaggagacgaagcagcgccgcgccgatcacatcatggagctgcaggccgaggtcagcgccgagcgcgagggcgagaaggtcggccatacctatgagtgcatctgcgacggcgtcgatgacgagaccggcatgtacctgctgcgcaccaaggccgactgccccgagatcgacggcaacgtgctgacccccgcggacaccccgctggagaccggcgcattctataaggtgaccatcaccgattccgacacctacgacctgtacggctacgcggaagaaaggctggaggactaagctatgaatctgcccaataaactgacgatgatgcgcgttgttttggtgcccgtctttatgatttttgccgccgtttcccactatggcacagcggacttcaatgcggcttatatgctgattgcgggcgtcatcttcgccattgccagcattacggattttctggacggctacctcgcccgcaagaatcatcttgtcaccgacttcggcaagttcatggacccgctggccgacaagtgcctgaccactgcggcgttcatttacatggtcaccgatcacgtctgctcgcccatcgtgctggcggtcatcctgttccgtgagttcgcagtggccggtgtgcgtatgctggccgccgagaccggcacggtcattgccgccaacatgtggggcaaggtcaagaccgttttgcagatgctgaccatcatcttctactactttgtcggtgcgctggccgggcccacggatgttggctttgtcagctttattaccattgtgctctgctggctctgcggcgcggcgaccctgctctccggcggcatctacctgtggcagaaccgcaagctgttcatgcaggcgaagtaacagccgccgcgcagtagaggccgggcatgcccggcccgcggccttgccatacatgccattctacatcaggtgccgggccggacatgtccggcccctacaaggcaacggacccaataaggagaccccaacttgtcaaagctcaagccccgtacatttttaaaatgcatctaccgcaggatggcccgcctggagcgggccgtcctgttgctgctgtgcatttttgccgtcaagttcgtgttcagcacggcggcgcattttgctgtgccgctgcaagttgtcgatatgctcggcagcgggcggaatccggtggatgtttggctgctgctgctctcctgtacggcggtgctgggcacattctgcctgtaccgccgcgcggcgcgggcgattggcgcaaaatgcacaaaagcggacgccgttattttagcagtctgcatagcggccagcgccgcattctatctgcacgccatggtgggccgccagagtctctacctgtgggacaacgcgacctactacaatctgcaggtgcggctggaatccaactttgcggacggcgtctttaccggcgtcggctcgaccatctacaagacgtggttcaacgactacgcgccgctggtcatcaatctgctggcagagccgttcttcatgttcacgccgcgcacggccaacacgtttgcgctgctctgcgcgctgctgatcccgtcgctcgtctactacagtgcatggcttcttctgacggtgctgcgccgaaaattgcagccaaaggccccggtgctgttcacggcgctctctatggcattcgtcctgttgctgccgcttttgcacattgcgctttaccgcggtatgccggacctgctcggtgtcgcgttcgcgtttatgctgctggcgctcggcgtcgggtacgatttcagccagccggcccccgcgcggcttgtgtcgctggcggcctttacgggtatgctcatgctgacccgccgcagctacatgtttaccgttgtggcgttcttttttctgtatggcgtttgggtgttagcctgcgctgtacgcgcccggcaggtacagaccgccctgcgcttcggcaggtttgccgcggcctcgctggtctgcgtcggcgtaccgctgctgccgatgttctggcgcatcgccaaggccgactacagtgaccgctacgcgacctaccagaccggcggctttctggcagagctggccaaccagcgtgtctatctgggctggctcgtgtttgcaattatactgatcggcatactatacggactgtataatgctaaggcccgtgcgctcgccgttcttgccgccgtcggcgcggtgctgaccgtgctgctcgtcacccgtgtgcagaacatggacgaccaccagtcgctggccgtcgcgccgttctacctgctgggctgcttcctctgtgcgctgctcgtcagcaatctgccgtgggcgtggccgcgccgcattctggcaacagcggcgggcgtgctgtgtgcgctgaacttcggcgcgtgcagccagctgctgccggtggttttccccagcggattttacagtggactgtacttttacgtggacagcccccgcaatgatttacagcaggtcgccgaggtcaacgcttggctgcgggagaactgcaccggcgaaaactccgcctacatgatctgtcacggcgtggtctacagcccggatgtgttccgcatctcggcgctgccggatgagtccatccgcgaaattctgccctacggtgcctgcaatcccggcaacgatgccttcccgaaggagctgctcacggcgcaggtcgtgctgacctgtacgccgtttgaccccaacaaccacaccgagaagatgaacgcggccttcctggaaaaccaggaaaagtacgcgccgtttgagctggcagccaccttcgacatgggcaacggctacacgatcacggcctaccgccgcgttaaggcaccgacggcggcagagctcgacacctaccgcgcctatctggccgaggagaacgagcggttcccctacaatttcagtgctgtctgggacgagctggccgtgcaattcgcaaataacggctgaatcccccttgcaaccgcgccttgcgttggctataataaaagcatccctatatagaggaaggaacgtgcaagctatgcagatcttcaacaccatgacccgccagaaagaggaattcgtcccccagaaggagggcgagtaccgcatctatgtctgcggcccgacggtttacaactatatccacatcggcaacgcgcgcccgatgatcgtctttgacacgctgcgccgctatctggaatactgcggcaacaaggtctactatgtctccaacatcaccgatattgatgacaagctcatcaaaaagggtcaggaggagggcacctcgatgcaggaggtcgcccgcaagtttgaggccgagtacatcaaggattccgacggtctgaacgtcaaggcccccaccgtgcgcccccgcgctactgagcatatcggcgagatcatccacatcgtcaaggacctcgtggactccggccacgcctatgtggcccgcaacggggatgtctacttccgcgtcaagtccgaccccggctacggcaagctgagccacctgaacctcgacgacctcgagagcggcaaccgtgagctgcgcagccgtatggacgacgacctgaaggaggaccccgccgatttcgcagtctggaaggccgccaagcccggcgagccctactgggagagcccctggggccacggccgccccggctggcacattgagtgcagcgccatggcccgcaagcacctgggcaagaccatcgacctgcacgccggcggtcaggacctgatcttcccccaccacgagaacgagatcgcccagagcgagtgcgccaacggctgcaccttcagccgctactggatgcacaacggcttcctgaacatcaacaacgagaagatgtccaagagcgcaaacaacttcttcacggtgcgcgaaatcgccgacaagtatggctacgagccgatccgctactttatgctgacagctggctaccgcatgccgctgaattacaccgttgagctgatcgagagctgcaagaacagcctcgagcggatgtacacctgccgcgacaacctcgattttgccatagagcatgcccacggcaccgacacggcgctggtggaaaagtgcgaggatgcgcgcaaaaagttcaaggccgccatggacgacgacctgaatacgccggacgctctggctgcgattttcgatctggtcaaggacatcaacacgctgtccgatgcctccgacaaagtgacgctggagactgccgccaagacgtttgatgagctgaccggcgtgctgggcctgctgtacaaccgcaaaaaggccgacagcatccccgccgaggtcaccgcactggttgaggagcgcgctgccgccaagaaggccaaggactggggccgcgcggacgccatccgtgcccagctgaccgagatgggctggagtgtcaccgacacggcgcagggcccgaagctcgcgaagctgtaaaatcatttcaaaaaaacagatgcaggggcggcctgcgcatctgcgccgcagggcgcgggtgcgtgggcttgcccctgattttgtgtgtaacatgacgaagcaacgaacaaaatcaaataagagcctctgggtgctgttgggcggtgccctgctgctgcgcctggtgctggcccttgtgacggacggctacccctacgacatgagctgctttgtggcctggggcgacaagctggccgccgagggtcccgccgctttttacagcgagggctactttgccgactacccgcccggctacctctgggtgctggggctggtgggggccatccgcgcggcgctgcacatcgcctacgagtccaagtggacgtattttctgctggcgctcgtgccgtcgctctgcgactgcgggctggcgtggctcgtctacagaacggcaaagcgcagcagccggggcgtgaaggagcataccgcgctggtgctgacggcgtttacggcgttcaacccgctgatgctgttcgacaccggtgtctggaagcagatcgacggcgcgtttgcgctgccgcttgtgctctgctttgtgctgctggaacagcggcgctacctgccagccgccgtgctgtacggcgtggcgctggccatcaagccgcaggcgctgctgttcggcccggtgctggcggtgtgctatctggcggcaattacgctggaaaaggaccgcctgcgcgcctttggccgctgctttggtggcgcggcgctggcactgctgccgccgctgctgacaggtctgcctttttttggcgttgtgcagttgatcccgaagctgatcgacaaatacaccggcacaatgtccggctacccctacgcgacgatcaacgcctttaactggctggcggcgctgggcggcaactggaaggggcaggctgacccggcattgtttggcatcagctggcagcagcttgggtgcctcaacattctgctggtcacggcgggactggcgtattttgcggtgcgcagcgtgcggggcgggtggttctcaccgctgctgttggcggcgtactacggcatcggcatttttacgcttgcgcactgtatgcacgagcgctacatggtgcccggtgtgctgctgacgctgctggcagccgcgcactggaacgacatccgcctgtatgcggcgggcgtgggcctgtcgctgaccgggttcatcaatctggccacggtctactcgctgaccggcaccaacgatgaatggctgacgagcgcgaccagctcgacagtggccgtcctgaccggccttggggagacggtctgctttgtgctgctgatctttgcagtgtgggacattgcccgccatggccacacgctggccctgcccgagacaaagccggaaactgccccgcccgtgcccgcaccgcagccgaaatggacccgccgcgaggtgggcgcactgttggcgctgacggcggccacggcggtgctgagctttagctatctcggcagccgcaccgcgccacaggacccgctggacgcgacaggaacggcgctctccgagagtgtgacgctggacggcagcgcggtatcgctgtgggtctacccgggcatctcgttcggcggcagcatgacggtgaccgacgccaacggcagcacggtctttgaaaaggagctgaactacggcacctgcttcagctggacagcgaacgacgtgcagctggcggcgggcacccagctgacggtcatggtcgagaacgcccagctgtttgagctggcgttccgcgatgccaacggccggctggtgccggtcacgggcggcggcgcgctgtttgacgagcagaccgccgtgcccgacacgatcagccagctgaacagcatgtattttgacgagatctaccatggccgcaccggctatgagcagctgtacaaaatgcccgtctacgagacgacccatccgccgctgggcaaggacctgatcatggtcggcattgcgctgttcggcatgacggcgttcggctggcggttcgcgggtacgctgtttggtgtgctgctggtgccgctggcgtggtgctttgtgcgccgcctgacccgcaaaccgtgggcggcagccaccgcaggcgcgctgctggcgctggattttatgcgcttttcccaaagccgtctggcaacgattgacgtttacggtacgttttttatcctgctgggagcctactgtatggtgtggtactgccagcgggtgctgaccgacggcgtgaaccgcgctctgctgcagatggcgctgggcggcgctgcgttcgggctgggctgcgcagccaagtggaccggcatctacgccggggccgggctggccgtgctgtatctgggcgtgctctatgcgcgatggcagcagaaaaggcccggcttccgggcggagttccgcaccgcggcggtgggcggcgtgctgttttatgtgctgctgccgctctgcctctacattgggtcctatttgccgtactggtggcgcgatccggcgttcagcctcagcgattggtggcagtgccaggtgtcgatgttcagctaccacgcgacgctgaaggcgacccacccgtttgagagccgctggtacacttggctgctgggcctgcgcccggtgtggtactaccgcaacggttacctgccctacggcatgaaggccagcattgcgggcatggccgggccggtcatctggctgttcgggctcgcggcgctggtcgggcttttgtggcatcaggtcagcgggcgcggcagccgccagggcgcgggtgtgctgattttgtacggcacgcagctcatcccgtggatgctggtgacgcgctgcacattcctgtaccattatttccccagctcgatgttctgtctggcggcgctggcactggtgctggcgcggatgaagcacgtagactgggcgaaaaagatcgccgcgggcctctgcgtggtggcgctcgtcctgtttgtgctctattatccggcgctctccggcctgcccattcccgcctggtgggctgacgccctgaatgccctgccgagctttgggttctattaacggggaacgggggagttcctttcttataagaaaggaaccgaaagaattataaaacagcaaaacaaagaaccactgctatgggaaggcataacacattccttagcagtggtttttgattatttatttagaatttcttcggttccttctttgtaaagaaggaacaaatctcccgtacttacgcttcgggcagataaatatgatgcggcagaccctcgacgtagatgggggtcagctcagcctgtacgaggggcagggcataggcgaggaattcgtccgtcatggcggtgtggtcggcgttgacccactccagcgggaccttcttctcgaggtttgcgacctcgctgatcgggtgcaggctcgtgccgcactggtacggcgcattggaaatgcggtccagtgcgaccatctcgccggtgtgaccctcaaacgcggccttggcagcggcgccgccgacctgatacgcctcggtgatgtcggtgcggctcgtcagatggcccgcacagcgctgcagcgtcgaaagctcgatgcagcgggtcttggtgtccagacggcgtgcaacggtgtttgccaggaagcgcgccgtgccggtcagagccttgtggccgaacgcatccaccgcgtggacatcgtcggccagctcgcagacatagcggccatcctcgagcttgacgccctcggacacggcgatgacaatggacggcttctccttctgcatccgctcgaccttctcgacgaagtgatccacattgaacggaacctcgggcaggcagatcatgtccacgccctcgcagtcctcggctttcgccagcgccgcggctgcggtcagccagcccgcattgcggcccatgatttcgacgatggtcacgtacttcgtgccgtagaccgtcgcatcgcggatgatctccttcatcacaacgccgatgtacttggccgcgctgccgtagcccggcgtgtggtcagtcaccatcaggtcgttgtcgatggttttgggcacgcccataaagcggatgtcgctgccgatgtgtgcgccgtagtcggccagcttgccgatggtgtccatcgagtcattgccgccgatgtagaagaagtagccgatgtccagctccttcaaaatctcgaacagccgaatgtagactctctcgccctcggcggtgtgccagtcgggcagcttatagcggcaggaacccaaatagctggacggggtgcgcttcaaaagctcaatgtctagtgcggttttcagcttgtcgtccagcacgcaggtgcggcgctccagcagaccggctacgccgtgcagcatgccgtagaccttgcctgcgccgcggcgcttgcagctctcatacacgccggccagacttgcgttgatgaccgaggtggggccgccggactgaccaacgattgcgttttttgccatggttttcctccttgcaggcggggcctgcagcttgtgggtgggtgctcccggcagagggtagaggtaccgcggagcaaacgaattttgtcatcctcagtgtatcatgccggagcaggtttgaccattgcggcagttgcctaaatagcggcgcggctatcgcagattcccgattccgcagtgcggaacggtcatgcgcggtacaattctgtctatggaaatctgttccgcggtatggaattttgcactgcaaaaaactgcaagaatgattccgaaactttgcaaaaattgcgaaacggcaataacttgtgcaagttgacgaaggtgttggattttgactgcttgtaggggccgcatatatgcggcccgcaactttgtgggggacacctgcttatgagtaggccgcgggccgggcatgcccggcccctacagtggaagattgaatttttcatgaaaaacatcttgacaccacccctcaaccgtgctattctttaaccatcaaaagcgttgaagaggaaaagtaccgctccatatccgcacagagagcctggcgtctggtgtaagccgggacggagatagggcgcgaaagaacacctccgagctgcagcctgaaatgcaaatagtagggtgtgccgcaggccgtgcgttacagcggcagcgtttcaaaggtgaacgtgtacggaaaaagtgaccgtatgccgttatttcggctgcggtaatttaggtggcaccgcggatccaagacagcgattcgtcctaatgcagggcgaatgggctgtcttttttgtttaccattcggagggtgtaagacgtaaaccgaaaaggagaaacaaacaatgtgctgcatcatgggttatgccgggcatgatctgcccaaggaaactttcaccgaatatctgctgcgtaccaccagccgcggcccggacgaccagcgcgtggccgagaccgagttcggcctgctgggctttggccgtctggccattatgggcctgacgcccgagggcatgcagcccttcttccgcggtgcggactgcgtggcctgcaacggtgagctgtacggcttccgctccgtcaaggccgagctggaggccgagggctacacgttcgagtccgactccgactgcgagatcatcctgccgctctactacaagtacggccttgacatgttcaggcacctcgacgccgagttcgccatgatcctgtacgacagccgcaaaaagctgctgatcgccgcacgcgaccccatcggcatccgcccgctgttctacggctacagtgagagcggccacattgcctttgcgtccgaggcgaaaaacctcgtgggcctgtgcaaaaaaatctatccgttcccgattggcagctactactgcaacggccagtttgtgcgctactgcgacattgccgatacgcccgcctacagccaggacgagctgcccgagattttgacgaacatccgcgaaaagctggttgccggtgtggacaagcggctggatgccgacacgcctgtcggcttcctgctgtcgggcggtcttgattcgagcctggtctgcgcgattgcggccaagaagctgggcaagccgatccgcacgtttgctatcggcatgagtgaggacgccattgacctgaaatacgccaagcaggtggccgactacctgcacgccgaccacaccgaggtcatcatcaaccgcgacatcgtgctggacgcgctggagaaggtcgtcgctatgctcggcacctgggatattaccaccatccgcgcgtcggtgggcatgtatctggtctgcaagtacatccacgagcacaccgacatccgcgtgctgctgaccggcgagatctccgatgagctgttcggctacaagtacaccgactacgcgccgtccgccgccgcattccagaccgagagccagaagcgcatccgcgagctgtatatgtacgacgtgctgcgcgcggaccgctccatcagcgtgaacagcctcgaggcccgcgtgccgttcggtgatctggattttgtgcgttacgtcatgagcatcgacccggccaaaaagctgaacacctacggcaagggcaagtacctgctgcgcaaggcgtttgagggcgactggctgcccgagagcatcctctggcgcgagaaggccgcgttcagcgacgccgtcggccattcgatggtggacgacctgaaggaatacgccgagacggtctacacggaccgcgactttgccgagaagtgcggcaagtacacctacgcccgcccgttcaccaaagaaagcctgctgtaccgcgaaatttttgagaagtactatcccggtcaggccgagatgatcgtcgattactggatgcccaacaaagcatggccccactgcgatgtcaacgaccccagcgcccgtgtgctggcaaactacggcgcaagcgggcagtaagggggaagtcctgaacccttccggccatcgctgacgctcggccacctcccctgatggggaggctttctcgcgggcgaagcccgcgcaaaaaggcgccccatcaggggagctggccgagtttacgaggcctgaggggtaccgctcgttgccctttacaaaaaaactttctcttgcttttccccaaaatccatgtataataaaactgatttcgcagagtagagacctgcgcgtggggcttggccccggagtgcctgaccaacggggagttgtggcaggacgaagtgacggaaacgtccgcggtgcaggtttcgcatcccactgctgcatgatggtgtgcaacggcggatgcggcgttgtgcccatccgacaaaaattgcctcctcccttgtgcggcaacgcacaaaggaggattttttatgtgcgaacaaaagctgtccgtcttttccgctgactactggcgcgctgcccggcgcgagctgaacaacccgcgggtgctggccttttcggggctggtctgcgccatggccattgtgctggaaagcctgcccatctacctgctggggccgagcctgaaaatttacttcagcttcctcgccgtctcgctgggctgcatgtgctacggccccgtcgtcggcatgatggccggggctatcattgatacggtgggtttcctgctggcaggctacggcgagccgtattttcccggctacctcattacggccatgctgtcgggactgatctacggcattatgctgtaccgccaaaaaccgacgctgccgcgcattattgtgacgcggctcatcatcaactacggcagcaacgtcctgctgggcagcgtctggaaggcgatgctctacggcaagggctacctttactatttcacctcgggtctggtaaagaacacgacgatgctgcccatcgaggtgttcctgacctgggtcgtgctcaacgccgccgtaaagcaggggctggacagaaagtttattcataagaggtaaaagcctcccttcgaggagtgcggacccaaaagtaaaagtcatacttttgcacaataaagtatgacttttactttttttcgttgtgcgtcctgcccagtgtactgtccgcacaggcaaaacatttacctgttttgccgaacttttcacaaaaatttaaaaattattgcaaacagatcgtaaagcggctacaatgggtcttgcaaggcagcaaaatgcgtcaattcccggcagattccggcacgaagcgacgcatttttgccgttttctgtacacacaacagggaggaacaatacacatgaagaaactgatgggcattctgctggccgcctctatggtgttcagcctggccgcctgtggttccaccgctgacactgtagccagcagcgccgccggtaccaccgctactgcagagggcagcagcaacaaccaggcccccgacgtcaaggtcggtgctatcattctgggcgacgagaccgaaggctacagcgccgcgcacatcaacggcatcaaggaagctgccgccgagctgggcatgtccgatgaccagatcgtctggaagtacaagatcgctgagggcggcgtcaccgccgacgcagccgaggaccttgtcggccagggctgcaacctgatcatctccaactcctacggccatcagacctacatggaggaggaagccgagaagtaccctgacatcaactttgtggccatgaccggcgacttcgccgccatttccggcctcgataacttctacaacgcctttaccgccgtctaccagagccgctatgtctccggtgtcgtcgcaggcatgaaggtcaaggagctggtcgagtccggcaccctgacccccgagacccagcccgacagcttcaccgctgacggcaaggtcaagatcggctacgtcggcgcctacaactacgccgaggtcgtctccggctacaccgccttcttcctgggcgtccagagcgtttaccccgatgtccagatggaggtcatgtacacgaactcctggttcgacatcgacaaggagggcgctgccgccgaggcactgatcgccaacggtgcggtcatcatcggccagcacgctgactccaccggtgcccccgctgccacccagaagctgaaggactccggcaagatctgctactccatcggctacaacatcgacatgctcgacaccgcccccaccgctgccctgacctccgcgaccaacgtctggaaggtctactacaaggagctgttcgagggtgcgcaggccggcaacatcccgcaggactggtgcaagggctatgaggatggcgctgtcgccatcaccgaccttggccccgaagttgccgacggcaccgccgagaaggtcgccgaggttgaggctgcgctgaaggacggcagcctgcatgtcttcgacaccagcaagttcaccgtcgacggcgcggaggtcaccaccgcccccatcgacctgacctactacgatttcagcaccggttctcctgtagctgtctatcagggcgagaccaaggaggccatctccgacggttacttccacgagggtgagctgcgtgcagccccgacgtttgccctgcgcatcgatggcatcatcgaggacgctgaccccgtcgcctgattctgactgaatctaaagggaagactgcggtggaaccgcagccttcccttttggtggtttattataataatgttcctgccttgattttttgaatccctgtaggggcgaggcatgcctcgcccgcagcatgaccgcggttgcccgcttatgggtggccgcgcaaggccgcgggccgggcatgcccggcccctaccaacttgactcttgaaaggagcctgcacaatggcgcagaacgaatatgctgtgcgcttggagcacgtcaccaagacctttggccccgtcgtggccaacaaggatgtttccctgggcgtgcgccgcggcgagattctggccctgctgggcgaaaacggcagcggcaagacgaccctgatgaacatgatcgccggtatctacttccccgacgagggcgagatctatgtcggcgacaaggcggcgaccatccgctccccccgcgacgcgctggacctgggcatcggcatgatccaccagcacttcaagctcgtggacgtgttctccgcgacggagaatatcgccctgtcgatgggcagcggcgagaagttcgacctgaaaaaggtccacgacaaggcccgcgccatctgcgaaaagtacgagttcgcccttgacctcgaccagaaggtctatgagatgagcgtcagccagaagcagacgctggagatcgtcaaggtgctgtaccgcggcgcggacatcctgatcctcgacgagcctacggcagttctgaccccgcaggagaccgagaagctgttcagcgtcatccgcaacatgaaggccgacggcaaggcggtcatcatcatcacccacaagctgcacgaggtcctgtccatcagtgaccgtgtcgccatcctgcgcaagggcgagtatgtcggcgacatcgccaccaaggacgccgacgaggccaagctgaccgagatgatggtcggcgagaaggtcgagctgaacattgaacgccccgagccggtcaacccggtcaagcggctggacattgaacatctgaccgtccgcagcgccgagggcatcaccgtgctggacgatgcgtccttcccggtctacggcggcgagatcctcggcattgcgggcatctccggcaacggccagaaggagctgctggaggccattgccggtttgcagcccgccgagagcggcgcaagcatcgagtattacgcgcccgacgctgccgcacccgtgcagctcgtcggcaaaagccccaaggccatccgcgaggcgggcatccacctgtcctttgtgcccgaggatcgtctgggcatgggtctggtcggctcgatgggcatgaccgacaacatgatgctgaaaagctacggcaagggccattcgcccatcgtggaccgcaaggccccgctggcgctggccgagacgatcaagaaagagctgggcgtcgtcacgcccgacctgaacaccccggtctcccgcctgtcgggcggcaacgtccagaaggtgctggtgggccgtgagctggccgccgaccccatcgtcctgatgaccgcctacgcggtgcgcggtctggacatcaacacgtcctacacgatctatcacctgctcaacgagcagaaaaagcgcggtgtggcggtcatttacgtcggtgaagacctcgacgtgctgctggagctgtgtgaccgcatcgttgtgctgtgcggcggcaaggtcaacggcattctcgatggccgcaagaccacgaaggaggaggtcggtctgcgaatgaccaacctggtaaaggaggagcaggcatgagtcagactgccactgcggcccgcgagccgctgctgcgcattgccaagcgtgagggcacgacgatgccccagaagatcgccgtgcgcgccatcgccattctgctggcgctggtcgtcgatgcgctgtttatctttttcgtcaccggcctgaacccgctgtccgtctatggcgtcatgtggagcggtaccttcgccaacatgacccgcttcagctggatgctgcgcgacctgtccacgctgctctgcgtcggcattgcgctggccccggccttcaagatgcgcttctggaactgcggcggcgagggtcagattttgattggcggcctgactgccgccctcatcatggtgtatcagggcaacaatctgccgctgccgctgctgtttgccgccatggcgctgggcagcattgccgcgggcgcactgtggggcttcatccccgcgtggttcaagtcccgctggaacacgaacgagacgctgttcaccctgatgatgaactacgttgctacgtccattgttgcctgtatgaccaacatcatgcgcggccaggcgtcaagcctcggcacgctgaacaaggcgaccaaggccggctggttccccgtcattatgggccagcgctacaccatcaacatcattgtggtcatcgtgctgaccttcgtcatgtacgcctatctgcgcttctccaagcagggctatgagatcagcgttgtcggcgagagcgagaacaccgcgcggtatgcgggcatcaacgtccgccgcgttacggtgcgcacgatgctgatctccggcgcgatctgcggcctgtgcggcttcctgatcgtggccggcaaggatcagaccatctccacggcgtccgccaacgggcgcggcttcacggccattattgtcgcatggctggccaagttcaacaccttctatatggcgctcatctcgttcctgctggttttcctcgagcgcggtgcgtcggagatcgcgtctgcgtactcgctgaacgagtacgccgccgacatcatcaccggcatcatcctgttcttcattctgggcagtgagttcttcatcaactaccgcgtcatcccccgcggcgcacacaaggagggcaagtgatatgcacagcagtctgattgcgtggatcatgcgcgccatcccgtttggcacaattatcatgtacggtgcgctgggcgagaccatgaccgagaaatccggcaacctgaacctcggcgtgccgggcatcatgtacctgggcggtttcgcgggctttgccagcgcctgggcctatgagaacagcgctgccaaccccaacggctttgtcagcatcctgatcgccctgtcctgcgccattctggcctcgatggcgggcggcctgatctatgcgttcctgaccatctccctgcgcgccaaccagaacgtcaccggtctggcgctgacgaccttcggcatgggtgtggcaaacttcttcggcgtgtttatcctgaacggtgccagctactccgccgctcccatcgccaacaaggcgttcagcgccaaaattcccgtgctgtcgggtctgggcgacatcgggcaggtcgtgttctcctacggctttctcgtctatgcggccatcctgctggctgtggtgctgcactggttcctgacccgcacccgtgcgggcctgaatctgcgcgccgtcggtgagaaccccgccaccgcggacgccgcgggcatcaacgttacgctgtacaagtacctgtccacctgcatcggcgcgggcatctgcggcatcggcggcctgtactatgtactggactacaaccagggcatctgggcgaccaccggccagatcgaggcgctgggctggctggccgtggcgctggtcattttcacgacctggaagccgctgaacgccatctggggcgcgtacctgttcggtatgctctactggctgtaccagttcctgccgtcgctgctcggcatcacgatggccagccacatcaccgaccttgtgcagatgctgccctacgtcgtcacgatcatcgtcctgatcgtcgtttcgatgcgcaagaagaaggagaaccagcccccggctcatctgggtctggcctacttccgcgaggagcggtaaacccgggcgaaaaaggagcggggtaggggccgggcatgcccggccctcagcttggcccgaactgcgcggtattccatatgttgcgggccgggcatgcccggcccctacggcactaacaggttttgtagggggcggcgtcctcgacgccccgcgggtcgatgcgagcatcgacccctacaacgctgcgcttacatggcggcgcatctttctaagatgtgccgccttttttcatgcttctttcaaaaatccaacacatttgcaatgtatactaaattttgtcaaaaaatctccgaaaacagaagggaacccggtatggcagaaaaaacacaaacccgacgcggcccgctcggctgggtcaaacgccacaaaaagctgacgatatttttggtcattgtgctggtcgcggccctcgttctcgtgaacgtgctgggcaagaccgacaaggcggccaccgccggcagctatcagttcgtgcgcaccaccgtgctgaccaaaacgaccctgagcgatacggtcagtgtgaccggcacggtcaaggccggcagcagcgccagcgtcacggcgtcggattccgtcaagacctacaaggtcacggcagtcaacgtcgctgtcggtgatacggtcaggaagggcgatgtcatcgccacgctggacaccaccgatgtggaaaagcagatcgccaacgcgcagctgcagctcagcgacacccggaccgacgcccggaagaactacagccaggccgtcgaggatcagacgacaaacctggctacggcgcaggaaaatctcgataaggcgcagaagaactacgacacgctgggcattgatgactactatacctcgatggcgtccaccgccaacagcggcaagacgaaccgtgagatcgtcaccgactggtacacccgctacgccgaggagatcgccgggtacgagaacacccttgccaacctgaacattcagctgacccaggcccagcaggacggcgacacggcccgcgcagacggcctgcagggccagatcgcggattacaccagccgggaaaatatcgccaagggccagtgcagcatcccggagctgggcctgcagggctttgacgccgtcagccagacctacaataaaattgagcagtaccgcgaggcgctggagcaggcgcagcagtcctatcagaacagcgcgacaagcgcgtcccgcagcgtggacaacgccgagacgaagctcgcgcagtcccagcgcgaggatgacaccctgaccaatctgcagaccgcgctggagaactgcaccctgactgccacgatggacggcacgatcaccgcgctggacgccacggtgggcgcggtgtgcagcggcacggtagccacgattcaggatgtggacaacctgacggtggaagtcacgatcccggccagctccgtcggcaggctcaagaccggcctgcagtgcaacatcaccagcgacgccacggacgacaccgtcaccggtaccctgacccgtatcgaccctgtcgccaacgacaacggcagcttcggcgctaccgtcacggtcaacgggcaggacagcggtctgctggtcggcattcccgccaaggtcgagatcgtcatcagcaccaaggacaacgtctttaccgtcccgcgcgacgccgtgggcaccaacgacgacggcagcacctacgtgctgcgcaagaccggcggagagggcgtcgatatgaccttcgagcaggtcgctgtcaccgagggcgacaccaacgactactatgtggagatcaccggcagcgacctgaacgagggcgacgtcatccgcgccacggcggacctgacccagggcattgagtcgggcacgtccgacagcgatgtgcagatgatggagaacggcgacctttacgtcggcgacggcagcaatatgcccgagggaaccgtcgtcatgggcggtcccggcggcggccccggcggtccgggaggtcaataatgccggaaaaaacacaacagtttgcgcagaatatcgcccggagcctgataggggaggaggccgcgcaccccgcgcagcccctgatccagatgcagggcatccgcaagagctactacatcggccagccgaacgagctggaaattctgcacggtatcgacctgaccgtctaccccggcgagtttgtcgccatcgtgggcgagtccggctccggtaagtccacgctgatgaacattatcggcgtgctggacaagcccacggcgggcgagtacgtgctggacggtgtcaacatccacgacgccgacgacaacgacctggcggccatccgcaaccgcaaaatcgggttcgtgttccagacgtataacctgatcggacgccagagcgcgttaaaaaacgttgaactgccgatgctgtatgcgggcgtcccggcaggggagcgcacccgccgcgccaaggaatggctcgagcgcgtcggcatgggcgagcggatgcgccaccagcccaacgagctttccggcggacagaagcagcgcgtcgcgattgcccgcgccatggtcaatgagccggcgctgatcctggccgacgagcctaccggcgcactggacagccagacgagccgcgtcgtgatggatctctttcacgagctgcatgaaaaataccacaagaccatcgtgctcatcacgcacaaccccgagctggccgaggaatgccagcgggtgctgacgctgcgcgacggcctgatcgtgggcgaacgaaaggggaccggcgaacgtgcagctttttgagaatatcggcatggcgctgaccagcgtcagaagcaacaaaatgcgcagtctgctcacgatgctgggcatcatcatcggcattgcggcggtcattgccatcgagaccgtcggcaacagcatgaccggctcggtcatggactcgatgtccggcatgggtgccagtaacatttctgtcacggtaacgcagaaaagtagctccgacacgtcgggcacgtcccagggcgtccagctgcgccggtttatggattccaaaccgtcggacgcagaccttatcaccgatgcgatgataaacgattttacagccgctttcccgacccaaatccatcacatcgaactgacccagcaggtgggcagcggcacgactgccaaatacggtgactcgaccacgaccatcacggccactgtcagcggcatcaatcatgcggcactggcagtcagggacgatgattcgcagattttgtacggacgctggctggacgacgacagggacgccgggcgcaaggtcgcctgcgtgtcggaaaagttcgtcgagcaggccatcggcggcagtgcgcaggacgccatcggcaaggcggtcacgctgaccatcaaccaggatctgtacacgttctatatacagggcgtatacaaatacacagaggacagctactccagcatgttcggcggcagcgacgacgacagcatccagacggacttttacatcccgctggacgttgccaaggccatcgccggagcgggggcagggtaccagagcatcaccgttgtggccaacggcggcacggtcaatgtcacggacttcgtcaacacggtgggggatttcttcgccagctactacacccgcaacgactcctggacggtcagcgcatcgagcctggcgagcctgctcgactcgatgagcagtatgatgaacacggtttcgctcggcatctcggccattgcggcgctgtcgctgctcgtcggcggcatcggcgttatgaatatcatgatggtctccgtgacggagcgcacccgagagatcggcacccgcaaggcgctgggcgcgcctgcgtcggccatccgtatgcagtttatcaccgagagcgtcatcctctgcctgatcggcggcttcatcggtattgtgctgggcctggcgctgggcacggtgctcagcaatgtggtgggctatgccgccaagcccagcatcgctgcgattctgatcgccgtcggcttcagtatggccatcggtgtgttcttcggctattatcccgccaacaaggccgccaagctcgacccgatcgaagcgctgcggtatgagtaaatacccttagccttccccctcggggaaagcctttttgtcccccgcattgcgcgggggctttttttgtgctatactcaatactgggaaagtgagatgcattgtaaaaatgaaaaaggaaaggctgtttaccaaccgccagctgctgacgctgctctggccgctcatcattgagcagatgctggaaattctcgtcggcatggcggataccgttatggtatcgtcagtgggtgaggccgcaatttccggtgtgtcgctcgtcgatatgatcaaccagctgatcatcacgctgttcggtgcgctggccaccggcggcgctgtcgtcacaagccagcatctgggggccaaacgccccggggatgccgccaaaagcgcgggccagcttgtgggcctgagcgcgatcctcggcgtcggtgtggcggcgttctgccttatcacccgcacggcgcagctgcggcttttctttggcaccatcaccgacgaggtcatgcaggcgtgcctgacttactttacgatcacggcgctgtcatttccgtttttggcgctttacaacgcgggtgcggccatcttccgctccacgggcaacagcgcggtgtcaatgaaggtctcggtcatcgtcaacggtatcaacttctgcggcaacgcgctctgcgtgttcgtgctgaaaatgggtgtcgcgggcgttgccgtgcccacgctgatctcccgcgctgtcggtgcgtgcatcattctggcgctggccgcgcggcaggactaccagctgcgcatcacgccgcaatctgtcacccgctttgagggccgcacggtcaaaagcattctgtacatcggcatcccgtcggcgtttgagaacagcctgttccagttgggccgcgtgcttgtcgtttctatgatctcgctgttcggcacggtgcatatctcggccaacgcggtggccaacaacctggacgccatcggctgcattgtcggcaatgccatgggcctggcgatgattacggtcattggccgctgcatcggtgcgcaggactttgaacagacaaaatattatacaaaaaaactgcttttgtgggattatatcgcccaaggcgcggtcaatgttgtggtgctgctgtctctgaaccagattttgagcatgtacaccctgacgcccgagacccgcgcactggcgtggacactggtcatgatccacaacggcatgtcgatctttctctggcccgccagctttgtgctgcccaacgccctgcgtgccgccaacgacgtgcggttcacgatggtcgttgccacggcctcgatgctggtctggcgcatgggcctgagctgggtactctgcgtgcagatgggcatgggtgccgtcggcgtctggtacgccatggtcgttgattggatctgccgcattatatgctttgtagcccggttcgtcagcggtggctggaaaaagaacgcggtgaagaaggctgcgtagaaaaatcttgccgagaggtaggggccgggcatgcccggcccgcggcttttcccataagcgctcatttgccggtaagtgccgggccgcacatgtgcggcccctactgcgtggctgacaaaatactcgcggaaaatcatacataaaggagtaccaccccatgaaattcatcagctggaacgtcaacggtctgcgcgcctgcctgaaaaaaggctttgaggacgtgttcaacgcgctggacgcggacttcttctgcattcaggaaaccaaaatgcagcccggacaggcggattttgcgcccgcgggctacaccgagtacatctacagcgccgacaaaaagggctactccggcacggccatctgggccaaaacgcctgcgctgtcggtgcgctatggccttgacgaggacgtccacaaccacgagggccgtgccatcacgctggaatacccggatttttatctggtcaatctctacgtgcccaactcccagaacgagctggcgcgcattgactaccgtatgcagtgggaggacgacctgcgccgctatctgcaaaagctggacgccgaaaagcctgtcatcctctgcggcgatttgaacgtggcgcatgaggacatcgacttaaagaaccccggccccaatcgcggcgcggcgggcttctctgaccaggagcgcggcaagctgggcgagctgctggccgcgggctttacggattccttccgctacctgcaccccgatgccaccggcatgtacagctggtggagcatgcgcttccgcgcccgtgagcggaacgcaggctggcggatcgactatttcctcgtcagcagccgcctggccgataagatcgagaaagcagagattctgatggatgtgatggggagcgaccattgcccggtggagctggaccttaccctgtgagcgccttcccccttgggggaaggtgtctgcggccccgcccgcagacggatgagggaaaacctgccggatattacccatgaaagggcgataccggtgaactctcccctcatcagtctgccgcaagcggcagacagcttcagtctccgcgctaagagccgcctacggcggttgcgcttcgacacgcgcctgcgggcgcagcccctcgggggaagccaaagaagaaaatttttaaaaattcccccgcgtttgcaatatcgctcgcgggggattcgttttagtatacagaaggtcaaagcgagaggaggtgtgggaactgacaaatgaagaatttaccggtctgatgcagcaataccaaaagctcatctacacggtttgcctgcaatttgtgcacgagccccacaccgccgaggatctgacccaggacaccttcctctccgcgttttcggctatagaccggtgcgagccgcagtattacaagcagtggctcgtccgcgtggcggccaacaaatgcaaggaccacttgaaaagcgcgtgggtgcgcaaggtggacgtccccggggacgacgccctgccggagccgcgcggtgcgcccggcagcgacgccgacgacccggcccagagtgtggcagaccgcgccggggccgccgagctggaaacactggtgcgcggtctgcgcgagccctacggcaaaattgccgtgctgtactttctggagcacagggaaacggcggagatcgctaagctggtgggccgtccgcccgcgacagtcaacagccagctgtggcgcgcaaagctgctgcttcgccagcagatcaccgagaggaggcagaaggaatgagcctttattttgataacaacaaactctttgacgccgatggccacctgaccgacgaggggctgtacgccattaaggacggcacgctggacgacctcggcgcactggaggccgccgaacatctgagcttctgcgactactgtctgctgcgctacacggccatgatcgacgccgcgcccgactgcatgaagcagccgatgcgcgacctgatcccgcaggtgcagagccttatgcggctgcgcagcttccgcattatgacaaaccgctatgtctcggcggctgccgcggtggtgctgggctttgtgatgtggggcgcggtcagcacctttggcgtgcccaatgccgccgccctactgccgcagcagcccgccgcccggccggaacgcttcggcaccaaattcaacaccgccgtcaacggcttctacaagagcctggatgacacctttaagagctttaccctgaccgcggaaaacggtctggaccagatcagagcacaaagcatcggcggcagcaccgccaagggggaataaaccatgaaaaagaacggctttctgacctttatcttcgcctgtatcccgggcgcagggcagatgtactacggctatatgcagcgcggcctgtcgattgcgatgatgttgatgctctgcgtaatggcggccaccgtcattcaaccgctgctgttcctctgccttgtcatctggatgtacagcttttttgacacctatgacctcatccgccatatggcagccggtgagccgaaggaggattccctgctggttccgggcaattatgaggagatcaaaaagctgctcccccagcacaacaagctgatcggctggggtctggtcggcatcggcgtctgggcgctgtatgacacattcatctcaaactggctctatacgctgctgtgcaatcttgtgggcaacggctacgcctacgacatcatcaccggcataccgaatgttgtcattgcggcattgctgattttcgcgggtgtcaagctgctgggcctgcaccccgaaacgaagcacggcgatgacgagctgccgccgtatccgcatgaataactatgccttcccctcttgggggaaggtggcgccgcagcgccggatgaggggcggccttacggacgccgctcgtctgccttttgccgcagggtaggggcgggacatgtcccgcccgctgctgacccaccgccgctgtgcccgccatacacgcgcgggccgggcatgcccggcctctaccactcaatataaatagaatgaggtaaaatcatggatgaacaaactaccccgaaaaaggtccgccgcgtcggcagcattgcgtttgcgctggtgctgattgcagccggtgttctgctgatggtctatcagtttgtgccgcagttcgacctgctgaaaattctgaaattctccccggtcatcctcattgcgctgggcatcgagatgctcgtctacagcgccaggcccgacgtgaaggtgaaatttgactggctcgctatgctgggtacggcgttcacgctctgcatcgtcggcacggcggcactgctgcccctggccatcagcgagtggggccccgcccgcaactacgcccagacccgcattgaatcgcagaaagcggacgcgatgtacagcgccctgaccccgaacccagcgctgaaagccaagacggactccttgagcgtcgacgtctggttcaaccatgacaccgacggcgactacacgctgcaaagcggcgacgactgcatcctgtacgccgcgctgcagggcccctacgccgatgccgagacgttcgccgccgactgtatggccgttatgcagcgggccgcagacgccggtctcggctttacatgctaccactttagcgccgatgaggacatcgacgacggcatcagctactacctggactgtgtcgcctcctacccggcggggctgaccgctgcccaggtggcccagcgcgtgcagaccagctaccactatgacaataacagcttctccagtgaagcagaccgggatgattacatccgtagccagctgcagaatgagatttccgacgagtacgccgaccggcacgacggtgcctatcccgacgagaaatacctgaacgaggaaaccgagcgccgctttgccgaacgaaccggcatggccacgcctgaaagcgcacaggcataaacacgcataaaaattacccggagcccaaccaaacgggctccgggtctgttgttatacgctctcgccctcgaccagctcaaagggcacggtctcgtggcgggcgggggcgttttcctctatgcagcgcagcaaaatgtcggcggcgcgctcggcaaggacggtggtattctgccggatcgtcgtcagccgcggcacagtgtaccgcccaagcgcaatgccgtcgtacccggccacggcaatgtcctgcggtacgcgcaggccgtggtcctgtatggcccggatggcgcccaccgccatcaggtccgacatggcgaaaatcgccgtaaggccggggcagtgggccagcaggtgctcggcagctgcatagccgccctgcatcgagaagtccgcaagccggtactgccggtcaaagtcgaacggcacgccgagccggtgcagggcatccagacagccgtccagccgctgctggctcggacgggaggtttcgggcctgtcgccgatgatgccgatgacacggtggcctttggcatataactgctcgatcatcacggcggcggcagcgcggtcatccacgctgacgctggacagattctcaatgcccagcccggcggcgttgttcgtcagcagcaggcaggggatgcccagcgacgccagcgccggggtaaagcattgcgggtgcgcaccgatgaaaaagaggccgcatggccggcgctcggcaaagatggtctgtgcgcaggccagctcgtcggtactgacgttgttgtagtagaccgtcggcgtatagccgcgcgcctccagacagggctgcagcttgtccagcaggtccgcaaacagagcgttctgcgtgccctttacaatgagggccagcccctccggcacctgctgcttcagatgcttggcattggcgttgggctggtagccgtgctgcgccacaacggccagtattttccggcgtgcgtcctcgctgacgcgggggttgttgttcagcacgcgggacactgtgcccacggcatagccggactcgcgggcaatatccttgatggtcaaagctgcgccttctttcgcgttgatttgctaccagtataccatatccaaccaaaaggggaaaggggaggctccctgcggattttgcggggcgctttttattttttcggattttaaaaattccgccccgcaacctcttggcaaacagggaaatttctgctatactattctatacatctgtgagggccgttagcttaacggttaaagccggcggctcataaacattggatgttaggatttctcactttacaaaaaggcgataaaccgtaaaaatttcgatttttgtcactgctttttctgctttcatctacaacccatctacgggcggttcgcaactgcttgtttgggttgtttcataagggccattagttcagcggttagaactctcggctcataaccgagttatcgcaggttcgaatcctgcatggcccaccaaacaagaaaaatccgaacctgtttccgattggagaagggttcggatttttcgttttcttcgggtacaacaatgaaggctcccgtggacggcgcaaaactctgatgccttgtcatagaccgtaagccgataacgagaattggaggatgcgattatgaagtacgatgaaagagcctgcaagtttaacatggataccgggtgtgtggagttgactctccaagatgggagaaaaatttccattgactgcaccggggttgaggatgcactggatgtgaccatggcgcagaggtcagagttagactacctcatctacaatgacccgctaggctatgccgatttgattttgaatggcgatccggaggaatatttgaaaaatgcagccgggagccatgagttagaagattagaggctgaattcgaagaatggttgataactctcattagtaggagtataatttatacaaaggggtatacgtccttttcagaaaaaggaggaagcactatggatcgaattacgaaaggctatatgaacaattttgcggcatcgcaagaattaacaggtcaaaacggatcagaattatttgaattgtttgcatgttactgcgtcctttcaaaagaatacccagagcattttgatatatcggatattgttacaggtggtggaagtgatgcgggaattgatggaattgcaattattgccaataatgtcttaatacattcgcaagaagaatttgatgatttggccgaacaaacacatacaattacggatctgaaatttatttttattcaagcaaaaacatctcctacgtttaatggcggagatattgctacattcggttttggtgtatgtgatttgttaaaagaacaacccgagttggttcaaaacgcagaggttcaagaaaaatccaatatcatttctcatattttatctaatatgatgcgtgtaagaaataaacccaagtgcttattatactacgttaccaccggaaactggacagaggatcaaaatctctgctctagaattgaaggcgtaaagagcgatttgaaatctgaaaatctattttctgagattagctttgtaccagttgacgcaaattatttacaaaaattatttaagaatacggtcgataaaatccaagcaatcattgattttccagagcgaattacccttccagagatggaaaaagtaaaagaagcatatcttggcatattgccagcatgtcaatttttaaaccttgttagtaatgaagatggcattatcaaaagtattctatatgacaatgtaagagatttccaaggggaaaatgatgtaaacgtagaaattgccgaaacgctgaatagttcagaggccgacaaatttgttattttaaacaatggaataactattatttgtaaagaactaaaaaatattgttcgcaatcaattctctcttgaagattatcagattgtcaatggttgccaaacaagtcatgttctgtataataacaaagaaacaatatcggacaaggtttatgttgcgataaaaattatttcgacagatgacgaagaaactgtcaataaaattgtgaaagcgacaaataggcaaaccgaggttaccgatgaacagctactggcattaaatgatttcaacaaacgccttgaagcttactatcaaacttatagtggcgtacaacgcctatactacgaacgacgttctaagcagtatacttccgttatggaaatcgaaaaggttagaattgtaacagttgctacacaaataaaggcattttcttcaatgttcctagacaagccacagttagcaagtcgttactatgggcggttgttaaaagatagtaaggatagcggagaaatctttaatacgaaccatcaatttattgcgtactacgtttctgcctatgctttgtatcggatagaatttcttattagaaacaagcaaattgaccaacagtataacaaatatcgatatcatattttgatgattttgaaatatcttgtccttggtgatcagaagcaacctcaattgaactcccacaaaatggagactttttgtcaagaaattcaaggtatactagctgattctaataaattaaatcaatatgtcgaatttgcatgcaagataatatctgatcaagttggcgatttgtccaacgcagaaaatgccaaaacagcacttataacagataagttaaaaaatgcggcaatggttgttaagctttaaaatttaattttactgtttcgaatatgtaatgcagggcgttccctttaccgggagcgtcctgctgtttttatgcggcacattcatggtgcgctcctgcttgagggcgagaatcttttccagaaagctgcgcaccagttcaggcgcacggtggagcgcgtccagatagggcttcacttcataccagagctcgtgatacttttgaccccaatgagcagcttccttcttggcggtggaaagttcttctttcaggcggcagttctccacgtccatcatatagccgtggtcggcttgctttttcagcttggaaaattcttcttcggtcagcgagtagttaccgagaaaggtgcgcttgccgatataatccagatcgcgcgcatgaatgagggcttctttcgtgagcgtgacctttttctgcacagcggcaagttccttctcctttttggagagggtctgactggttttggcaagcgactgcgccttttggtcggcttgggcggtcaggctgtccagacgttcctgctcccgctggactttgaactgggtgacagtcaggtgttcttctgtgctgccgcgctcaccgcgctccacatccgtgtatccggcagtacgcatatagttgaagaaatcgtcttgcaggacgctgtacgacttcttcaggactggcttgccgttcttttgcagcacaggctttccggcatcgtccagcaggggcttggatgcccacttcttgctccggctgacctgcatgacagtctccttgacggtgccgaccagtgccttgtccttgcagcgtttcgaccacaggatctgcttttccaccacagatacatagaccacatggaggtggtagtggtaaacttcgcggcctagtgcttcggtcatggcacggttgatctcatcggcgtgcatgactgccgagaggatatactgctcaccacccacgatctgaacagcagctttgtaggcatcttcatatcgtaatgccggacagcatcccggccatcgtggacaaggacttgtttgaagaagtgcagcaaaaaatcaagaagaacagccgcgctcctgcccgtcacaaggccgaggatgattacttgctcaccaccaagctgttctgcggaatgtgcggcgcgatgatgttcggcgagtgcggtacgggtagaaacaaggtcattcatcattattataagtgcgccaccgcgaagcgtttcaagacctgcaagaaaaagaccgtccgtaaagagtggctggaggatttggtcatagctgaaaccatgaagctgattcaggacgatgccgtgattgatgccatcgttgcggaagtgatggagttgcaggatcaggaaaacaccactctccctttgctggaaaagcagatgcgcgaggtagagaacggcattgaaaatatgctgaacgccattcaagcaggtgtgctgaccaactccaccaaatcgcgtttggaaaagctggaagcccagcagaaagaacttgaggttcggattgccgaagaaaaaatcgctcggcctcggttgagtgaaaatcaggttcggttctggctgacccggttccgcaagctcgacccgaacgtgaaaagccaccgggaaatgcttatcaatacattcgtgaacgccgtttatctctatgatgaaaaagttttgattacattcaactacaaagacggcacaaaaaccatcactttcgatgaaattgccgccaaagatgccccagagggcaatggttcggatttgggttgctttgctccaccgaaaaaaggacgtgcaagcgtaaagcttgcgcgtccttttcatctttcaggagtttttctcttgtagagcgtctcgctcatctggctgcggatggaatcctgccgcttgtggtaaacctgcgtataaattgccagtgtcgtgctgggttgggcatgacccgcctcagccgccactgtagcgacaccgatgtccgggttggagagcaggatactgacaaaggtgtggcgaaacatatgcgggtggattttgcggatgcccgctttctcggccacgcggtcaacaattttgccatagtggtcggggctgatgggccagccgaaatcattgataacgataaaattttttccgcgcagcttttgcagggattctcggtacgattcccactttccgtccatgcaggtctgccaagtactgcccatacggtgcttttgtgcaagccattgttcacggtaggttttcagatattccataaattcgggtgctacatctatgtcacggacattgtcctctttcgtggtcgttaggtgatagcctttgttcacaatgagcagtgacttatccacatggacggtgcagtggtcgaagtcaatatcttcccatgtcagcccggctaactcaccgcgccgcattccggtattcagcagccccatgacgatgacctgctccagtgtggaacagtgcggcagcaccttaaaaagagcctctacttcttccgggtgcaggcagtctaccgggcggctgcgcgtacctttaaccgcgagtgtttgggtatcgttgtctatgccgtactcgcgttcggcatattgcattacgagccgcagaaagatggcataggccacaacgatctcgttgatttcataggcaagaggtgctgtcagttcatttgttgcagatagaatacgccggttgccatttccgtttttcacatcaaccagcacatcggtcatttctgctatttgtttttttacacgccgaacgagaacgatggaagtcaatacagccacaacagcaatcacaatggacaagaatacgataatttccatgctgactacacctccttattaaaccggtagccaatccctttgaccgtttgtatatactttgggcttgaaggattgacttctaattttttacgaagtcggctgataatcgccataatattactgtcatcatagaaatattcttcgccccatacttcctcataaatctgctgtttggtcaaaattttcccttgatgttttacacagtacaggagcaaatcaaattcctttgggggcagttcaaaagtgccgtttgatgtagtagcagaacgattttcaaggtcaatctgcaatccgtcaaaatttagcttttgtatggctccagcttgctgattaaagcgagtgtagcggcgaataagagacgcaatacgggcaatcagttcatccgtatcaaacggttttgtaagataatcgtccgctccggcccgtaagccccgtactttagaaatgctgtcatttttagatgtgaacatcaaaatcggcagactgttctctttgcggatttcttccagcgtttcaaagccatccataccaggcatcatcacatccagcaccacaagctgatactcctgctctcttaatttttgtaagccctcttttccggtattacaaaaatcagcttctatgttttctgcttgtacgctacgtttaatcaaagcgcacagttctctgtcatcatctataatcaggattttattcatggtgcaaccccttcccttgttttgtccttccgtcaatcggcttttctgcgttctttgggatcagccaaacaccagccatctttacagcgccggggatacgcccaccagcacaataataatttaccctacgaggtgtcacgccccacttctcggcggcctctttcaatgtcatatagtccatttcgcacctccacagagtacattatagttctttatctcgaatagtacaagttggaggctgtatattgatgaaatgaaatactactttatngcgcacagttctctgtcatcatctataatcaggattttattcatggtgcaaccccttcccttgttttgtccttccgtcaatcggcttttctgcgttctttgggatcagccaaacaccagccatctttacagcgccggggatacgcccagcagcgcaataataatttaccctacgaggtgtcacgccccacttttcggcggcctctttcaatgtcatatagtccatttcgcacctccacagagtacattatagttctttatctcgaatagtacaagttggaggctgtatattgatgaaatgaaatactactttatgtaaaattccattntcggcggcctctttcaatgtcatatagtccatttcgcacctccacagagtacattatagttctttatctcgaatagtacaagttggaggctgtatattgatgaaatgaaatactactttatgtaaaattccattacattctcataatccaacccgaaatgtacaatgatatagggtgatatgagaatgaaccaaaatgaaagaaggtttgactttcacggcctcggggcggctctcaaacgggccagagaagaaaagggctggacacaagcctatgttgcggaattagtagaccgtgactcccgtaccattatgaatattgagaacaaaggtcagtatcccagtttcgacctttttgttaaactcattacngccagagaagaaaagggctggacacaagcctatgttgcggaattagtagaccgtgactcccgtaccattatgaatattgagaacaaaggtcagtatcccagtttcgacctttttgttaaactcattactatgtttgacgtttcagttgaccagtttattcatgcggacggaggggcaaggtcaagctcttgtagaaagcacattgatgtacttctaaactccatgaatgaaaaagagcttgtcgtgatagaagccacagccgaaggcattaagaaagccagagaaacggaggttccagaataagggcctctgtttttttgcgtcattttaggggctgtcgctaagtggcaagcaatnagcttgtcgtgatagaagccacagccgaaggcattaagaaagccagagaaacggaggttccagaataagggcctctgtttttttgcgtcattttaggggctgtcgctaagtggcaagcaattctaaaaacaatttttgtgctttaaaaggcatttattagcacaatgaacgatataaaaagtagaagggttggtggaacagtttaatgaggcatatcaaattatctgaacatatatttaaaaaaggaaaatttattaccccgtttaacaatttgcccatggtgaaagaattcgaagacgagaagtcatgggcttatgggcgtatgcctgaatatctatggatcgggcttattttaaaccactatggacgtgatgaggggctgaggaagtcttataatataatttccttattacataaactggcaccaaatctttatacagcaagactatctgaaatattaaaactagacactgatgttcaagaagccctttttgaatatgttgtgtcaattggagcaaaagaagttcttaatcctttaacggtttttcttacagtaagtaagaccccaactttcgcaaaatatttttattgcccgaacgtcagtgcttcagagagatgtgaaactctagtttgcacaatgagcagaatagcagatcaccagtctaatgatgctacagatattaggtttgtggttttatattttagtgtgctttcagggaaattgcatcttcaccaaagtcaaattgatttgttaagatcttatccggtatgcgatcatgcagatgaatcaatgcgtatgattcgtccaactgttcgcgctacggaaatgacaattttgacttttgagaaggtggattcactatttctgaaagaattttggaggtgtgtaagtgaaatgactgattgtaatatattcgttactaaattcccatctgaaaatcgagaatttaccgcatatatggaaaggcttcacgaattatttgggtatctctctgatttatttgtgacaacagctccgcttgatgaaaaaatggttgttttgcttggacttgcgacatattcatataagcgtctgaaggaaatttacgaattacgggcatttaattccattgccggtagaagttgtgtgcgcgttatgatagaagactatattatgatgaaataccttgtaaaaaacgagaaatcacatgataatatttggcgagaatatcagctatatggtatagggctatataagctcgttttatcaagatatcgggaattcaaagcatctggggaatcacatttcgatgaaaaatatatagaactattggttaacgagtttaagtcagaagagtttatcgatatggatacaaaatattttgataagcagaatattagacttaaagctgaaagtgttaacgaaaaagaactctatggactgtattacgactacgattcttcttttgaacatgggctatggggagcaattcgtgaatcctctctactaaagtgtgataatcctgcgcacaaataccattgtgttccggatgttgaagatgaaatcagattaaagacggtcttacctgattgcattatgattatgaataaaaccgtatcgtttttaaatgaaatttatgggattccacaacaaatgttgaatggggtaatcaattttgaactcaaacctattgacaaccaggattaagggcatccaaatcgaatacaaagaattgctatccaaactttctcccaaattaaaaagtggtcaagttccagaggcgctggatgaactcaacttgttttggcttcgtcatatcgatgaagtacaattgtatctaaaatattggctctatggagaagattgttatatttttacagccgcaacattcatggattttaacgataacgaacatttgccatttctattaatgggggaaaaacacattttggatgaccctttaggtagatattcagaactatgtggaaaaatggagaggagtacagattctgaattcctttaccgtcaagtcataataacctcagaagataatctaaggatactagaaggcaccgatgaaaatattcttatattgccattgcggctatttaaccaatcaagagattctcgcgttctttatgaaattggagagcaagcttttgtcagtctctttgatggaatcgatagtattagggactactttaaaaagtgtgatagcatcgatgatatcgttgcttatgctcgtgaagacattggaagaattgtggtgttttcagaagatgatgatataacagtgcccataaaagatcgcttcatacgagcattagcagaattaccttatatggtaaatcctcaaaagcaagatgcatataatttctttatgatggtattcggctgtattcagcaagcaattgatattatagcgtcttgtatagaatacaaatgttagaaaacgctattcagagtttcttgggtttaagatacgagtcagaccgaaaagcaggaagtacatcgtgcaatctcatatctgtgacaaaaagttggaactggaaaggcaaaaactggtggaacaggcgaaacgaattgcccgaccttcagagggaaaaagacctttggacgaaatacggctgtacaattcaatggttctgggaatacagaattattttcaacttgccacctgcatcagcattgattgcaggaaaatccacagacaggtcatgacagttttaacaaatcggctcaatacagaaaccgggtgcagacttgttcgagagggcggcgcaatgaccgagagcgaaaaagaacggtttggaaagtcggcaatgatacggtatgtatctggaatcgaccaacctatctaccctatcgcatacatcaagaacaagataccgatggcaaagaaagcggcggtttgcagttacacggtagagggacgggcattgatacacacgaacctaagtatgaactcatctgttctatcaggtttgaggaatcaaccgtctatggggcgaagcacagaacttactgacagcaggatttcactattttcggctcaacgtggaaaatgtgcgctaagtggggaactctttgaaaatgcggctgacatagtatgctggctgaaaacaccggcagaattgggcggcaaggaacgctatcgaaatatgattttgttccataatagatttcttccactcctgcaagagtgtcctaagaatgagctaaaagagatagccgacacgatcaaggcaacaaaggaactgatgttaaaagtgaacagtctgcgccagcaggctggtttgtccgcaatagaaaactaacatttcatttggtgattgattaaatgcttgtgaaaacaaccgatggaacgccggatgcggtgaaagtcgcacgtccggtgtggagtgggggaaaatccggcgataacttcaaaggattacctatcactataagctgaaaccctcttgtactgcgcccttgtggcctacatcgtctttgaggggccggaggaagaacgcaacatgaatacgctggtggaaatgataaacagcatggaagtccgggaggatgacgaaaccttcaaaaatgcggtggactatatgtttgacgggttggaacgtcgcagcccccagcacttcgccgtgaggcagtataagaaatacaagctcgccagcggtgtagtaagtttgaagagacttcttaatcaatcaaatttaaagagttggagctccaaaatgattaaaaagtctcttgaggcttatttttttaccttaaagaacaaaattgtattttgtaaaaaacaatttcaaaacatgtccgtattttgtttcgtcagtacagagattgtgtaaggaactttaaaaagatgacacgaaatcaaaaaagatgcagtaagggggctgtaaaaagacctctgagcatttcgtttagtgtaagaatcttttttacttcttacacgaaccttgaaaacgaaacagcctgcccgtagtgataccagaactgaataggcattcagcgtgtcttttttggttaatacgtcccggaaacatcagaacccggtacaggaacggatatggtactgggtactgtctgtaacggggacagagacttttggaagcttcgctgcaatcccctccggggaaacaacttgaaaaaaggagagatgtgaattgaaaggcacatccattgtcacatttattacaactccaccacccttgactgcacccggaaattccgaaatttttggggctccagcttcgcccttcggcggctctctgacaggctgtgccttgaaaacgggctatccatcgtggagaacccgaagccccggagcaagggcaagtatcggaactatggagagtggcagaaagaccggaaagggccgctttcctatcaggacaggctgcgccttgccattgatactgcgttggcggaacgccccgctgatttggacgaatttctcaatttgatgaagcgggccgggtatgaggtcaagacggttcggggcggcggtatcagcttccggctgaccgggcagggacaggaacgcttcacccgtctgcgtgcctccacgctgggggacggctacgacttgcaagatgttctgtccgccattgagggcaaagaaaaacgcctcgggcgctcggagcggaaaatcagtctggcggtggatattcaagcaaagctggctgccggtaaggggccgggatatgaacgctgggcgaaggtatttaacattaagcagatggccgccgctcttgcctatatacaggacaataacctgaccgattatgagcagttggcgcagaaagccaccgaggcggcagaccgtttccatgttatttccgaacagatcaagcagacggaacaggccatgaaaaccaatgccgggctaaaggccgcaacggttcagtatgccaaaacccgcccagtctttgagcagtataaggcgacgaagtacagccggaaattccttgcggagcatgaggccgaccttgaactgtaccgggctgcacaagcagaaatgcgctctctgctgggcggggcgaagctccctaaaatggatgtgctgaaggaggaaggccgcaagctcacagcaaagaaaaaacagctctatggagaataccagaaggcacgacgggatgtgcaggagatcgtcacgatcaaggcgaacattgacactctgatgggctacaccgagccgggaagaaagcaggaaaaggagcgttaaggttatgaaaataaggagcaaagcgacgctgacacttcgggccatgttggcccgaagatacgggtttggggcgagccccaacaagccgcctttgtgccacttgtggccacagaggcattgcttgccacttagcggcagcccctaaaatggcgcaaaaaaacagaggcccttattctggaacctccgtttctctggctttcttaatgccctcggctgtggcttctatcacgacaagctctttttcattcatggagtttagaagtacatcaatgtgctttctgcaagagcttgaccttgcccctccgtccgcatgaataaattggtcaactgaaacgtcaaacatggtaatgagtttaacaaaaaggtcgaaactgggatactgacctttgttctcaatattcataatggtacgggagtcacggtctactaattccgcaacataggcttgtgtccagcccttttcttctctggctcttttgagagccgccccgaggccgtgaaagtcaaaccttctttcatcttggttcattctcatatcaccctatatcattgtacatttcgggttggattatgaaaatgtaatgaaatatgatgtaaggtggtattttatttccgctatgttttcttgaaccttgaaaacacaaacatccattcattcattgacattattttttctctatgttatactgttatacacaacagcataacagttaaaacacacggaggatgcagcaatgaaactgattatttcaaatgtatctggcatccccatatacgagcagattaaacagcagatcaaggcggctattttatctggcgagcttcaagccgaagaaactttgccctcccttagaacacttgccaaagacttaaagatcagcgtcttaacagtgacaaaggcatacacagaattagagcaagagggctttgttaaaaatgtgcaggggcgtggatgtttcgtaatggggtctggttcagaactgattaaggagcagcttatttgcaaagtagaaaacaatctcaccgaagcaataaaagctgcaagaatggcaaatctatccacagaggaattacatcgccttttggacattttaacggaggtaaaaacagatgactaattatttagaggtaacgaatctttcaaaatcttttgattcttttcagcttcacaatatcagctttactttgccaaagggatatattatgggcttgatcggcccgaatggttctggcaaaacaacgacaatcaaactgattttgaatatgctcaagcgcaccggtggcacagtcaaagtgatggggctggataatatcgcagaagaacaaaaagtaaaatcagagctgggcgttgttttcgatacaaattatttcagtgatgattggaaagtgtcgcaggttgaaaaatccatttcggtattttatccaaattgggacagccagaaatttgcggatatgttacggaaatttcacattgcaccaaccaaaaaggtaaaagaactttccaaaggtatgcagatgaagttaatgcttgcctgtgcgttttcatacgacgccaagctgctgatcctcgacgagccgaccagtggacttgatccggtttccagagatgaacttttgaaaattctttcagagtatattgaagatggcgagcatagtgttttgttctccacccatatcacaggcgatttggagcgtgcagccgattatattacctacatcagttatggcgagctgtactttactggcagcaaagatgattttgtagatatgttccgcattgtaaaaggtggaattgaggaactgtccgatgatctgaaaaataaggcggctggtattcgtacattccctacgggatttgaggctctgatgaaaaccgaagatattagcggtttccctaacctgaccgttgatcctgccaccattgatgaaattgtagtgtttacaagcaagaaaggtgacgattatgagtaatattttgaaatccacaaaattagatattgcattggtaaaaccatattttaagacgatttgctttaccctgctcctgccgattgtgtttgccgcaatcaatcgttctttgctgacaggggtatcatttgctatgtgctttattgccatgacgacgggatataccttttccatcacagaaaaaaacagcatggatcgtctgtttggtattttacctgttcgtaaaagcgagcttgtgatcggacgctatgtttttgtccttgcaatggggcttctttccttgattatttctttgattgcacagccgcttgtcttgaaagtgctgggtgaaacagttggcgtatttgatattgtaactgccgctattgcaggagtattcttatttgcactctataccgtgttccagattccgggatattacaagtacggctcaatcaaaggacgggtatttatgtatattccagtggccggtttcttggtgactttacttcttctctctaaaatgccagctatcgggaactcaattatttcagtcgttgaatcttctccgatacttctcgttttccttgcggtttttgctattgtcgtgatgtatgcggtttcaatcttcttgtccattcgggttatgaagaataaggaaatgtgaggtgattgtatggatttcacaattttggcagttgtgcttttgattggtgttggcgttcctatccgtaataaactcatacggaaatatcgggataagaaaaagaatgatcgcaattcggagtgaacaatatggagaaaacagagttcatccgctgcccagtctgcgggaataaaacacgcgacaaaattcgggaagataccgtacttaaaaattttcctctcttttgtccaaaatgtaaaagtgaatgtctaatcgacattgaacaattagacttaggccaaccaatccggcgtggctccccatcttttcaaaaaaggagcactttatgggaaatgcgtttggaatgatccccggcttggaaccggacgaatggagcaatgacgcctgccgtggttatgtcattatggcaatggaggactgcggattttcaaagaaggatatacggcgtgttgtggggcagctttatgaagtattcgacctcaacagcgtggaggacgccaaagaaaagtacctttccagtccttactgacctcgggccacattgacccgaagtggagaaagctcaaagggcggcacctgctgggtgccgtcttttgacatttccccacngacctcaacagcgtggaggacgccaaagaaaagtacctttccagtccttactgacctcgggccacattgacccgaagtggagaaagctcaaagggcggcacctgctgggtgccgtcttttgacatttccccacgggacaagtgggaaaggctggcatatacacgcactttcgcaaaggaggttttcaatgacgcaagctgtcacttatgaacgagaaacaaagtctgtcgcatttcaagggaagatcattgtgctggaaagcctcacgccggtacttcccccgaaggagaaagnggcatatacacgcactttcgcaaaggaggttttcaatgacgcaagctgtcacttatgaacgagaaacaaagtctgtcgcatttcaagggaagatcattgtgctggaaagcctcacgccggtacttcccccgaaggagaaagaacagcgcaaaaaagaaattgagcgttgtctttacgaggtgttcagtaaatatggggacagatttccctaatcattcgcaacattgttgtccggggctgctgatggtataatatagttgtaaggttggtagctccattccaacaaggaaaggagcccaatatggaatttatcagagaagattgtatttacgcaagacagtcagtagaccgcaaggacagtatcagcattgaaagtcagatngacagatttccctaatcattcgcaacattgttgtccggggctgctgatggtataatatagttgtaaggttggtagctccattccaacaaggaaaggagcccaatatggaatttatcagagaagattgtatttacgcaagacagtcagtagaccgcaaggacagtatcagcattgaaagtcagatcgacttttgcaagtatgaattgaaaggcgggagctgccgggtattcaaggacaaagggtattccggtaagaatacggacagaccggagtttcaaaagctgctgggcgagatccgcaagggaaaggttcggcgggtcatcgtgtacaagctggaccgtataagccgctctattctggactttgcaacgatgatggagctgtttcaagagtacgatgtggagt

SEQ ID NO: 32 - DNA, 236302 bp, Gemmiger formicilis; identical to SEQ ID NO: 31
  source 1..236302: mol_type = genomic DNA

SEQ ID NO: 33 - DNA, 175507 bp, Gemmiger formicilis
  source 1..175507: mol_type = genomic DNA
cacatgagcgggcaggcgccatacggttatcagttagagcctactgtggtagagggtatccgcacaaagaaaatggttgccgaccccgtagccgccgaccatgttcggctgatgtttgaaatgtacgctgaaccggaaacctccttcggagatattacccgatacttcgaggaacatgacataaaaatttatggcaaatccatgttccgtacatttctttcccagcttttaagaaaccccgtttacgcacaggccgatttggagctgtacgaatttttcaagagccagggcgcagcgattgtcaatgacgcttccgactttgccggaacaaacggctgctatctctatcaggggcgggatgtgaaggaggacaaggacaggtgcttaaaagaccagatacttgttatcgctccccacgaagcactcatttcctctgacacatggcttaaatgccggaaaaaacttatggcaaataccaccttccagcagggacggaaaccgaagaacacttggctggccggaaaaatcaaatgcgggcattgtgggtatgctctgaaagccacccatgtaccaaacagcactggatatttccgctgtaccaaacggacggaaaacaaaggctgtccgggctgcgggaaaatccgcaaagaagaatttgagcaattcattttctcggccatgcaggagaaattcaaagactttcagatactccacggcagagaggaaaaagtcaatccgaaactgaccgcctatcaagtggagctggcacaggtggagtcagaaattgaaaagctgctggatacgctgaccggagccaatgcgaccttgcttgcctacgctaacaaaaaaattgaagaactggacaaccgacgccagaccatttcaaaggcaatcgctgaattgagcgttgaaaccatatctccccagcagataaagaagttatcctattatctcgacaactgggacagcatagattttgacgacaaaagaaaagccgccgatggtttgatctctacgatcaaggccaccagcgaccgtgttcagatagagtggaaaatctgacatttccgctctatcgcccctcatttctattttatcttgtttgtaccccttgtacactgatgtttgcgtttgtttttgtcaaaggcgtgggcataaatgtccagcgtagtgcttgcctgtgcgtgtcctaacaaactggcaaccgtgcgcacgtccactccctgtgcaatcagcaggctagcattggtatggcgcaagctatgcacactcaaatccagtggcaggttgttagcattcaaaatcagcttgaatctatatgtgaatgtgctagggcacataggctttccgttcggctggcggaataagtaatcatcttcagatacggtttcgttcgcggtttgcgccctatcccattcgcattctttccgccacgccttgagtagctggcacatttctttgctcaagtagaccatacgatcaccgctgctggtcttggggtctttcgtaatagattcttgatggcttaactttaccacaccccgctgtacatgaatcgtccgtttgcgccagttgatgtcgctccatctcagtccacaggcttcacccctgcgcagcccggttgccagcaccagcttgaaataggtttcgtacttcatactctgaccttcaaacgctgtaatcagctttttgacggtttcctcgtcagctaccgggcgctctttcttttgtcctttcggtttgtaacatctccatgcgggattgtgagtaaggtatccctcgtccacagccgccgataggatgccgcacagcgtgttgtgtaaaccttcgactgacttctcggatagattccctctgccgtccaaacgcgggctgtgccgcatttcttcgtaaaaatctcggatgacttccttgcgcaaatcggtcaacttgtagttgcccagtgctggcaagattctgcgaatatcctgttcgtcgcgtcgaaatgtggagtcagccagcttcttcggtccaacatcggtcacccaatgctcaatgtactttgccagtgtaatgcttcgattaataggctctggggtgtgctgaacctcgcgctcaaatagaattgcctgttcctttacccatttctctgcctgtttgggtgtatactccttgggtggcttgacggtcttttgaactgattttagtcgatttccctcgtagtcatacccacgagataccacaatcaagtagctattgctgccgcgctttctgatagatgccatgttttgcacgctccttagtattatttttgacctgcggtactacaaagcataccgacaactgcgacagaaagctatcaccacacccaacaatctttcacccaaaattctacctattactgacaaaaacggcaccgccatctctgacggtgccgcctgttatttaacttgctttcttaggttttctattcctatttttcataaatgcaacatagcacggattttggtcgttcaacaaatcttgcatcaggtttgcggcctgctgtttcgccacgtcctgcgggtggcagtaggtgcgttccaagaacgccgtatcccatgaccaagcagggatgccgccacctgtttgctagtgccttcctgtagcagataggttgcgtagaaatgcaccgcacccggagcgcgcagctgcctatattcgttatcttttgaagtagtaaagctgcttctttttgttcgatacattcagcaaggagagatacacatggatattgtaacgattggtgaagttttgatcgacctgacccagaccggcagggatgaacgcggcattccgcagtttgcggcaaaccccggcggtgcccccgccaatttggcggttgccgccgccaagttgggcgcacagactacctttatcggcaaggtgggcgaggatgcctttggccgctatctgaccgaggttttgcaggaaaacaaggtagacacccgctatatggtcaccgatgccgaccaccccaccaccatggccgttgtgtcggtggatgcctccggtgagcgggatttcagcttttaccgcagtgccaacgccgatgtgatgctgagcaaagaggacatcccggaggaagccctgaaagcagccaaaatcgtccacttcggctcggtcagccttaccgccgaccccgcccgcaccgctacgctggacgccgccgcccgtgccaaaaagctgggggcaatcatcacctacgaccccaactaccgcgccaacctttggcacagcgaggaagaagcgattgcacagatgaaagctcccctgccgctggtggatatcctgaaggtttcggatgaggagctgcccctgctgaccggcaccaccgactgcgaaaacggcacggcgcagctggcacaaaacggcattcggctgatttttgtcaccttgggtgcaaacggtgtgttctaccgctttggagagaaaaccggtcatgtagccggtgttccctgcaaggtgggcgacaccaacggtgcaggcgacaccttctttggggcagcgctgtccaagctgtgcaaggaggatttgaacaccctgacggcggacaaattggaaggcattctggcttttgccaacaaagcggccagcatcaccaccagccgccgcggtgccatccctgccatgcccaccctgacagaagtggagggctgacccatggcgcaggaattttccgcacgatttgcccgccataaggacgagctggaatggctgttcatggaattgtacaacaaccgggaagggttggaggttctggaacgggagatggcggacgcctacgacgcccgcagcgccgagctgaaggcgctggacaaagcccgtgccgccgacccgaactggtacaagcggggcaatatgttcggcatgacgatgtacaccgacctgtttgccggaaatttgaaagaattggcaaagaagccgccctatttcaaggagcaaaagctgacctatctgcacctgatgcctttactgcagatgccccacccgcacaacgatggcggctatgcggtggaggatttcgataccgtagacccggctctcggcacgaataaagaccttgaaaatctgacccgcgaactgcgcaaggccggtatcagcctgtgtctggattttgttatgaaccacaccgccagcacccaccgctgggccatggcggccaaggcggacgacccgtggtttcaagcctactaccacctgtttgatgaccgcaccatcccggaccagtacgagcagaccgtgccgcaggtatttcccaacaccgcgcccggcaactttacctggtgcgaggagatgcacaagtgggtgctgaccaccttccacgactaccagtgggatctgaactacgcaaacccggcggtgttcgtggacatgaccaaaagtattctgcatctggcaaatctgggtgtggaagtgttccgcattgacgctgtgccttacatttggaagcagcttggcacgacctgccgcaatttaccgcaggtacataccattgtgcggatgctgcgcatggtgctggaatgtgtctgccccgcggtcatcctcaagggcgaagtggtcatggcgcccaaggagctggcggcgtactttggcacacccgaaaagccggaatgccacatgctttacaatgtgtccaccatggtcaacctgtgggctgccttggcaagccgtgacacccgcctgctgaaggcacagctggacgccctgcacgccctgccgggcaactgctggtttgtaaactatctgcgctgccacgatgatatcggctggggtctggatgaagcggctgagaaccgttttgatattgacccccaaaagcacaaggagtatctctaccatttttatgcgggcgatttccccggaagctgggcaaagggcgagctgtacaactacgaccccgccaccggcgatgcccgcagctgcggtaccaccgccagcctgtgcggcgtggagcaggcgctggaatcgggcgatgtgatcgcgctggactacgcggtccgccgcgacctgctgctgcatagcgtcatggcatttttgcagggatttccgatgctgaactccggcgacgagatcgcccagctcaacggctgggattataagtccgaccccaatcgggcagacgacagccgcaacctgcaccgcagtgcgtttaactgggaaaacgcaaaacagcgcacccaaaagggtacgctgccgaacaagctgtggcagggcatggaagaactgcgcaaaatgcgagcagacgagtgctttgccccggatgcgtgggtaaccacctgggacacccacaaccccggcgtcctggcactggtacgcaagcacggtgaggagacgctggtgggactgttcaactttaccgagtacccggcaggggccggtcttgacgctttgggcggcagctaccgttccgcagacggtcagcccgtctggctggcggatgtagaactggaaccgtatcaggcactgctcgtgaagaatgtataaatctggaggcagacatatattcccgttcggctgcgccatccatgcaggtggttatgaaatgattgtcaggcattttacgtttatgccttttacgataggacggggcgcgggggtgaatccgttctgattcactttggcggtccacgtgcgtatttcgtacaatctttcagaattggtctaattagaagttttcatcctttccgtgttgtatcgttattctgtgtaacccttttgcatgcactttccggcgagaaaaaagagcctggagaaccttaccgatttggtaaggccctccgggctctttttactccagtcattatcagtcggtcaatagtaagcgcaaattacttacgagacgtgcacaattcacggcgacaagccacctatgacggatttcatcagcagggcttgctcatcatccaaaactgcaatccgttatctgcggcgctcgtaaagtgatattctctccatcacttcccgctttcagggaagatgattttgttgacaaagaagaaaatgaccatagacacgccgccattcaaaaccgtcgtgccgatgttataaataaagtccggcaccagcagcccggctacggcaacccatacgcagttgatggagttgacgatgcaggtgatgacgcagaaagccagcacataccacgcaatctgcttgcccagattgcccttactgcggaacacgaaattgcgctggatcgggaagttgatgcattcaccaatcaccatagcaatcatgtaagcgcaaaagtacggcagaccgccgtgggcggcatcgtagccaaggatgttccacttgaaggtttccccaaacagggtcacatccacgccgggccagccgaaatccaccaccggcagactgctgaacgcagcgggcagaaattgcagcagcagatacttgaacacggtaatcagattcgacacgatgacgaacaaaccgccctcgcgcacccacttggctgcggcagggtgtttagccgcaaaattattccaaaactgcataatgcaacctccatcaagcgccgcgcagacgcttttccatctgcgcattcagcaccacattcttaatcgcttcataaatcacccgcacaagacccaggatccagaagccctgcaattccatgacaatgccgtccaccatgcccatgctgatggcgccgttcgtcatctttgccagggcgcgaaggggcatattgtactggaacaagatgttcaggtccggcttgccgcgtttatagctggcatccagcaggatcgtcagcacaagccagacaagccagcccagcgggctgcgtgcgtggttcagttcgcccaaggtcagattgcggtcaattttggttttgccgttcgggatgggatgccccagcagcttttcaaagtctgcatcggaaacgtgcagcacattgcccttataatagcaatccaagtccctatcctcatacggatgcacggtagccgttccatgtacggagattttctcgcacagccggatgtcctccacgcttgcgccgacaagcagctcatactcgccgccctcgatctcccagcggttagccttgacattccagaaacggaacgccttatcgtccagcatgatggtgatgcgctgtttctcaccgggggcaagcgttacgcgggcaaagcctttcagttcctttgcagggcggaaaagctcactgttctttttagcaacatacagctgcacaatttccgtacctgccacgctgccggtgttcgttacggtaaggctgaccccctgttcatcggcgaccatatcgctgtacgcaaacgtcgtgtagctcatgccatagccaaacgggaagcgcacagctttttccgccgtggtaaagtagcggtagccgatgtacagcccctcgcggtactccacagtcttgcggcgggtggcaaaatcggcggcgctgggtacgtcggcgtaggtcaacggccatgtttctgccagcttgccgcagggattgaccttgccggtcagtgcatccgcaacggcgcccgcccccgcctgaccgcctaaggcggcgtacaacagggcttggcagttgtccagccacggcgtttcgactacgctgccgctgtacaataccacgacaattttcgggttgacagccgccacagcctgcagcagatccacctgattttgcgcaaggcgcaaattgctgcggtcaagaccctcactctcagcgatttcatccagacccatgcacaaaataactgtatccgcctgtgtcgccagttcgcaggcagatttctgcaaagcagcatccggcttaccgtggcggtcaaagccctgctgatacccgatgacgttcagctcggagtcgatcagcttatccagcagcacatccacctgtgtcgagttcaccatgctggagcctgcgccctggtagcgcggattcttggcaaagtcgccgaggacagccaccttgctacccgctgccagcggcagcaaagagccctcgtttttcagcagcacaaggctttccgcggcggcgcggcgggcaagcgcatgatgggctgccgcatcaaactcacgcggggcagcgtccagcgcagccttggtatcaaacaccagcggcagcagctctgacaggcgggcgtcgatgtcggattcagagattttcccgctttccaccgccgccaacagttcgcgcacgctgtccccaccgggcgcgggcatttccagcgtggagccgtttttcacacccagcgcgtggtcgttgcttccgccccagtcggtgatgaccgcgccgtcaaagccccactcaccgcgcaaaatctccatgagcaggtgcttattctcgttggcatacgtaccgttcacaagattgtaggacgacataatgctgcggggatgcccctctttgacggcaatttcaaacccggtcaggtaaatttcccgcagggtgcgctcgtccacgatggaatccgaagccatacgccgcgtttcctgactgttgacggcaaagtgcttcgggcaggcggccacgcccttggactggatgccgcgaatatatcccgccgccagcttgcccgcgagatacgggtcctcggaaaaatactcaaagctgcgcccgcacagcgggttgcgcttcatgttaagccccggtcccaacaccaccgacacttcctgcgcagcggcttcctcgcccaaggctgcgccgatttcctcgcccagcgcggtatcccagctgttcgcaacagccgacgccgtggggaagcaggtggcgggcacgctggggttcagccccaagtggtcgctctcccccgcctgcttgcgcaagccgtggggaccgtccgacagccagatctgcgggatgccgtgttcgggcatgccccgcgttttgaaggtctccgcgccggaaagcagcgcgcatttttcttccaaggtcaattttttcagcaaaagttctgtattttgcatatagctttcccttctcataagaaaagccgcatccaacgcctgcaagcagacatcagacgcggctttcattcagcaagtaccgttatgttttatcaggggcaatggacgcttactctgccgccagcgtgaccacagcctcgttgatggagtaggtggtgctggagccccagccggagacgatttcgtcgtgggcggggatggtcagctgcttgctgccgtcctcaccctcggtgatgggcaccgtcagggcatcgctgccgttcagggtcatggtaagggcatcgtcctgcgcatccaccagcgtgccggtgatggaggcagagccgtcggcggcagtcagcgtgcagaccttgtgggagtaatccaccagcagcacggcatccgttgcggtgggcgtctcaccctgcaccagctcatagctgcccgtgtactgctcggtgaccagatcctcgacctgcacttcaaacgtagcggtcgcacccaggaaggaggccgtcacggtcttggtgcctgtggtgtcgctgtcgtaaccggtgaaggtcaagcgaccaccccagatggactcctccgcaccgttggcgcgggtagccgtcacaaccagctcagccgggttgaaggtgtcacccgtgtagaaggtgcgcaggttggaggcatcgatcgtcaggctcttggcaggggcatagggctgaccgtagatgttgatgttacgggtgaacgcaccgccataaacgccatagctcaggctggcttccatgctgtatgcgccgtggtcggtgtcaaagatgaagacatccgcatcggcgccgccatccacatcggtggggcgcacagtgccgtcggcgtcctggttgcccagcagatgaatgacgaagttcttctcgccgttttcatcgtagttgtaccagtagccgtaaacatgggagatagagtcgccgcccacggaggtgctgggaccgctgaaggaaccccacatcgaaccgtcggtgtagcagtacatatccagacaggccggatccacgacggtgctgaagccctcggtgtactgaccctcaaagaagtaggcgacttccccgttcggctccttggcttcccaggtttcctgcgggatggcaataaggtcatccagcgtcttggatacgtactcgttgtcgttgtagttcataacgggaccatcggcagaagtctgcgccgcatcgggggcaacctccgcattgtcggccgagggcaggctgctgctctgcagggagaaaccgcccacgcagaccgcagcgaccacgaccaccgcaccggcggcagcaaactgtttgccggtggcttttgcctcgccggttttcgtctgcttgcagaagcaggcgatcacgctgagcaggcaggcaacgaaggtgccgaccatatagaacacgcacagaccggcgttgccgcccgcaaaggtgacatggttgatgacgtcggcaaagacgaaatacaactgcacaacgacaagatacagggcaatgttataaatgaccgcctgaatcagcgcgctgaacggaacggaaacaaagaagaaaacgagcgaagcggcagcaccgaccagcagcaccacgccggccatcgtgccggagtgacccagaggggcagccgtagcctgtgtgagcaggaatacaatgccggtgatcagcgcgaccagcgctgcggcaaggcagaaccagctgcccagccctttatttttcaagcctttattcatcaggttccacctccatcaattctttttggcggcacgattcttccgcttttcctcggagaaaacgtccgtgtaggtatgcagcacatacatcacgacagcggcaactgccagtgcgcagaacacaacatcgagagcgcgcagggtcgtctgccaccacggggctgcgtcggaaacgacaacgtcctccgcgccggagccgcccatagaggactgcagcatgatgtagtacagataatggttggagtcgatgaccttctgcagcaggtcgccgtcatcggtgctggtgatcagcttctcgatttcgttcgggcgggcggtatccaggcagaagatgttgttgcctgccatcagcatttcgggggcagaggaatactcggacgcggtcagcgcatcgtcgatgatgtagccgccgtagttccactcgtcgcgcaggatgtgctggatgccctggttggcggcagcgtacataacgccgatacggttgtaagcggtcataacgccgagagaatcgccctcagccagagaaccctcaaaggcgcgcatatagatctcgcggatggactgctcgttcgcaaaggtggagatgccctgacgaccggcttcctgctcgttcaggaagaagtgcttgaccgtgccgatcagacccttgttgcgcataccgtgggaaacggccttggcagcatagtagctgagaacgccgtcctcggagaaatactcagaggtacgaccggagtagggagagcgcagggtgtccgcgccgggcgcgtaggcgatggggatggacgcatacagcgcatcctcgccgtacatctcgccaaagcgggtctgcacatcgtggttccaggttgcgccgacgatgggcagcgtagcccagccggtgcagttgcggcggtctccgtacttaaactgaccgttcatgccctcgggaccatcgacgatggtgcagccgggcttgttgacagccttgacagccttgatgcccttggagtcgcccatattgatgagcagatcgctcagcgtcagctgagaaaggaagtcgttccacttcgggtcgtcgaaggcgacgccgatcatatcgctgaagttgatcttctcatccagctccacgccgaggttgaagtcggaaacgctcttggcatcggctgccttgacgtaggtctgcatattcagaccgttgtacagcttatcgttgaccgtcagggtctccagcgtggtggggtaggtcgtatcccacgcgctgcgggacaggtaggtgattttttcgtcgtcgttcgcccagtagttcacatcagcgtcgtcgaaggtattcgtgacttccacatcgctgttgtaacgggagttgcggtacttttgggtatcgacctcggtgttgggggcggtccaggtggccacggcggcagtgttgccggtgacgacattgccgtcctgatcgatcagcttgcctgcaacggcgtcaccgcacttggcggccagcacattgttcagtgcctcgtgtgcgccgttgccgacggcgaagtagtaatcgcccgcatcgaggatgtagccctttgcgccgttggcgtcataggacgcgaggaagtagccgggcacatcgaccgtgacagtctcggatgcacctgcggccacgtcgattttgtcatagcccagcagctggatcgaggacttttcgacgttgttctgcttgtcgtagtcggtgtagggggtctgtgcgtacaactccaccgtagccttgccgtccctgtcgccggtattgctcaccgtgacggtcgccgtaaaggtgtcggtgtcgctgttgtagtccagtttgtcaaggttgtactcatagttcgtgtaggacagaccgtagccgaaggggaagcagacctcctcggcgtagttccagccgtcggtcgaggctttggtgccaaccgtggaatcggcgttgccctgaccgaggatggtgtcctcgtagcgggtctcgtagtagcggtagccgacatagatgccttcgttatagctgacaaagctgtcgcctgccgcgcggggcgttttgctgccgtagttgtaggcgtgcagaccgaagttttcggcgctgggcgcggacagggagttggcggcaaaggtggcggtggtgtgaccggaggggttgacctcaccggtcacaacgcggatggcgccgggcataccgtagaagccggggttgccgacccacagcacggcgtcaacattgtactcgtccagccagtccatctccatcgcaaagacggagttcagcaggacgacggttttcttgaatttgccggagtccttgattttctggaagattgccttctcgttgtcgtccagctccagcatacgcttgccctcgtcgttgaccatcgcaaggtcgttgccctcggtggcaaagcgggacagcgtcacaaacgcgacatcgccataggacgcaaacgagtcggtgacgctgccggtgaacagcgccgggtcatattcgcccacactggaaacgcttctttctttcggcgcggcggcggaagcgtaggcgtccagcacggtttggttcacgttgaagccggcatcctgcagggcgtcaacgggggttttctggtaatccgggtttgtggaggaaccgcctgcggtgctgcggaacaccgggtcgatgctgccgcggccaaagaccgtgacgttgcgctcagactcggaaagcggcagggcattgttgcggttgtagagcagcacgctgccctcttcttcttcctgctcacagaactgataagcggcttcgatgtactttgcgtagcttgcgtcagacaggctgccgtcagcggagaactccgtgccgccgtaagatgcgtcagagccttcgatgccgagtgcatggttgacttcgccttcctgctggaacgcaatggtcgttccggtcaggacaaggttggccaccagcacagccgcgccggacaagcccagccaacggcgggacttgcttgaggtttccttttgtgccataggtttttctccttcctaaactgtcacagatgaatgatacgatgcgcttgctgccaagggctgcgcatttcccttttgcagaaaccgttcatatctttttcacaaagctatcataaagggaagcgttgcccgggtcaatgcagttggcgtaaacgtcaaaaaacacggcacaaatgacagaaaagcaaagcgaccgcctttcggcagtcgcttttgggttatgcagtttctttttggcttttcccgcaggggaaggtgaccaccaggtaaaaaatcgagtcctccacaaagcagtctgccgtgccgccgtacagctcggcaatgcttttgatgctttttatgccgtagccatgctcctcggtatcctgcttggttgtgacgatagcgccgtcccgcagcgtcggcggtgcgggggtgtagttctgcacgcggatgaccgccatgtcacggcagcggctgatgtccagtgtgatgactcgcttagacgcatcgtttacctgcgtcagacactcaatggcattgtccagcgcattgcccagcagggagtaaatatggtagtgcttcatattttccagacagctgccgtctgccgagcagaccagctgaatacctgcccgcccgcagagtgccgacttttgggtcagtgtgatgtccagggccttattcccggtgaaatagcgcaggttcaggttgttcatctcttcttccagacgggcgcgttcctcatctgtggcgcgggaatactgctgtttcaggtcatggtagcggatgttgattttttccatgtttttttttgcctgctcatactgctgcttgtcacattccagcagctgcgccagcatttcattttcgtgttccagactcttgatgctgcaatttgaaaattccagcgccagaatcgtgatggcaaacaggatgcagaacgcattcagcgccagataggcggtcaggtaggactctgcgctgctgtccagaacatcctccagcacaacactcaggtagaccgcggcaatcaggaaaaagccggagtaaagcacagtcttgacattgtcaaacagcaggcgcccgcgccggatgcgcagggtgagcagccggtagatgaccagacagaccacaaggttgctgaaaagcagaatgaaaaagctatcgagcctgtccgtgcgcccatggtgaaccagccaaccaatgggcatataggccagcttactggcaatgtgctgcaccgcgtaggcacaggttgtataaaacagggcgtgcagcgggctgcagtcaaagctgaaccatatcaggtcaaacagcagcgtcgtatacagcagcaattttgcccaaagcggcaggaatgccagggtgtccgtcagcgcaagaaaggcccatacacccgccgccaaccgcggaacgaagcagctgcggcgctgcccccacgggacaaacaggcaggcgcatagaatcatacccagctggatttgctggttcagtatccaatttatgaccggcacgggtcttcccactccttttttgccatatatcgagtgaatgcctcggtgaaggcgtccttgtaagtgcgcccgatgggcagtgccgccccgccgatatagacattcatacggcttaccgccgtgatacagcgcaggttcacaaggtaactggcgctgcatcgcacaaaaccgtagggcgtcagctgcgccgcgatttcctgcatcgaaccgcggtttttgatgatctcggtcttaccgtccccgccgcacaggttgtacagcaggtcgtgctggcgtacctccacataggcgatttccgctgcatccagcagccgcgtcacggtgccgtccttgacgacaatgtgcggcggcgcagtcttttgaccggcgcgcttttgcagcaccttcagcgcccgcgtcagatacatatggaaggagtaccactgtatcggctttacaataaagcccagcgcgccgacgctgtacccgttcagcgcgaattgctgcaaattcgtacaaaaaatgaggatgacgtcttgatctgtctcccggattttttcggccagttccatgccggacatctgcggcatatcaatgtccagatataaaatgtcaaaatcacggtcttgcgccgccagatagactgccgcacagtcgaactcctgtacgttcagttctgtgccgttctccgcgccaaaccgcgccagtgcctgtttcagttggtctctttcttgtttttcatcgtccacaatgccgattcggatcatcgtgcgttcctccccccgcgcaaagatctatacaagtatgatatacccccgaacgcagccgcgtcaaccttttacgagcgaatcgtccaatttttccaagatattttcggaatgctgcgtgctgcgcatggaagattcttgaccactacggtggcaaaataacagcacagcccccgccggaaactcatagagcttggcgggggctgtactattttaatcagccaatagttaaatcaggcccatcaggctgggcagacccagagacagagccgggatgtaggtgacggccagcagggcggcaaccagtgccgcaaagtaggggatcagcttggacgtgacctgctcgatggagacatgaccgatgccgcagccgacgaacagaaccgagccgaccggcggggtgatgttgcccaggcacatattgaagatcagcataacgccgaactggatctccgtcatgccaaagctggtggcgatgggcaggaagatcggggtgaaaatcaggatggccggggtgatgtccatgaacatgccgatgaccagcaggatgatgttcatgagcaggaagatgatgtacttgttgtcagtcaggctcatcaggccgttggagatggctgccgggatgccggagtaggccataacgaaggacatggcagaggaggcagaaatcaggaacaggatgatgccggacgttttggcggagttgagcaggatgccaaggaagcctttgaagtcgatgctcttatagatgatggaaagaatcaggcagtagagaaccgcgacacctgcgccctcagtggcggtgaagataccggagacgatgccgccgatgacaatgacgatcagcagcagagacggcgcggcgtcccagacggtcttggcaatgctctggctgtggtcaatgccggtggctttcatgccagccttttttgcgccgatgaacgcaacgaccatgcagcacaggcccatcaggatgccgggaatgtaaccggccatgaacagcgtggagatggagacaccgcccgcgacggtggagtagacaatgaaggcagacgtcgggggaatcagcaggccggtgggggcggaggcaatgttggcggcggcggagtaggcggggtcgtagccgttttcttcctcaatggggctgatgcagccgcccatggcggatgcggcagcaacggaggagccggacagcgcgccgaacagcatgttgcccaggatgttggcctgcgccatggagccggggatcttgccgacgaacagctgggcaaagttgaccaggcgcttggcaataccgccgttgttcatgatgttgccggccaggatgaacaggggcacagcaagcagagagaagctctccacgccggagttcatcttctgcatcgtgataaaggtgatctggtcccaggacagggtggacatggcggtcacgatagacgacgccacaatgctgatggagataggcacgccgaggaacagcagcacgccgaacacggcgaacaggataacggtggtcatggtgatactcatttgtctgcaccctccttggattcaactttttcgccggtgacgtcctcatagatgttgatgatctgcgccaggacgatgaacacgccggaaatcggggcgatggagtaaaccaggctgcggggaatacccagcagggccgagaactcgcggctggcagagacagccagcttaaagccgccgatagtgaatacgaagatggccatcagcaggatcagaccatcaatgaccaccagcagggcggtgtgcgccttaccggtgaatttgtcgcggatgagggtcagggacatgtgctcccgggtggagaaggcgtaggccgcgccgatgaagccggtccagatcaggctgtagcggacaagctcctcggtgaaagccacggggctgttgaggatatagcgggagaaaacctgaatcagaaccagcaccgtcataaaggtaagcagtacggcgcaggcaatgctcaaaattttgtccatccagaatttgatggccgcaaaggtgtttttcatggcttactcctcccctcttgcggcgtcgatggtatccagcagcgtcttgacgccgggatactgctcctcgtagacttcgatcatgggctgggttgcctcgcggaaggcttccttgtcgacgtcatagacgaactcaacgcccatcgtctcctgtgcttccttgacggcctcctccacagcggtgtcccacatgaccttgtgggcatcggtggaatcgtgggcggcctccagaatgatttcctgatcctcggggctgatggtctcccagaccttctcactcatgatgaggacgtcggggatcatggcgtgctggtccaccgagtagaccttgcagacctcgccgtgcttgccggtggtcagggcggtctcgttgttctcggtgccgtcaatgatgccggtctgcagcgaggtgtaaacgtcgccgtaggacatggcgacgggaatgccgcccagatagctcatcatgtcggtctggctcttcatatcctgcacgcggatcttcaggcccttcaggtcggcgggcgtgcggatagcgcgatccttcgtgtagaaggaacgtgcgccggaggtgtaataggtcagcgtgacaaagccgtcgtcaccggtggagaggaagaagtcctgcatctcctgcgagtccatgacatggtagaagtcatcggtatcgttgaagatatagggcaggccgaaggtgttgaaggcatcgttgtaggtagccagaccgggtgcagaaaccttggtcatggcgataacgccggcctgcagctgctcaaggttctcgttttcgctgccgagctggccgttggggaaaatcttgacctggatgcggccatcggtcttttccgcgacctcgtccgcgaactgggtcatggcgatgtggaccgtgtgggtctcggacaggccgtgggccagcgtcagcaccagcgggttctcggcgctgtagccggtggagtcggcggtggtgccggacgcgccgcagccggtcataacacccagactgagcgcagccgcagcagccaatgctgcgaattttttgaacatggtatttctccttcttgtatgtatgccgttttccccttggccccctctgagagggggctgccgccgcagcggctgggggagagaaccgtgccattacccgaaatatttcgggctgcggcaaggttcaacccctccgcccctacggggcacctcccctgccaggggaggcaagaagccgggttacatcccgatcaaatcaaactgttcgaacgagacaagtacctcatgatccttcttggggttggggtacttgatctggacgctcttgaggcgctggctgtagtaccagccgctctcggcctcctcaaacttgcggcggtgcaggaaatgcggcagctctttgccgtccacctgcacatagaacggggacttctcgcggtggatcatatcgaggtacatgctctcgacggcggtctcgtagctgccctcattcgtgaaggtcacgacggtcttgacgcctgccttgacgacgatcttcgtcttgagatacgcgcccttgcggtaatcgttcgtgtggccgtcatcctcgtacagcgtgaactcggaatccacatcgggggccatcaggatgtccagcgcggtggtcttttcggtcatcaggttgtgcagcttgttgccgctcatcgggagaatggcaccgctgcgcacaaacagcgggatgctggcaatatcaaccggcacctcaatcgtctggccgggggcgtattcctcgcgggtgtagaagtcgtagaaccgctcgttttcgttctcggtcacgggcaggtaaaccgggcggacggtctggcccttttcaacgacgttcgcaaccagcagagaatcaccgaacatgaagtccacgccctcatcgtaggtggccgggtcgttctggaaaacgctgaacgtcggctgccagatgggcaggccgttctcatgcgcgcgctccatcagggaatacagcgtcgggctgagcttatagcggaagtcaatcgcgtccttgatgtactgctttttgtcactgtacatccacggctcggtgacggtgttgtcggtgttcgtggagtggatggagaagcgcggctggaagatgccgttctgcacccagcgcacgaacagctcgccctccggcgcggggccgaagaagccgccgatgtcgcagccgtggttggacacgccgcagagcgccatgcccagaatcgtggcgatgttgtatttcagggtatcccagtgggtcaggttgtcaccggcccagacctgcgcatagcgctggatgcccgcatgaccggaacggcagaccgagaacgggcggcagtcggggtcatactcctcgatggcctcgttggacagctggcacatcaggttgctcatgaccggcttcatcgtgccaatcgtgcttccctttccctcaaagtaaacctttgcgtccttgtcaacgagggagtcatactcgcagttgtcgttccagatggaacggcagccgtatttcagcagcgcgtccttgatgtactgcttccagtgcaggcgggtggattccttcgtgtagtccacaaacaggccggggccgccccaccaggtaccgacagccaaaccgtcaagacctgcattgtcgtcggaggcgggcaggaacatgcccttctccttcatctcgttcagcagcggatggacgagcagcataccgggcttgatgttgggcgagacgacgatgccgcgcttttccatctgggcgaaccagtctgccgggtccttgaagcgcttgtggttccatgtgaaggtgcagcgcttgatgccctcggcggtctcaacggcgcagtagccgctggacagctggaagccgtcggcagggatgccttcctcgcgtgtcgtgtcgatgaagtccagcacggcatcgtcgctgttctcgggcagctcggggtagtacatcgagctgccgaggtagcccagcgcggccttcggcagcatgacgctcttgccggtcaggtcggtgtagcgctcgatgatctcgcggatggacgggcccgcgatcaaaaacaggtcaatgtcgcccgcgtcggtgcggtaggacgagtagcggtgccagtagttgcgcttctcgcggcccatgttgaaatcgcactcggcggtattgtggtagaagtagccgacagcctgcttggtgccgcggttcaggcggatatagaacggaatgtgcttgtagagggaatccgtctccttggcgttgtagcccatggcgtcgccgggagccatattcatgtatttctcggccttgttgatctcgccggatttctcgccgaagccgtagaagcagtcgtctgcctcgatctggctggcgtggatgcggcggtggttgctgtcctcgcggtaggccaggtcgggaatgtcggcatgcagcagactgccgtccttatcatagaccatgatgcggaacggtgccttctcgatgacgaccttgagacgcgccccctggataacggcctgcctgtcgccgtcggtcagggctgcggcggcggactggacgcgcttgcggcagtctttcatcagctcgtcggtgcgggactcccatgcggtcatggtcaggctgtaggaggcttcatcccagtcgccgtcaaagcccgcgcggatgcgcagtatatcgtcggtcaggaaccagatgcgcagctctacagcgttggtggctacggaataatagcttccgcagtccttgacagcgccgccggtgtagcacactttcatagattttctcctttctattttgcgtataattgaatggtggaacttgttatttggcaggcaatgtgcatattgtacaaaattgcataatatattttgttcaatctgcacattgtgcccttcttcgcctttataataacaaatccttcacaaaatttctgccgtatttgtaatgcaaatgtcgcaaaatgtgatataatcgtggtaaagacaaaattttacaggaggagtcgctcatgatcctgcaaaaaatgccgcattacgtggattccattctaacgcaggaggatgccagtgccgccctgcaggacggtcaggttgtcgtgggcctgtatacaaaccgggagaatgtccagtcggtggtccactcccacccgtattatgagatgatactgccggtggcgggcagcagcgtgcgctactccgtcgacggcagtgtctacgatttgcacctgggggagctgatactgttcccgggcgagatgtaccactccggcaagttcaacatcacggacacgacctcggagcggctcgtcgtgcagatagctcccggcatctgggagcgtgcctgggcgcaaagcggcctgccgcggcatgtctggtcgggggatcctgtcattctggacactgacgccgtcacgcagtgggacttccgcggtctgctggagcggatggcccagaccgtgtatctcgatgaaaaaatacgcgataccgtgcaatgctgcgaggtcacggagctgattttgcttatcagccaagttgtgacccggcggcacaatgccccgccgccctcggccaccagtctgctcgtcgccaaggcggttgcttaccttcaggccaactacaccgacccgcatctgaccgtggcccagctggcaaagtacacctacaccagccgggagcacctgtcccgcgtgttcaaagagtacacgctggaaagtatacacgggtatctgaccaacctgcgtatgcagcactgccgcaacgagctcgccgacggcaccggcgtattggacgcctgcaccgccagcggttttgcaaattacagcagctttttaaagagtttccgcgcactgtacggcatcacccccgccgagtaccgcgcccaactaaggcagagccgcagaacgccataaagaaaaccttcacttgcgctttcatgatatgatggtgccggggtatgtgtccggcgtgctgttcctcatgctgttcggtatcggttgcggtgtctgttgccttgtaaaccaaaatcgccgcgatataaacaaaaatccgccggggagccttctcaaaaacgggaaggctccccggcggtattgccataaaaaatagccatctgaaatccgtgaccttcggcatctcaggtggctatttttcagaccgtcaaaaaactgcattcttgctctattgcgtgtgtaggggcgaccattggtcgcccgccaacttaccgcagtaacgcattttctgggatagttttcttacaaggcaaacgggtgcgggcgagcaatgctcgcccctacaagagtttttcgacagtctgaaaatgtaaatcgctccatggggagtggttcacattttgtatattattcaggcagttgaatctccggcatcagctcatcggagacgacttgcagcatttcctccaatttagccaggtcatcgggaccgaagcgctgtttcgcgcgctccatgacaaggtgcaagtaggaataactgatgttatagtaatcaatgtacttttgggtcgggcgcaggcggtattcccgcttgtcgatggtggattggatgcgctctacatagccttttttgaccagtgagttgatcttatacgcggcgttgggggtagaaagattcatcatgtggctgaactgcgcaatcgtaggttcgcccaatgccatgatgacttccatgcagaaagattctaccgtcgtcagcgtggcttcgcgatcctcgaatcgactgaagatctgcttatagaagtgcagtttgaatttggtatatacccgtccgaatgtctggtccagcatagcgagaatccccctgtaggttagtggatttattatagcacattccgccatgtaaaaccagccctcaggcatctgtgagaacaaacgtcagctcggcgttggccgcgcgcacgccgtccacccatgcggtggccttgccgatgcctaccgggccatgctgttctatcagctcacattccaatatcagcacatcgccgggtatgacctgccgacggaaacgggcgttttttacgccgccgaacagagcgagctttccgcggttttccggcaggcttaacgcggctaccgccccggtctgggccagcgcttccagaatcagcacaccgggcataacggggtgtcccggaaagtgtccctcaaaaaaaggctccgtgcgggtcacgcatttgacgccccgcgcccattggccgggggtgtagtccaggatcttatccaccaaagcaaacgggtaacggtgcggcaggatctcttcgatctctgccgcgctcatggctcggggcggctcatttggcgtatagttcatcctcatccctcccagcgtttgaataccacgcaggcgttatggccgccaaaacccagactatcgctcatggcatactccacctgcgccgtgcgcccatggttggggatatagtccagatccagctccgggtccggctcctgcaaattgacggtggcgggcaaaaaggcatcgtgcagagccagcgcggtaaatacgccctctaccccgcctgcaccgcccagcagatggccggtcatcgacttggtagaagacacggccagcttgtacgcatggccgccgaacaccgttttgatggccgctgtctcgcagctgtcattcaggtgggtggacgtcccgtgggcgttgatgtagccgatctgttcaggcactaccccgccgtcggccagcgccagccgcatacaggccgcaccgcctgcgccgcccggtgccggggcggtaaagtggtaggcgtcgcagttagcgccatagcccacgacctcggcataaattttggcaccgcgcgctttggcggcctcgagttcttccagcagcagtacgccgctgccctcgcccatcacaaagccgctgcggcgggcatcaaaagggatcgaggcccgggccgggtcgtccgccgtgcaaagggccttcatgctggcaaagccgcccacgcccagcgggctgatgcagctttcgctgccgccgcagagcatccggtcctcgtatccatcgcggatacggtggaacgcatcgccgattgcattggtgccgcctgcacaggcggtggtggggcagctgcacatgccctgcaagccaaaacggatggcgatctgccccgccgccatattgccaatggacatggggacaaaataggggctgaccttttcaaagccgcgctgctggccgcgggtgtgttcttcctcgatggtgggcaggccgccgatgccgctggaaaggatcacgccaaaccgcgtatggtcgatttcttccagcgcaaggccgctgtcgcggacggcttcgtcggcggcggccacggcaaactgggtaaagcgtgccattttgcgggcttcgcgcttgtcgatgcgcgcggcggggtcaaagtccttgacctctgcggccagctttactttaaaatcagccgtatcaaaagccgtgatcggtcctactgcgcagcggccagccttaatgtttgcccagctttctgccaccgtattgccggtaggatttaccgtgccaaggccggtaataacgacccggcgtctcttttttgtgtccattgcacacctcacattcccattccgccgtcaacgcaaaggacctgcccggtaatatacccggcctgctcccctgctagaaaagccaccgccgccgcaacatcctcggcatggccgattttgcctgccgggatggccgcttgtgctgcggcacgggccggttctgacagcacggcggtcatatctgttgcaataaaaccgggagccacaacgttggcggtgatattgcgggcagcatactctttggcagcgcttttcgtcagaccgatcagccccgccttgctggctgcgtagttggcctgacccgcgttgccgtgcagaccgacaacactgctgacgctgatgatgcgcccataccgctggtgcatcataaagcggcaggccgctttggtgcagaaaaacgcccccttcaggttggtggcaagcacattgtcaaaatcagcttcggtcatccgcagaagcaatttgtcggcggtaatgcccgcgttgttgaccagcacatcgatccgcccaaaagcggcaacggtatcttctaccagtttctgacatgcttcggggctgcgcacgtccgcctgcagcgtgacagcctgcacgccaagggcgcggcaggctgcggctgtttcctcggcagcggcagcgctgccggcatagttgacggcaatgttcatgccgttttcggccaaagcccggcaaatggcacggccaatgcctttggccccgcccgtaaccagagcggcacggcgcaagttttcggtttgcggcatggtcaggctcctttcatggtgcgcagcagctgttgcagctgcgcggcagtttccaccggatagcacgagatagcacttcccaccgtctttttgacaaacccggtcaacgccctgccgggaccgatctcaatggcggcgtccacgcccaattctgccagacggcggacggtcacctcccaacgcacgccggactgcacctgtttttccagcagcgcggcaatggtgtcggtttcctccatctcgtgtcccaggcagttgaacagcacagggaactgcatcggcgcaaagcggacagccttacatttttcccgcagtgcatcccccgccgggtgcatcaatgaggtatggaacgggccgctgacattcagcggcaggcagcgccgtgccccggcagcaagtgccaactcggcagccttatcgacagcggccttgtcaccgccaatgaccagctggccggggcagttgtagttgcagatctgcacaacaccttcgtcggcggctgcattgcagcatgcctgcaagggggcttcgtccagccccaaaacggctgtcatcccgcaggtgcgccccgccgcagccgcagccattgccttaccgcggaaagcggttaaagcgactgcggtctgcacatcgaacacccccgcacaggccagggcggaatactctcccagcgacagccctgccgcataatccggtgtgacacctgcctcccgcagtacggcagtaaggccagcggcaaacgccgtcatgcagggctgggtgtattgggtctcgctcaatacaccggctgcgtcggtaaagcagacttctttcaaatcaaaatccaccgccgcgtcggcttcgtcaaaagcagcgcggaaagccgggaaagtctcgtaaagatcccggcccataccggcgtgctggcttccctgcccggcgtataaaaatgctagtttcataaggtgatctccttgtacaccccggcgatgcagtctttggcttcgcttaccatcgcggcaaaaatttcttccaccgggcggacttcgtgcagcagccctgcggcctgtccggccatcaggctgccattctcggtgtcaccgtcaaacacagccttgcgcagactgcctaaagtaaagcgttccagcgccattttatcagccccggccttttcctggcggacatactcgcggctcatgcggtttttcagtacacgcacaggggtgccgccgatgcgcccggtcacgatggtatcactgtcgcgggcttttaacagggcggctttatagttttcatggatggggcactcggtgctcgccagcagacaggtaccgacctgcacaccgcacgcccccaatgccagcgcagcagccagccctcgtccatcggcaatgccgcccgcagcgatgaccggcacatggacggcatcgacgacctgcgggacaagtgccatcgtggtcatctcgcccacatggccgccgctctcggtaccttcggcaataacggcgtcaatgccgagcggttccagatgtttggccaaaatggctgccgccaccacggggatgaccgtgataccggctgctttccacgcggccatgtactttcccggatttcccgccccggtggtgacgagctttacgccctcctccaccacgattttggcaaattcatccgcctgcgggtgcatcagcatgatgttcacgccaaagggcttgtcggtcagtgcgcggcagcggcggatgttttcccgcagggagtccgcgtccatgccgccggagccgatcagccccagcgccccggcgttggaacaggcagcggcaaactcacccgtggcaatattggccatgccgccctgtataatgggatattttgtacctaaaatttcattgagcagcttcattttctaccctcatacgtcagcagcatcccgccccatgtcagcccgccgccaaagccgatgcaggccagcgtctggccgggtcgcagcagatcactttccgccatttcgtgcagggcaatcgggatgctggcagcactggtgttgccgtgacggcttatgtttttgtaaaactttgacggttctgcgtgtaaacttttgacgcaatggtcaattatgcggctgttggcctggtggcagactacccagtccagatcagacaatgtcttttggctgcggtccagcacggcttgcagacagcgcggtatagcctccacggcaaagcggaaaaccgccttgccgtccatcgtgatcggcgcggtatcgcaggccgcagggccgcccgcgcggatcgcttcactgccccgtgcgcctaatgttacggcgaacggggcattttcggccagctcaaaaacagccgcacccgcgccgtcgccaaacaatacacaggtcgtgcggtcagtcgggtccaccatgcgggagagtgcctcgcagccaatgaccagcgcataccgcccgcccagcgtgctcaggagcccgtgggccgcggcggcggcataaataaagccagaacaggccgcatttacatcaaaggcaggccggttttccggcagacccaaggcagcctgtacgcggcaggcaatgcttggggtagccgtcggggccgagagcgttgccacaacacagcaggcaatgtcgtttgccgccagaccgctgcgggtcagggcctgacgggcggcggtgacagccagcgtggcggcatcctcgttttcggtgcagtaatagcgctggcagatgccggtgcgggtcgtgatccattcgtcgctggtgtccacctgtcggcgcaagtcctcgttcgtcactacacggccgggcaatgccccaccggtagccagcagctgtaagcctttcatgcgcccctcatttctccgatgcggcggtattttttgtagcgctggtctgccaacgctttgccgctcatcttgcataaagcggcaaggtgcgccgcaatggcagtgtccaaccggctgaaaagcagctgccgtccacgctgtgcgccgcccagcggttcggggatgacttcttccacaatgccatctgcgtacaggtcctgtgccgtcagcttcatcatggtgcaggcctcgccgctgcgggaagcatctttccacagaatactggcaaacccctcggggctgagcactgagtacacggcattttccagcatcagaatgtggttggcaacgcccagacccagcgcgccgccgctggacccctcgcctgtgacaatggccagcaccgggacggtcaggccgctcatctccatcaggttgcgggcaatggcttccccttggccgcgttcttccgcatccttgccggggtaagcaccgggagtgtcaataaaagtgatgatgggacggtgaaatttttccgcctgtttcatcacgcgcagggccttgcggtagccctccggtcccggcatgccaaagttgcagcgcagattttcttccagcgtagttcctttacggtgccccaaaacggtaacgggcatcccgtggaaccgtgcgatcccgcataaaatggccgcatcctctttgcattgtcggtcaccgcactgctcaaaaaagtcggtaaacaagttgtcgatcatttcggttatatgcgggcggtcggggcggcgggccagaaaaacacggtcctccggcgtcagcgaggtgcagcgctgtaaaagcgtgttttcctctgcggaaagctcagccagttcagccgcatgggtggtcgtgctcgccatttcggcgtcatcggcacggctgcacagcgcgtcgatctgcgcgtccagcggttccaactgctgcaaaacttctttgatcatctgcgcttcctcccctgcgtgtggagctgcaagatttgcgttaagacctctttcagctcggtgcgcggtacgacctgatccacaaagccgtgttccagctggaactcgctgcgttggaacccgtcgggcagtttttcaccgatggtctgttcaatgacgcgcggcccggcaaagccgatgagtgcccccggttcggcgagcgtaatatcacccagactggcaaagctggccgtgactccgcctgtggtggggtgggtcagcacgctgatgtacaacccgccgctgcggttgaaccgttccagcgcggcgctggttttggccatctgcatcaggctgaaaatgccctcctgcatccgtgcgccgccactggcagaaaaaataatgagcggcaggtgcttgtcggcagcgtactcaatcgcacgtgtgattttttcaccaacagcggtgctcatgctgcccataaaaaagcggctgtccagcacagcgaccaccgtctgcacgccgccgatcctgccgattgctgtaacggcggcttctttcagaccggtcttgaccgaagcagcggccagcttttcctgataatcgggaaaatgcagcacatcgttgggcgcaatgtccgggttcagctctttaaaagttccgtggtccagaaccgtgctgagccgataataggcgccgattgccaaatgcaccccgcagttggggcagacatactggctcttgacccaaacctgccgcgtggcacggcggccgcattttttgcactcgacaaattgcggcggcacccagttgggcgcagccgtgccggcatcgcggcgggctttcatctgaaagccgcgctcctgcgggctggtcgggaacagcttttcaatggcactcatcctgcaataccctttaggctgcccgcgcagccagatagttgaagatgtcgcccacggttttgagcgtccccaggtcctcgtcggcaatcgtaacgccgaacttgtcctcaaacgccatgttcagctctaccgcatccaggctgtccgcctgcaggtcgtcggtcaggctggcatccattgtgaccttatcagcatcgcagttcagggtgtcaacaaatacttcttttacttcttcaaagctcatattacgtacctcacataatttaactaaataaattgacgtaattgtcaatgaggtcattataccacgtttgtttcgaatgtcaatattattaggtaaaaatatttatctaattgaatcgccgcttttcttatcttccggtattataaaaggaaagcacacaaattatccccctgcaggggcaactcttgctgactgcgatttgaccgctgctgcatatcttccctgtgaaacatccaatcgcctttaaatgattttatttactttctcttttactctcccagattattttctattctgcaacatatttcgctctaatgtgctatactaatactatccaataaggatggaggaacttctatgaaacgcagcagcatccggctccaatacaatgcccccgtcacactgacctttttctttttgtccctcgtctctctggtattgggctacttaacaaacaactggacaacctcgcacctgtttagtgtgtatcgctcgtcgatgacggatccgctattctatgtccggttgttcggtcatgtccttggccacggcggttggaatcactttataaacaatatgctcctcttccttgttgtcgctccacctttggaagaacgatacggaagccgcacacttctaagcggtatccttatgaccgcgctggtatccggcatattgcagtgtgtgctgttccccacttctgcattgcttggtgcatccggtatcgtattcatgctcatcatgctctccagtttggccggcagtaagaatggaggtatccctatcaccttcatcttggttggcgtgctgtacttaagccagcaggtatacagtatcctctttatacaagataatgtagctaactttatgcacattgtcggtggtatttgcggtacagcttttggttttgccgtccggaagagataacgaatgatcggaaagagaatcttatttatgatgagtaagcacatttttcagaaagaacctgtcctgagcattgccacctgtttggcgatcatttccgctttctttgtccccccggacgcagaatacctcggatatatcgatttccgtactcttgcaatcctgttttcgctaatgacagttatggccggactgagagggcaaagcgtatttgatagactcggccatgccctcctatctcatacccgcaccactttgcagttaacggttgttctcgttggcctatgcttcttcagcagtatgctgataacaaacgatgtatcgctgctgacattcgtaccatttacgtttgtcgttctgaatagtttgaacacatctgttcgcagcaaactgctcctccctatcgtctgtatgcagacgatagctgccaaccttggcagtatgcttacaccactgggcaatccccaaaacctgtatttgtatggcaagagcgggatggatatgagctcttttgttctgttgatgctcccctattccatcatatcattagtgcttattgctacatgggcggtatggctatgccgtgaaggttccgacattgttgtaactcattctgcggtaaactcagaacccaacaagaaactcattgcgttgtacggtattctgtttgtcgcctgtttattggttgtattgcgtgttctcccatacggtgttgcattcgtcgctatcttggtgtgcaccttctttgccgaccgtcccactcttggccgcgtagactattctctgattcttacctttgtagcactgttcattttcattgggaacttaggtcggatggaagcgttctctggatggttgcagaatattctggccggccatgaggttttagtatccgttctggcctctcaagtgactagtaatgtgcctgctgccatcctgctttcaggatttaccgataatttccgtgcgctgattattggcacaaaccttggtggccttggcacattaattgcatccatggcaagcctgatttcttatcgacagattgcaaatgaagtacctgctgaaaaagggcactattttgcgatgtttactatttccaatgtagtgtttctggccattctgatgggcgcttgggtcctgacctgatatttccgtaattctattgctatttaacgtctttaaacgaagatccacattcgtaaatggtcgcgcagtcaagcaaaatcgagcgcattatgaaaaattacgtcagcagttacagaaagctcaagcaccatcttcacgcataaggctgaaagctatagggaaacaaaaaagcggaggaggcaaaacgcctcctccgcgccaaaattttcggttgtagggaaacaccgggggtagaaagtgtattactgccatcctcttgccgcagggtcgagcatctcggcggcggaatacaccagcgcgttgcagatggcggcagccacgttgctgccgcccttgcggcccatggcggcgatggcgggcacgccgtactgcgtgcaaaccgcaaacagccgttccttgctttccaccacattcacaaagccgacgggcacggcgatgaccagcgcggggcgcagaccgctttcgatctcgtccgcaatcgtcagcagcgccgtgggggcgttgccaacggccagcaccgcgccggggtactcccgcgcggccctgtgcatggcggcggcagcccgggtcgagcccgccgccttcgcagcagcggcgacagcggggtcggccataaagcagagtgcctgcccgcccaatttggccagaccgggctttgtgatgcccgccagcgccatgttggtgtcggtgattaccactgccccggcacgcatggccgcgacgcccgccgccgccgcgccgggtgtgaagcgcaggttctcggcgtagtcaaaatccgctgtcgtgtgaataacgcgcttgaccacggcggcgttttcgggcggaatcgcaagcccgcgcgcggccagctccgccgtgataatgcccatgctcgtgcgctcaatgtcggcgggcagatgatgctgcggtgtcatttttttcctcctctggggttgtgcagacccatggccgcgtagacggcgtccatgtccagcgcactgcgcacgccgtcggccaacaggtccagctgctgtgtgcggtagtcggccatcgcaagcggcgcggcggtctccggcgcgattcccttgcggcggcagaggtacgcggccagctgctccgtcaattcgccgctgtcaaacaggccgtgcaggtaggtgccgaacacggcgttttgcacgcagccctccggtgtgccgtcggcatagcggcagaacggtgcgccgttcaccgcggtgcggcccgtgtgaatttcatatccggtcagcgcagccccggtaaagggcgcggcaaccgtcgccgtgacctgtgcgcggcgcttttcggcggtaaagaccgtccgcgtcggcagcaggcccagcccgcgcagcgtctgcggatggccgctctcggtgccctgactgtcgtcgagcgtctcgcccaacagctggtagccgccgcagacgcccagcaccggcgtgccgcctgctgccagcttgagcacagcggcctccagcccggactggcgcagccacaacaggtcgttcaccgtgtttttggtgccgggcagaatgaccaggtccggcgcgcccagctcccgcacggactgcacgtaccgcacacccaaaagcgggtgctgttccagcggcataaaatcggtaaaattggaaatatgcggcaatctcaaaacagctgcgtccagcggcttgaccgcgcttttgctttgcagccgcggcgcaagcgagtcctcgtcctcgatgtccacccgcaggtacggcacgacgcccagcaccggcagctgtgtcttttcctccagcattgccagcccggggcgcaaaatttctacgtcgccgcggaatttattgatgataagcccgcatatacgcgcgcgctcgtccggctccagcagcgccaccgtgccgtacagctgcgcaaagacgccgccgcggtcaatgtcgcccgccagcagaaccggcgcgtccacaagctttgccagccccatgttgacaatgtcgtccgccttgaggttgatctcggcgggactgcccgcgccctcgatgacgatgatgtcaaattcatcggcaaggctgtcgtaggcacgcagaatatcgggaatcagcgacttttttcggcggaagtattcctttgcgggcatgtcgccgcggacctcgccgtttacgatgacctggctgcccacatcgctgctcggcttgagcaggatcgggttcatccgcacatcgggctcgacgcccgcggcctgcgcctgcacgacctgtgcgcggcccatttcgaggccgtcccgggtcacaaagctgttcagcgccatgttctggcttttgaacggcgcggttttgtagccgtcctgcgcaaaaatgcggcagagcgccgcgcacagcaggcttttgcccgcgccgctcatcgtcccctgtaccatgatgcaccctgcccggctcatgccagcacctcccgcataattttcaacagctgttcgttttctttttgggtgcgcacagcggtgcggtaccacgtctcgtccagccccgggtagttgccgcagccgcgcaccaccgcaccgtgacggcgcagctttgccccaaagtccgccggtgcacggaacagcaggtagttggcctgtccgtccacgacccgcagccccagtgcccgcagccccgcagccagccttgggcgctggtcggcaatgagtgtgcgcacgctgtcggcataggcggtctcctccagcgcagccagccctgcggcctgtgccagaccggacacggcccacggctggcccgccgcgcgcattttgtccagcagcgccgcgtcactgcacagcgcataccccagccgcaccccggccatggcgtagagcttggtgaatgcctttaagattataaggttcggtgcatcgcgcaaaactgtcttagctgtcagggtatcccgcgcggcgaggaagtcgaggaagcactcatccacgaccagcaccgcgccgcagtcggcacagcggcgcagcagtttttgcaccacaacgagcggcgtgacctgcccggtggggttgttgggctggcagaggaacactgcatcggtgctgtcgtcgatggcgtctacaaagccgtccgtcacggcaaagtcattttcctcccgcaaaagaaaccgctgtacgtcacaatccaccgtctccagcgcagcagcgtactcggcaaaggtcggtgcgggcagcaatgcgcgccgcgggcgcagggccagtgccaggcggtagatcagatccgccgcaccgttgccgcacaaaatttgcgcagtatccacaccttctgccgcggccagcttagtgcgcagtgcccggcagagcgggtccgggtagcgatccgccatgggcagtgccgctgtgatggccgccgccacgcccgcgggcagctccagcgggctgacgttggccgaaaaatccagcgcgtcccggccaaactcggcccgatagcccgcccagtcgccgccgtgtaccagttccattccgcattccctcacaagacaagcatcagccgcacggccagccccagcacaagggccagcaggctctcggcgtacatcatgcggttggcacgcaggatgtcccgcggctcgatctcccgcagcgggtcgccaattgtcggcttatcgtaatattcgccaaagtaataggccgggcccgccagctgcacgcccagtgccccggcgcaggcgctctcggtctgggcgctgttggggctggcgtggcggcggcggtcccgccgccagatgcgccacgccccgcgggcgctgttgcccgtcagcgccgccgcagccacccagagcagcgcggccaggcggctgggcagccagttggcggcatcgtccaatttggcggcacagcgcccgaaataaagatatttttcgtttttgtagccgagcatgctgtccatcgtgttgatggccttgtaggtcagcgccagcggtgccccgccaaggagcatatacaaaagcggcgcaatgacgccgtcgctggcgttctcggccacggtctccacggcagctctggtcacgcccgcggcggtcaggttttgcgtgtcacggcccacgatgcgggccacggccctgcgggccgcgggcaggtcaccctttgccagttccttgtacacattgcggctctcctgtgcaagacccttggcagccagcgcctggccgcaccagagcatttgcagcgccagccccagcgccgggtggagccttgccgcggcccagcaggcaagcccggtaacggccagcgtgcccagcggcagcaccgcggccaccgcggccccgccggccagctcgccccgcggcgttttgggcagtgcggtgcgcaggtgcttttccagcgccgagatgcaccggcccatgagcaccaccggatgcggcagccacgccgggtcgccaagcagagcgtccagcaaaaagccgcccagcaccgcccaaaagatcagcatgtgctctccttcgtgtactgcacggtcttgaccaaacgcagctcatgccgcgccgcccagtcacgggcgtccagcacatagccgcccgcgttggggccgcaccaccggtaatagctgcggcgcggcacgccgtagcgctccagcgcggccatctgggtgccgccgtgggccaggatcaccagcatttcctcgccgtcggccagcgccttatccaccagcgccgcaaacgtgcggcatacgcggtcactgaaatcatccttgcgctcaccgtcggggcagctgctctcgcagttggcggcgacccacgcctgatagtcggggtcgtgctccatctcaatataattgcggccttcaaagctgccgaagcacatctccttcagcccgtccacgggcacgagctccgcgtccgggaacagcacctccgccgtctgccttgtgcgctgcagcgtggaaatatagacaaccttcgggtcaatatcagcccggcgcagctgggccagcccctcgggcgagagcgggatgtcccgctgaccctgatagcgcttctgggcgttgtactcggtcaggccgtggcgcaataaataaatcagcatttcggaagttctcctttcaaaatcgtcggcagaccgcaaaacatctgcacaacgcagtccgcccgcgcggccagcagacaggccagacggcccgccgcctcccgcgcggcacgcgcggcggggtcaatcggcacaacgccgccgccgacctccgccgcggtcacaacatcataatctgccagctcgtcggccagccggttcaaatcggcggcgtcggcggccaaatcctgcacgtcatacacctgccgcccgccgagcttttgcgcaaaggtgcgcttgccgctgcagagcggccctgtcacaaacaccatttacaacacccccagccattggcaggcggccagcgccgccagcatccagatctcgcatttttgcaggaaccacccggccagatcaccggtcacaccgccaaactgttttttggcaacagcgtagtaccgcgcaaaaacgcagcccgcggccagcaccaacgcccagccgcccagtgcagtcagccccacggccagcatggcgcagagcacggccagcacctgccgcacgcggacgcggtccgccgccgtggcaaaggtgtgggcaaggccggtgtttttcgccagcgggaacgccgccacggccagcccggacagcgcccgctcccccaccagcgccagcgtccagagcacgccgacccgcggggtgaacgccacacagccgcacagcgcaaaatacgccgcaaagtagctgcacagccggatgaccgcgaacgcgccgcagtgggggtcctttaaaatttccagcttcttcgcggtatcgccgtagcttgaaagtgcgtcgcaggtgtcggcgtagccgtccagatggatgccgcccgtgacccagactggcacaaggcagaaccccgccgcgcgggccgccgcaggcagcggcagcacgccgcagacgcaccacagtgcgccgcacaccgcccccaccagcgggaaggcgcagagcgcgtaccgcatatttttttcgttccagtcgaactgcggcatcggcagggccgaaaacatagcgaacgccaccgcaatcgtctgtaaagctgtcacggaccttcacttcctttataatagacggggatgccgcagacaacgcgcaccacgcggtctgcccgcgccgccacagcgttgttgacggcggccagtgcgcgcagatagcggtccgtatcgcccgcatagtctgccccaccgctgaacacctcgttggaaaccacaatcagattatcacattgcagcagcatcttgtcaatgccccgcaggatcgccgccgcggtttccgcccctgcaccgtcggggtcatacagctcattggcggccaggttgcccaggtcctccagcagcacggtgccgcgccggggcagggccacgcggtccaggtgcagttggcactctaccgtggtgaacttcttttcggcccgcatggcgcggtgcttcgccacgcgggcggcgcactcggcgtcccagacctgcatcgtcgccagataggtgcgcggcagcggtgcacgcaggcagagcgactccgcataggcgcttttgccgctggccgcgccgccgatgaccagcgtcagcactgcggggtgtacggcgtgatgccgccctccgcaaacgagtagcagccgttgtagacggccagcgccatatcccacagcggcaggctggccaccgcgcccgtgccctcgcccagatgcagctctgcggtgataagcggttttttgcacagcgcgtccagcacaatatgtgcggctggctcgctggacacatggctggcgaaaacggccttttccgccgcggggcagagccgcaccgcgcacagcgccgccacgccgctgatgaatccgtccatcacgatgggcagcctttcgagcgcaccgcccagaaacacgccgcacagcccggcaatatcaaagccgcccagcgccgccagcacccccagcgggtccgcggcgtcggggtggttgcgggcaatgccgcgttcaatcgcatctattttgcggtgcagtccggcgtcggaaagtcccgcgccgcgcccggtcatctcggtcacagggcggcccagcagcacgctggccacggcgctggacgtcgttgtgttgccgatgcccatttcccccgtcgccagcagctgtgcgccgttctgcttctgcgcacgcaccagcgcgatgcccgcggcgatggcctgcacggcctgtgcgcgggtcatggccgggccggtggtaaagtcagccgtgcccgcagcaatgcggcagtccgccgcgccgggaacgggtgcgcccgcaatacccatatcgacgggcacaacatcgcagtgggccgcagcggccatacggcagacgctggtgcggcgggcggtcaggttttcgagcacggcgcgggtcacggaggcatcggtctggctgacgccctgcgccacaacgccgttgtccgcgcagagcaccagcaccgcgcggcggctgacatccggcacggggtcgccggtcagcgcggcggcgtcctcgaccatggattccagccgacccagtccgcccaaaggctttgccagcgcagcccagtgggcgtgggctgcggcgcgggcggcctcgtccggcggggtaacggctgcaagcaggtttttcagttcgttttcggtcatgatgtttcctttatataatgttcggctgcagccgcaaagcgcttcggcagcggcgtacctgcccagtagagatgcggaaaacccgcgtagagacgtgcattggcaaagccgcacgcccactgccgcccgtttgccttggcagcggtgaacgcatcgccgttttcggtggagtcccagtgatggaactcgtggacgggcagggtctcccccgcgcggaacagcatactgtcggcgcgggcggtcaggcgggcgtagccgaaccgcacaagccgcccgaccttgaagccttgcccgggcagcacgcccgccatcgggtggggcgtgccgtcggcgtcctgtaatgtccggcccaggtacaaaaagccgccgcactcggccacggtgggcaggccgccctgcacggcgctttttacggcggcgcgcaggggggcgttcgcggccagccgggcggcgtacagctcggggtagccgcccggcaggtaaagcccgccgatgttatccggcagcgccgtgtcggccagcgggctgaaaaagcacagctccgcgccgttttcccgcagtgcctccagcgtttcggcgtaggtaaagcagaacgcggcgtcccttgccacggcaaggcgcacccgcggcgggggcagcgtgcacggcacagcggcgggcgcggggcggtcaaacagggtgtgcagcagcggccagtcgatggtttgctgcgcggcatcggataagagctgtatcttgcgctgcagatcgtcgatctcggcggcggttttcagaccgaggtggcggctttctatcgcggcctcgggcagcggcggcaggcagccgaccacgggcagaccggtctctttttcgagcatcggcttcagcagagcgcacaatccttgcgtacaatcattgagcaaaatccccgcgatatggtgcggtgtgcggaacgccgtcagcccgcgcagctccgccgccagcgtcaggcttgcccccttgggccgcacaacgagcagtgcgggcaggtccagcgtatcggccagctgccatgcgctggccgtgtcggtcacaccgccaaggccgtcgtagtagcccatggccccctcgacgactgccgcgccgtgccccgccgcgtgccgggcgtagagtgcgcgggcgaactgcggtgcagagaaaaacaggtcgagattgtggctttcgacgcccagcaccgcgcggtggaacatcgggtcgatgtagtccggccccgacttgaacgcgcagggggtcagcccgcgggcagtcagcgccgccagcagcgcacaggctgccgttgtttttccgctgccggagcggggtgcagccagaaccaattgcagcatttttactccctcgcgatcaagaaaaccgggttgttcgccatgagcaggtgcaggctgcccgccgcccggctgcggctgactgcgatttgtgtgacctgggcggtcaggccgtgggccgtcagggccgcaacggcctcctgtaaggtttccagcgcaatggcgctgatacagagccgtgcatcggggttcgcggccagcgcggcatcgacgacagcccgcagactgcccttgctgccgccgataaaaacagcgtccggcgcgggccagtctgccagtgcggcgggggcaaggccctcggtaaggtgcagattttgcaccgcaaattttgcgcggttctgacggataaggtcacaggcttccgcgtcgcactccacggcgcagacccggcccgcaggggcggccagcgccagctccacactgacgctgccggtgcccgcacccacgtcccagatggtatctgtggggcgcacagccagcttggccagcgcggcagcgcggacctcctgcttggtcatcggcgttttgccgcggatgaacgctgcatcgggcaggccgggcgtgcggcgcaggggcgcgggcacattttccacaagcaggacactgagcggtgcaaagcgctgtgcggccagctcctgcgccgtgccggtcacaagccgctgggacggcgtgccgaggttctcccccaccgtggccgcagcgtcgcccagccccgcagccgccagctgttggcagagcgtcgcgggggtctcgctgccgccggtcaggaaaaaggtcgtcccgcctgcgcggcaggcagccaccgggtcacaggcacagccgtgggcggagacgagccgccaaccctgccacgggcggcccagcgccgcggccaataattgcacgctggaaacgccgggcagcaccgtgtacggcagacccgcgtcgtccaatgcgcggcagagcgccgccgcgccggagtagaagcccgtgtcgccgctgaaaaccaccgcggcctctgtgcaatctgtctgccgcagcaatgcgaaaatttcgtccgttttatagagggctgcgcggtttgccgtgcagccctcgggcaggttttccagcaggcggcgcgcaccgatgatcagctccgctccgcgcagcgtctccagccccgccgctgtcaggctgccgggcgctccgctgcccatgcccaccaatgtgatcttcataaaagctccctgcatcgctgtaaaattgtgtcagcggtctcgcccgcgtcgtccgggcggcgcagcacaatgagctgcacgccgcaccgggcggcggcctcggccttttcggcaaagccgcccgccgcgccgccgtccttcgtgaccatatagtcgatatggaactggtgcagcagcgccgcatttaattctttcgtaaaaggcccctgcatcgcaaggatattgcggtgcggaacgcccgctgcctcgcatgctgcgatacctgccagcgtcggcagaacgcgcgggtagagccgcgccgggtcgagcgctgcgaaggcgggcagctccttggcacccgtcgccagcaggacgcgccccggtctgtctgccagatacgcggcggcccgggcggcatcggcctgcaccacactacccgtgggcagggggctggcggggcgcagcagacggtgatattcaacccccgccgccgctgccgccgcacggatattgcgcgttgcctcggcggcatacggatgggtcgcgtcaacgcagagtgccgcaccgcgcagcagcgccgtcattccttcggcgtccagccgcccggtgcgcaccgtgatgccgtcggcgcagccctgttcctcggcccccagctctgtcgccacacagaccgtgaccgccgcgccgagcgccgccagcgcgcgggagaagctgcgcccctccgttgtaccgctgaaaaccaccacattcatacgccgcgatacccccttggtgtgaccattcttccatgtaaaatctgcgttgcagcgttgccgacaaagaccgttgtgaacatatccacggcggtgtcctccagctcggccagcgtcagcagccgtgcggtctggccgtcacggccaatgcagcgcaccagcccgcagaccgtgtccgggcccttgccgttgtcccgcagaatgcgaacggccttttgcaggtagtcggcgcggcctctggacgacgggttgtagagcgccagacagaagtcccccgccgcggcacaggccagccgcttttcaatgacggcccacggcgtcagccggtccgacagcgagatcacgcaaaaatcgtgcgccaacggtgcccccagcaccgcggccccgctcaaagcggcggtcaggccgggcacgatctcgacctccacctccgggcagtgctccgccagctccagcagcgggctggccatgccgtagaccccggcatcaccggagcagacgagcgccacagtcttgccggtttgcgcggtttccagcgcccagcggcagcggtcaagctcccgcgtcatgccggtggcgtagacctctttatccgggtaaagtgggcgcacaaggtcgatgtagaccgtgtagccgcacagcacgtcggcggcctgcagggcgcactgcgcctgggcggtcaaatactgcgcaccgcccgggccgagccccaccacgtacacaagactacggttcatcatttctccatctccaatccggggcaaagggggccagcgccacggcaagggtcacgccgtcgtgcgcccacttcgggatgaacagcaccccgtctgcagccagcaccgccgcacgctcacagacattgtccacacccgtgatgctctgcacaaagccggaggccgtaaagcggcctttagccgtgcgcagggcagcggcggtataaaagtccagctcccagccgtgcgcctggcagaacgccgccagacccggctcatcctttttcaagtcaatgctggcggcgcggataacgccctgcggggcaaaccggtgctccgcgcagaaggccgcaaaggctgtttccaacttttccgccgtcgtgccgcgcttgcagccgacgcccagcaccgcaatgcgggggatcaggtgcagcgccttccccgtcggggtcagcgtcagcgcaaaatccgcgcggtcagcggcggctgcaggctctacacccgcgggcggcgtgccggaaacagtccagtcggcggcatagcaaacgctctgcccggccaacagtgctccgctcacgtagcggatgcgctccggctcggccacggcgcagttctggcgcttggcccactcgtccacggcaaaaacgccgcgtccgtcggtggccgtcgtgatgaccggctcggcatggcagaccgccgccagccgctgcgccagctcgtttgcgccgcccagatgccccgacagcagcggaatcgcgaactgcccaccctcatccagcacaacgacggcggggtctgcagccttgctgcggcagtgcggcgcgatggcccgcaccgcgatcccggcagctcctacaaaaatcagtgcgtcgctttgtgcaaactgcgcagcggtccaatcggtcaggcggacgccgtccgcaccgccgcgggccacactgccggggcaggctgccgccagctgctgcgccagcgccagtccccgcgccgtgaacgcaatgtacgcacaggtcatcggtccgtccccctgcggaactccgttgtgaacgccgggtcatacagcttgctgcggtcatactgtgcggccaaaaagtccccgacgacgatgagcgccgtcttggtgatgcccgccgcgcgggtgctttcggccagcgttccgacggtgcaatgtacaattttctgttccggccacgttgccttgtagacaacggcggcaggggtcgcggcggtgtacgcgccctgcagaagcgcatcctgcaccctgtcgatcaggccgatagagaggaaaatgaccatcgtcgccccgtgggcggccagcgcggccagccgctcaccttcgggcacaggggtacggccctccatgcgggtgatgatgacggtctggctgacgccgggcagcgtgtactcggcgttcaacgccgccgccgcaccgcagaagctcgacacgccgggcgtatcgtcgtaggcgatgcccatggcgtccagcgcgtccatctgttcccggatcgcgccgtacaggcaggggtcgcccgtgtgcaggcgcacggtggttttgtgcgctgcttcgttttctttcatgacggtaagcacctgttccagcgtcatctcggcgctgttatagatgacgcagtccggccccgcgagccccagcagcgccgggttgaccaggctgcccgcgtagatgatgcagtccgccgtttgcagcagggccgcgccgcgccgggtaatcaggtccggtgcgccgggaccggcccccacaaaatgtaccatgtcaggctccttcccacaatttcaacagtatatcggcagtttttgtctggcccagcgggccgttccggtttgagaacagcaccgcgccgaccttgaacgcccccgccgcgcggcggtccagatgcagctgaatcgctgtgagcaggctggccatgaccggctcccgcagctgcgcggcgtccagaatgtccagacaggcgtctgtcgtggcggcgaccatcagggcgcggcaggttgccgcgtccgcgccgcagagcgccgcatgggcacagaacagctcagtgcggcagtcggcacagcgggagtgggtgttcatgatgccgcccgccagcttgacgagcttgcccacatgcccgacgagcagcacctccgcgaagtgctccgccgctgccatatccagcgcctcgccgatgaaatttgagatttttacgacagggatctcgtgcagcgcggggtagttggcggccaggtagtccagcccgtagttgccgggggctaaaatcaggcggcggcttttcaacgctgcctggtggatttcgatttgcagcgtatccaaaagcgcctgttggctcatcggctccacaatgccgctggtgcccagcaccgacaggccaccctcgacccccagatgcgggttgaaggtgcgcttggccgccgcctcgccgccttcgatggagatgaccaccgcgaacccgccgccgtagccgacggcgtccgcctcccgcaaaagcgcctcggttatcatctgccgcggcacacggttgatggccgccgcgccgacgggctggtcgaggccgggctttgtcacacggcccacccccgccccaccgtcaatcgtaacggtgcgcggcgcgtcgggcagcagtgtgaccgcggcaatgaccggcagacccgtcgtggcgtcaatgtcgtcgccgccgtccttgacgatggcgcacgcggccccgtctgccgtcaggcggcagaactgcggtgcgacctccacgacgatgcccttgggcgtgcgcagaccaacgctttccggcgcgtggccggtcagcagcagccgcgccgcgcccgccgcccccagcgccgcgcaggtgccggtggtgtagccacagcgcagtaaacgctgcccgctgcggatgtagtgctcaaattggggcttcggctttgcgccgcccccggcaaacagcaccgcgtattggtcggtgctcagtccaaacagcgcacagatattgtcctgtgcaaaggcgtcctgcggtgccagcacagcggacacgcctgacggcgcaacgcagacaacggcgtcggccagcctttgggccagctccagctcatgcagcgtcacgatgacggccacattcttctcatgcgccagcacttgcaggatgtccatgagctccgccttgccctttacgtccagaaacgacgttggctcgtccagaagcaaaatctccggctgctggcagaccgcgcgggccagcagcacgcgctggcgctggccgtcgctgatcctggcaaaatcgcggttctccagctcctccgcccggacaaggcacagggcgtcatgcacctgctgcctgtcggcatcggacaaaatgcccagccgcccggtgtaggggtagcgcccggcggcggcgacctcaaagcaggacgtcagctcggtgcgcgccgtgtggggcagcatcagcgccagcttgcgcgcccgggcgttgggggtgtaggccgtcaggtcttgcccgtccagcagcaccgcgccgccctgcgccgccagctgcccggccagcgtttttaaaagggtggatttgcccgcgccgttcggaccgatgagcgccagaattttgccgcgctcggcgtgcagggcaatgtcccgcagcagcggcgcaccgtagccgacggcgagattttgcgtttcacaacagctcataccgtgccctccccgctgtggcggcgcacaagcagccagatgaccaccggcgcaccgaacaccgctgtgaccgagctgatggacagctcggtgggtgcaaacaggctgcgggcgatcaggtcgcatagcaggcagaatgccgcgccgcccagtgcgcagcccggcagcacctgcaacggttttgcactgcccagcgtatgttttaccagatgcggcaccgcaatgccgacgaaggagatcggtccggcaaacgccgtgacgcaggccgccagcaggcttgacagcagcacaagcaccacggaaaacgcccgcaccggcacgccgacgctggcggcgtagctttcgcccagctggtaggcggccatcggcttggagagcaaaaacgcggcggccaggcagggcagaacgatggccgccgccgtggcgacattgccccaggtcatgccggagaagctgcccatcgaccagttgtgcaggttgacgatgttggaatcctgcgcgaaggcgacgacaatatcggtgacggccgagcagatgtagccgatcatgacgccgcagataaccaaaatgctcatctgctgcacgcggcgcgccacggccagcacaaacagcatggccgccatggccccggcaaacgccgccagaatcagcgtcagtgagccggtgagcagaccgcggttcaaaaagactaccatcgtcagcgccacagccagcttggccccgctggaaatgcccatgacgaacggcccggcaatcgggttggcaaaaaacgtttgcagcagatacccggccaccgagagcgccgcccccagcagcacgaccatgacggcgcgcggcagacgcagctgcagcaggatgttggccgccagcgcgtttgtgcggcggcccagcagggccgccgcgatgtccgccggggagagcgcaacgctgccccagaacaggttgagcgcaaacagcgccagcagggccgccgccatggcgagatatgcaattgtcatgcgtttggaggtgtgcatgcgtggttccctttgcagcgggcggcaatggtgcgggcggatatggaatccgcccctacggatgcgccacggttttgtgcgcccgtttttgccgccgcgttaaattttcagtgcagcttcgtcaaaaatgtcaattcactgtcgtccggatcatcctcggtgaacaccctgttcatatccaggatcagatccggcagctccatgctctgctggaaaaggctctgcgacgtacaccagacgctgccgctttgcacggctttgaagtccgccagcatcggacatttggcgagcagctcatccattgtgcgcagctcaccctcaatcgtgctgttgtagaacagcacatcggcgtcacgcgccccggcgtagaaatcctcgagcgagatattgacagtcgccagattgttgccgctgtcggtcaggtcggcaaagacgtagctgccgcccgccaacccgatcatcttggcgacgtaatcgccgcccttgcgcaccgtggcgagattgtttgaggtgatggagaagaacgccgcagtcttgccggtgggtttctcgtccagcagcggtgcaatgcgctgcacagcgtcgtcaaaaatgcgctcggcctcctcggttctgcccagcaggatgccgtacagcttgacccattccatccgggccagcgggtcactctcgtagctcgagcgctcgacgaggaccggcacgccgaatttttcgagctgctccttcacctcgggcgtgtggtagatcattgtgttctcgatggcaaggccgcagtcggcggacaggatcgtctcgtaatcgggcgcgctgtacttgcccgcgtaggcgatctcgccctgctccatggcggtgcgggccgcgtcgaggtaccagttttcggcctgcgtgccggacagcgccacagcccccagcccaccaatgctgatgatggggtccatcgcggacgacgacacaaggtagatattttggataggctgctgcaaaacggtgatgtctgcgtccagattggcgggcgcagcggccccctccggcacgacgagatagcggctgccgtcaatcgtgatgaggtcatagccgcccgcacacacatccaccgtgaactgcttcgcgtattccagcggatagcggttttctatcgtcaatgcgtccgtttgcgcgggagcctgggatgcagccgcgcaccctgccagcagcagggcgggcagggcaaaagctgccgcgcgcctcattcggcggcggccagcgtcgcgctgtcaaaggtcagggtatagtcgatctcgtgcggggtgctcatggcgacggtgtccgccgtgacggccagcgcggtatccagcgcggcaacggggatctcaaacgtcgagttgccgtcggtgttgacgggcaggtacttttcgccgtcgacgagcatatagtcatagttcgggctgctccagacgatggtcgcggtcataatgccgtcggccacggtcagcgcggcggggctttcgacggtggcgcgtccgctgccgccctccagcgtcacagcgcaggtgtagctgccgtcggtggggatctcgacggctgccgcagccgcatcctctgccgcaggctcggcatcggagatgctgaccgtatggtcataccaggtgcccttggtgccgaggatggccagctggaaatcggcatcgacagccgcaacggggatgtcaaagccgtatacttcatcgctggtgccgtcggagtaggtcaccgtgtcaacggtaggctgcagccagtcgctctcgtgggcgggggcgtcggcggccatgcccggatacaggttgacgatcttctgggactgcagactgacgtggaaggtcatcgtgccgttttccaccgtcagcgtgcccatgccgtccacggcttcgttggcgtggaacatactgctgtcggtgttgaacttagcggtgtatacgccgtccggcagcgcggcagcgggggcctgggcttccgtgacggcaggggccggggccgcggtggcggcaggggcggtttcttccgtggagaccgcctcggacgtgctctcggcggtggacgctgcggacgcaccgcagcccgccagcagcagggcagcgagagtcagggatgcgagttggagctttttcatgctttccttacctcattctatacatatctatcaggcaatagcgggaggcagcgcgggcggatatggaatccgcccctacggcgtggcagggcatcacatcggacgcaggccgggcatgcccggcccctgccgtgctttcccaaaaaccaaaaaactgcccggagcttaccctccgggcagaatgggtctttctcagccgttcagggaatcgatggcggccccggcatggtcaacgtagagctgctggatgtcgccgatctcgcccagacctgcgatctgggtgtcgacgctctcaaagcagtcggcggcgttgaactggctcagccaggaatcgtcatcggcaccggccatgtcgttgttggcgtggtcaccggcgacgaccatcagcgggcgcaggatgaccttggtgtaaccggcctccttgaccttctcgataacggcatcgcaggcggtgtcctcgggctcaccctcgacggtgccgataaagacgttgtcatagcccagcgtctgcatcgcggtctgcatctggctgtagctgaccttggcggtgtgggacgtgccgtggcccataaagacaaaggcggtgccgtccgcagcagcggcagcggcgtcgtcatatccggcggtcttgacggcctcggcggtgatggcggcggctacggcctccttgtcggcgttgatgacggtggcatcttctccgacctcgcccagcaggggttcggcaatggcaacgctgtcgaacttgtccctgtactgctcaaccgcctcgcacatctcgtcgtactcggcgccgtgcatcaggtgcgtaggctggacaaccagattcttgacgccgttggcaacggcacggtcaagcgcctggtccatgttgtcgatcttctcgccgtcgcgggcctgaacgtggttgatgatgatctgcgcggtgaaggcgcggcggacgctccaatccgggtaggcggcctgcagggcgtcctcgatgcccttgatgtcagcggcgcggctgccgttgaaggaggtgccgaagctgacgaccagcagctcattctcgccgatgtcgtcggcattgcgcgggtcgtccttgccggcgtcgccggtgtcgcggccaaagtagtcggggtctgcgttctcaccctcgaccagctccttctgggtgtcggtcagggcatcccaggcagccttggcggcctcgcactgggcatcggtgtcggcgctgcgctcctgcacgtagatggcgtcgatcaaatcggcgcagttcttagcggccacttcgtctgcatctccctcgtctgcggtcttttctgcatcttctgcggtgctttcgtcggcgacggtgctcgcggcagcgctgtcagtgctcgcggcggtgctgccgcagccgaccagcagggcggcggacagtgctgcggccatggcgacggcggcagctttcctgtaggtgatctttctcatgtgttcttgcttcctttccttgtttaaagcctggagacagtacgggagagaacagcaggacacacggaaattgaccccgtaaaaaacgaggtcttttgcgtgcagaatggcaacacaaaagaccccgtattttaagcaggtgctttgcggtacaaccaattcctcgtgatctggggcggtgcgcccccgtacccggcagcaggcaggtttcctggctgaaagctcaacgcctgccgccgccttcccgggtcaaaacccagtgaccggtgcaaatgcaccctggcggcaggctcccttatcacagtgacgagatcgtgcgggatttgcacccgcttcccttttaccctttcccatgcgccgagcggcggcataaaaaggcacctgctgtcgtattcagttttacggtgtaaagtatagcacaatgcggtgagaaacgcatgagtgcgtcggtttcaattttgcctttatacgattgtgaactggcacgcccgcatggcgtccagcgccgtttggtgggactggggcgtgaccccggcgcagcagtcggacaggatttcgatttccgtctccgggaaggccgcgcgcagcaccatggcgttgctgatgacgcagatgtcggtgcagtagccgtagatgacgatcttttcaatgtcgtccacggccttgttgtgggccatcagctcgtcgaggatctcgctcggcagcatatagctgccgaaggtcggcttgttgacgatgtggcagacctcgggctcggtaccgtccagcgcgttctccagctcgggcgcaaagttccagccgtcctcgccctcgatgcagtgctccacaggcaggcggcgtccctcccgcgtggcaaggtagttgtcggggtgggtgtcccgcgtcaggaacagccagtgcccggcccgggcatgggccttaacggtctcggccaggcgggtcacgttggcctgtgcctgggggttcgccagcgcacccgtgataaagtccttttgtacgtccacaacaatatccagaatcatagcgacagctcctgtttttatagtttgctatagtttgctaccagtataccgcagacggtgcgcggtgtaaagtgcgcgtttcgctggccgcaggggtgcggatgtggtataatggaagaaaaagttcaggaggcccttcatgactccgcttgaaacgttaaaacgatatttcggctacgactccttccgccccgggcaggaggagattgtcagcgcccttctggccgggcgggacgcgctggccatcatgcccaccggcgcgggcaagtcgctctgctatcaggtccctgccctgctgctgccggggctgacgctcgtcatctcgccgctgatctcgctgatgcaggaccaggtcaaggggctgaacgcagcgggcatccatgcggcatttatcaattcgtcgctgaccgagacacagatcgcccgtgcgctggacctggccgccgagggcagctacaagctcgtctacgtcgcgcccgaacgcctggaaagcccggtgttccgcagctttgccgcgggggcggacatctcgatggtcacggtggatgaggcgcactgcatcagccagtggggacaggatttccgcccgagctacttaaagatcctcgacttcatcgacagtctgccccgccgccccatcgtgtcggcgttcacggccacggccacgcgggaggtcaaggacgacattgtctgcacgctgcggctccacgacccgaaggtgcttgtgaccggctttgaccggcccaacctctactttcaggtcgagcgcacccgccgcaaggacgattttgtcatccaatatctgcgcgaccaccccggcgagagcggcatcatctactgcgccacccgcaagaatgtggacaagctgcaggagcttctgaccgaatacggctttgcggccacaaagtaccacgcgggcctgtccgccgaagcacgccgcaaaaatcagaatgacttcatctacgacaccgcgccggtcattgtggcgacgaacgcctttggcatgggcattgacaagtccaacgtgcggttcgtgctgcactacaacatgccccagagcatggagaattattaccaggaggcgggccgtgccgggcgtgacgggctgccgtcgcagtgcgtgctgcttttttcggcgcaggacgtcatcatcaacaaattcctgctggacaaaaaggattttgccgagatggacgacgaggaggccgaccttttgcgccagcgcgacctgcagcgcttgcagacgatggagcgctactgccagacgacggagtgcctgcgcaactacattctggcctatttcggcgagcatcccaccgcgccgtgcggcaactgcggcagctgcaacaacgattttgacgaggtcgatatgaccgacgccgccaagtggatgatcaactgcgtggccgagctgcgcgggcggtacggcaaagcgattttgttcggcactttacaaggcgcgaaccgtgcgcgtctgcgggagctgggagccgagcgcttcaagagctacggccggatgaaggacaccccgcgcgagacgctggaacgcctgctggcccagctgctggaggatggatatttggtgcagagcgacgaccagtacgccgtgctgcacatcggggatattgccccgctgaaggccggcgggcaggtgctggtcaagctgccgccgcagcgtgagccggagcagacccgcgcaccgaagccgaagcgccgcagcccgatggacgcgctgacgagcgccggtctggagctgttcaaccagctgcgccagctgcggttcgacaccgcccagcgcgagggactgccgccctacgtcgtgttcggtgacaagtcgctggtggatatgtgcctgcgcgcgccgcgccgtgcggaggatatgctgggcctctacggcatgggtgagcgcaagtatgaaaagtacggtgccgcgttctttgcggtcattgacgcctaccgcgccgaccaccccggcgccgttttgagcctggacccgcccgcaccggagccggaaaagccgctgccgtccgagaagaagaaaaagccgccgaaggccgagcgccccgcgttttacctgacggcggaggacgcgcgcagcttcaactatcaggacagctataccggcgcggagctgaaggccgcgctgatcgaggccgccggtgacccggatgtgaaggcaccgaccatcaaggagatcgacgagtggctgctggcgcagcggctcatcggcatagagcgtctgccgacgaagggcttttactacgtgccgacccctgccggtgtggacgccggtctgcgcagtgaggacaaggtcagcgcccgtggcacgccgtattcagtgctgctgtttacgccggaggcgcagcggatggtggtggagcactttataaaatcagaggtttccccctcgggggaagctgtcaccgaaggtgactgatgagggcgaagtttacggctgcaatccgtttgcggacggttatggcacgcctttccctcatccggccctgcggggccaccttcccccaagggggaaggcttagggctttttcgtcatcttgtctgtactgcgcaaattttctttgtcatattcgtcgattgcggattttttgacacgatgttaaaatgttagcagagaccgtataccaatttataaggagcaccccatggacaacgtgaaaattctcgaggtcaagcagagcatctttgcctccaacgacgagcaggccgccgcgctgcgggctgagctgaagcaggaaaaaatctttctgctgaatttaatgagcgcaccggggtccggcaaaaccacgacactgcgccgcacgattgctgcgctgcaaaatgagctacgcatcggcgtgatggaggccgacatcgactccgacgtggacgcccgcgccattgccgagaccggcgccaaggccattcagctgcacaccggcggtatgtgccatctggacgccgagatgacccggcagggactggccgggctgggcaccgggggtctcgatttggtgattctggaaaacatcggcaaccttgtctgccctgccgagttcgacaccggcgcggtgaagaacgcgatgattttgtcggtccccgagggtcacgacaagccgctgaaatatccgctgatgttccaggtctgcgacgtcgttcttgtcaacaagatcgacgtgctgccgtattttgactttgacatggacaaatgccgcgagtatgtggccctgcgcaacccgaacgcaagggtcatcccgatctgcgcccggacgggcgagggcattgacgaatgggccgattggctaaaagagcaggtcagggcgtggcaggcgtaaataatccagccgcgttgtaggggccgcacatgtgcggcccgcggccttgccgcaatcgcccgtccgccatttacaaccgggccgggcatgcccggcccctactgtgcaaaaaacggagcaacggcacaaaaaaggagcacaccatgagcaaacccactgcgttcccgctggatgagagcaggctgcccttcgagattccgagggacgagccgtaccgcgagaaaattgccaggctgggccagatgatcacggaccgcctcccagccaaaaagggcattctgacgaaggatgaccccgaatactggggcctggcgtccatcgtgaccgacgagatggcggacgttgccttaaaaatgaaggtccgcaagcccatgaccctgcccgagctggtcaaagccacgggcaagcctgccggggagctggagcctcttttgcagcagatggccgtcgtcggtctgctggagtacaactgggagaatccccgccgcgaaaagcagtacatcctgccgatgttcgtgcccggcagcgcagagttcttcaacatgaacaagcagcagattgccgaccaccccgaggtgacagccttctttgagcggatgacgtttttgccgctggagcacatcaccgccatggtgccctcgggcggcgcaggcatcggtatgcacgtcatcccggtggaaaaagccatcgagaccgagaaccgatccgccgacattgagcacatctcgcactggctgaaaaagtacgacggcaagtatgccgccggtccgtgcagctgccgtatgtcccgcgctgccatgggcgagggctgcggcgacgaccccgacgactggtgcatcggcgtgggcgatatggccgactacctcgtcgagaccaacaaggggcattacgtgacttacgatgaggtcatgcagatcctgcagaaggccgaggacaacggctttgtgcaccaaatcacgaacatcgacggcgagaataagatttttgccatctgcaactgcaacgtcaacgtctgcaatgcgctgcgcacaagccagctgttcaacacgccgaacatgagccgctcggcctacgtggcgcgtgtcgagccggagagctgcgtggcctgcgggcgctgtgtggagtactgccccgcgggcgcggtcaagctgggccagaagctctgcacgaaggacggccccatcacctacccgaagcaggagctgcccgacgccgtgaagtggggccccgacaagtgggccatcgactaccgcgacaagaaccgcatcaactgctatgacaccggcacggccccctgcaagacggcctgccccgcgcacattgccgtgcagggctacctgaaaatggccgcgcagggccgctaccgcgacgcgctggcgcttattaaaaaggagaaccccttccccgccgtctgcgggcgcgtctgcaaccgccggtgcgaggacgcctgcacccgcggcaccgtggatcaggccgtggccatcgacgccgtcaagaagttcattgccgagcaggacctgaacgccgcgcaccgctacgtgcccgacgttgtccagccgtcgctgcagggcccgtggccgcagaagatcgccatcatcggcggcggccccgcgggcctgtcctgcgcctattttctggcagtgcagggctacaagcccaccgtgtttgagaaaaacgagcgtcccggcggcatgctgcgctacggcatcccttcgttcaagctcgagaaaaacgtcattgacgccgagatcgacattctgcgggagctgggcgttgacatccgctgcggtgtcgaggtcggcaaagacgtcacgctggccgagctgcgccgacagggctaccgggcgttctatatcgccatcggctgccagggcgggcgccgggccggtgtgcccggcgaggacgctgcgggcatcgagaccgccgtccatctgctgcgcaccttcggcggtgacgagagccgcaaaataaccggaaagaccgtcgtcatcggcggcggcaacgttgccattgacgcggcgcgcgtgtctctgcgctgcggttccgacggcgtgacgatggtctgtctggagccgcgggacaagatgccggcctcgccggaggaaatcgccgaggccgaggaggagggcatcaaaatcacctgcggctacggcccgaaggagttcctctccgagaacgggcatgtgaccgccgtcgtgctgaaaaagtgcaccggcctttacaacgcggagggccgttttgcgcccacctacgatgaaaacgataccatcaccctgccgtgcgacaacgttgttttaagcatcggccagtgcatcgagtggggcgatttgctgaacggcgaggccgtgcagctgggccgcggccagggcgctgtggccgacgcgctgacctaccagaccgcccagccggacattttcgtcggcggcgacgtctgcaccgggccgcggtttgccattgacgcgattgctgcgggcaagcagggggcaatttccatccaccgctttgtgcagcccaacacaagcctgacgattggccgcaaccgccgcgacttccacgagctggacaagtcgaatctggcgctgggcgagtatgaccgcgcaccgcgccagtccgccgcactggatgcgggcattgacgcgcaccgttccttccgcgacgcgcacctgacgctgaccgaggatcaggtcaaaatcgagacggcgcgctgtctgggctgcggtgccagcgttgtggacccgaacaagtgcattggctgcggcgtctgcacgacaaagtgcgagtttgatgccatccgcctgcaccgcgacctgcccgagtgcagcaagatggtcaggagcgaggacaagttcaaggccattctgccctacatggcgaagcgcgagatcaagctccgctttgccaagaaggagaagtaatgcacgagcttggcattgtattccacatcatccgcacggtggaggacgtggcccggcagaacgacgtgacgcgcatccggcgcgtgacgctgcagctgggcgaggtctccggcgtggtggagagctacctgcaggactgctggaagtgggcggcggcgaaatcggagcttttgcccggcgcggtgctgaccgtggagaccatccccgccgtgaccgtgtgcgaggactgcggccaacagtaccccaccgtgcagtttggccgcacctgcccccactgccagagcccgcgcacccaccttttgcagggccatgagatgttgatcaaagagatcgaggccgtggagacaggacccaccgccccggaaagagcgtgaagctgcatgaaatacaaaattttccgcatcgaggaacagatgtacggctgcgaggagccgcccgccgaccagccgattctggttgacgtagtgctggaaggtgctgacggcacgcggcgcgtgctcccctaccccgacgaagcgctgcgccgcggcggaatggaggaaggcgacagcgtcgatttgaccgacggcatccttcgcaaggtataatttccccaaaaccaaaaggggctgttgcgtgtgcagcagccccttctatgttttttacaaaggttattcttccgtagaaatatcgcggccaaagtatttttcgctcaatgccttcagcgtgccgtcggcgcgcagctcgtcaatggcggcatcaatggccgtgcgcagggtggcagtctcgtcgcccttgcgcatcgggatggcgatctggttcgcatcgtcggtcagcacggcgatcttcacattcgcgtcggggtgctccttcgtgtaatcgtagaaggtcatctcggcgttcagcgtcgcgtcgatgcgcccgctcagcagcagctcaaacgtctggttcaggtcgtcaacgcccgtcaccgtcgcgccgtactgctcggccagctcggcgtaggtgctggagatcgtgtttgcggtctttttgcccttcaggtcctccagcgtgttgatgctgtcatcgtcggccttggtgatgacggcggtgcggttgaaggcgtagggcgtcgagaagtcgtatttttcggcgcgttcgggggttatgtccacgccgttgaccatgatgtcatagcggcccgcgtccaggccggccagcaggccgtcccactcgccctcgacaaactgcggctcaacgcccagcttcttcgcgatctcggtggcgacctcgacgtcgtagccgacgaggttgtcgttttcatcgtggtaggtccagggtgcccatgtgccctccatcgcaaccgtgatggtacccttggcctggatctcgctcaacaggtcgccggacgcggcctcggcggtgctcccggcggcggattccgctgcgggcgcggtggtggcggcgctgctgccgcaggcggtcagggccagcgcggcggtcagggtcagggcggtcagcttggtcaggttcttcattacaataggctcctttgcttgtaggtctgcaaaaattctttggtgcggggctgctgcgggtcgttgaagaacgcctcggcggtgttctgctccacaatgacgccctgctccatgaacaccacgcggttggccgcatggcgggcaaaatccatctcgtgggtcacgaccagcattgtgcggccttccccggccaggctgcgcatgacggccagcacctcgccggtcagctcggggtccaaagcggacgtaggctcgtcgaaatagatgatctccgggtcggcggctatggcgcgggcaatcgccacgcgctgctgctgcccgccggaaagctggctggggtagtagtcggcgcggtcatccatgccgaccttgaccagtgcggcgcgggcaatctcctcggcccggcggcgcggcattttgcgcgcgatgataagcccctcggtcacgttttgcagcgcggtcttattggcaaacaggttgtagctttgaaagacaaaccccgtgcggcggcgcagggcgttggcctcggcgtgggtgacgcgggccaggtctacgcgctggtcgtcaaacagcatcgtaccgccgtcggacttttccaaaaagttcaggcagcgcagcatcgttgtttttccgctgccgctggggcctaaaatggcgacgacgtcgcccttgttcacgtccagatcgatgctcttgagcacctgcaaatcgccaaaggacttgcgcagatttctgatttgcagcatagttcagctcctttgtgcgcccttgctgttgaggtaccgctcgccgacggcctgcaggcgggtcagcacggtgcaaaacagcaggtaaaccagaccgacctccatgtagagggccagcggctcataggtgcgggccacaatgcgctgggtcgtcatgaacatttcggtcacggtgatgttcgcggccagcgaggtatccttgaccatggcgatcagcgtactggccagcgtggggaaggccgtgcgcagcgcctgcggcaggatgatgcggcggatgatctgtaagtagctcatgccgacgcactgccccgcctccatctggcctttgggcacggattccagcgcggcgcggatggtctcggcgcagtacgcgccctcgttgatggaaaagacgagcaccgccgcggggaacggctcaatcaggatgccgacgccgggcaggccgtagaacacaacgaacagctgcaccagcacgggcgtgccgcggatgacccagatataaaaccgggccagccgctgcaaaacgggcacatgggcaaactgcaccagcgccaccgccaccgcgatgataagcgccagcgtgaacgagatggcggtcagcgggatggtgacggtcaggccgggcagcaatattttaccaaaggaatccacaaggattccccacaggcgttcggacatggggcggaactctccttttttggttggggttgcgggaatatttcccactaaaacggtatgctatgagattgtagcacactttgccggattttgcaagagtgaaatttgaagtgaagtttaaggttggagcaaaaaagcctcccttgtcaaagacagactcccccgtgccgggggaggtggcgcgtagcgccagaaggggagcaggtggacgccgcagacgggcaggaatccctccgcctcgcaggctcggcacctccctttgacaagggaggcttttcgccacggggcggtgccccgcggcgtgcctggggaatgtggtgcggctgcccggatggcgtaggacggcgcaagcgggcacggcggccagagggctggccgccctacgttcccctttttcggtaggatgtagggcggggtgcccccaccccgccgaagttggcggcaggcagaatgcaacgggattggcagaccgtaggggcggattccatatccgcccgtgggagtgtccgtagtagaaatggaattgagtgaaaccacaacaaaaacacaaaaaatcccaccgccgggtaggtggtgggattacattaggcactcttaatcatttagcagcgacagcagtgtcgttatacttatttgcgaccacagcagtaacgccagtcgccgtattacgctgggggtcatcatactttgctgcggtagtgccgctagcggcatggtaagttaccgtccaagaagcattagagtacttaacagtggataccgcgccatcttcgccgactgttgcttcccagaagccagaaacttcggccaatttccgaatttcttcatcagttgttttcttggtcaggtcaaccgtcgtaactttgccattttcgccatacaaagtggtggcttcagtctggatagccataacagccatacggcactcagcaacaaccttctccttgttcgccttgtcgatgtagccagtcagagccggaaccagcagggcggccaggatggccaggatgaccagaacgacgatgagctcaaccagggtgaagcccttcttgttcttcattttacgaattttctcgaacatgataaattcctccaataaattcagtaaggacatcgtacgtcctcatttgtgaaaatataatatcacataatctgccaaatttcaacagccttatgtaaaaacagcaaaaaacatttttttgcttctattttcaatttcccaccgctttgcctgttgtattccaaccgtcttgccgtggctgcacctctaccgccgcgcggaattctatacatattaccgtcatttttaaaaatcagctgcgccgtcacgccaaaaaacgcggccaacactgccgccattgaaaccgcacatatattgcgtctattttatctgtgctgtctctgtcggtgcgggcagcagagcgcatcgcgtatggatttcagcgcatataggccaattttacaggcgggcaatttttgtgctatttttgcattttcccgtgtcctccctcccctgcccggctgcaggggtgctccctttgtgaacataccgcaaaatccggtgcaaaagtgtggtatactgcaagattttgtgctatactggataaaaaatcaacacagccgggccgcgcccggcacaaaaggggccacacatgaaaaacaccaccgaggaaaaacgcgaggccatccccaacagcgtcagccggatgctgctggcgggcatcggcgtacttttgcaggttttatggatcttctggcttgccctcaagctgaacgactactccaccgccattcaggtatgcacgtcggtactgacatttttgattacgctgcgtatatatgggctgcatatcaactccgcgtataaaatttcgtggatcattctgattttgctgtttcccatcttcggtctgaccatctatctgctgtttggccgcagcggggccgtcagcgtcatgcgccgccgtttcgggaaaaatatgacgatgctgcgccggtatcacgcacccattttgcagcagcgccgcgccctgccctgcccggaccgcatcacccgcaaccacgcccgctatttgcaggaccgcgcgggctatcccgcctatgacaacaccgatgtgacgttctacggcgacacctgcgaggcgctggaggcccagaaaacagccctgcgcagcgcggaaaagtttattttcatggaataccacgccattgaggacgcctccgcctggcaggagctggaggatattctggccgagcgcgccgcccacggcgtggaggtgcgcgtattttacgacgacgtgggcagcatcgggtttatcaacagcaaatttgtcaaaaagctggcggggcgcggcatacagtgccgccggttcaacccggtcatcccgattttgaacgtctttatgaacaatcgcgaccaccgcaaaatcaccgttgtggacgggcgcgtcggttttaccggcggctacaatctggcggaggagtacttcaaccgcacccacccttacggccagtggaaggacagcggcatccggctggagggcgacgccgtgcgcggcctgacgctgattttcttagagctgtggggcgcaacgcagaaggccgcacccgaggtcgagcgctatctgcccgatgtgccctacaccgcgcgggagaatgccgtggtgctgccctacgcggacaatccgctggacgacgaggccaccggcgagaacgtctacctgaacatgatccgcagtgcgaaggactacgtctacattacaacgccctaccttattttaagtgacgagatgcagcgcacactgcggctggccgcgtccagcggcgttgatgtgcggatcatcacgccgggcatcccggacaaaaagctgatcttctcggtcacgcgcagctattacgccagccttgccaagagcggcgtgcgcatttatgagtacgcgcccgggttcatccacgcgaagcaatgcgtagccgacggcacggaagccgtagtgggtacgatcaattttgacttccgcagcctgtacctgcactttgagaacgcctgctggttctgcggctgcagcgccgtggccgatgtgcgccgcgattttgacgcgctgttccccgtctgccgcgaggtcacgcaggagtacgccgacacccgcagcctggccgtgcgcggctgggactgcgtgctgcggctgttcagcccgctgatgtgacgggctgtgtgccgggcgcggcaagtggaattttcccaaagaaatctgtactattccacgttgcaaaccgccgctgcgcgccgtacaataaagacaaaatccgggctgtcgaaaaacgcttgtaggggcgagcatcgctcgcccgcgcccgtttgccttgtaagaaaaccttcccggaaaatgcgttgctgcggtaagttgacgggcgaccaatggtcgcccctacataagcaagaaggcaagaatgcaattttttgacggtctgaaaatcatcctgtgaggtgcataccaatggagcatatagcatggaagggccgcatcaagcccggctgcaaagcggaatatcagcgccgccacgcggagatctggcccgagatggtcgaggtgctgaaggctgcgggcatctgcaactacagcatcttctactgtaacgacgagctgttcggctactatgagtgcgcgaagggcgttgcctacgccgagaaggtacaggccgaaagccccgttgtggaccgctggaacgactacatgaaggacattctggagctggaaatggaccccgtgaccggcgcccagcccaagctggagcaggtgtttcgtctggagtaaacgcgcataagacagcaaagccgcccgtgtcaggctgacacgggcggcttgtgtttttatgggcaggtgcagcgcaggcggtgttgcctttagggtatttacaacacgatgcggaacgcgacgcggtgctctccttccccgctgacgcggtaaggctcctccacatcggtgccccagctgtcgatgccgccgacgccgcgggctgcgcccaggatcgtcacgctcgtgcggcccgtggcgggcagctcggtgatgtgctgggcggcctcgatctcctgcgcggtgttgggcagtgcgctgaaggcaaacggcgcgtcggcctgttcaatcgtcagcgcagccgccgtctgaccgcaggcgttgtgctgctccagcgtgaactgacgggtgcccacatgcaggccgcagtcctgcgggacgagggccggctcaatgtgcggcacctcctcatggcagccaaagacgccgcccttgcagcgatccgggtaggtctcgcccgaaaggccggtccagagcgtgcgggccacgggggcaaacgtctggaattttacgccgaagcagggcagctcgggcgcaccgggcacgccatgatagacggcctcgaccagcagcgtgccctgcggctccacggtgtaggtcagctcagccttagcgccgggcacggtgggcacgccgtaggtatagcgcacctgcacaccgtcggcggatttccgcaagaccgcaaagccgagattctgcaggtagacatccgccgccagccaggccgccgctttctgcgggaagccgcagccgcggtcattgtcggtggcggcgcgccagaacgccgggcgcggggcgcgccagagccactcgctgccgttgacggtcagcgacgacggcccggcctcgcccgcggaaaagagaatttcaaacccgtcgcccctgacgccgaggttgccgtcgccctcggtcacggtcaacgtgccgggcttgcgggcggcctgtgctttggccgcgtcgcggtccgcccgggcggcggctgcagcgttgcgggcatcgtgggcggcgcggcgggcgggggtgtcgtaccagtagcgcacgtcctgcatggcgggcttctcggcaccgtcggcgtagacaatgccgttgccgctgaagttgtaatcggtgttgcggtccgcaaagtcgccgccgtagcccagcacgctgcggcccagcgcgtcggtgtgccggagcgcctggtccatgtagtcccagatgaagccgccctggtactggtcgaactcgtcggccaagcgcacatagctctccatgccgcccagcgagttgcccatatcgtgcatatactcgcagagaatgaagggcttcttcgggtgggattcgagatactcgcggatttcccacggcttggcgtacatccggctttccatgtcgctgatggcgtcgaacgcgcggcaatggaacacaccctcataatgcacgaggcgtcccgggtcgtggtcgtggaagaactgcgacatggcgagaatatcctcgcccgcgtagctctcattgccgcaggaccagatcaggacggcggcgtggttcttgtcgcgttcaaacatgctgcgggcgcggtccacgacgcagtccttccactcgggcaggctgccgggcacgttccagctcggctccaccgcgccgagcttctgccagctgccgtggctttcaaggttcgtctcgtcgatcatgtagatgccgttccggtcacacaggtcataccacaggctctggtcggggtagtggcaggtgcgcacggcgttgatgttgttctttttgaacacggccatagcggcgtgcatatcgtcggcgccgatggtgcggcccctgtcggcgttccactcgtggcggttgacgccgttgaacacgacacgttccccgttcaggcacatgacgccgtttatcatctcaaagcggcggaagccgatgtcgtagggcacaacttcctgcaaaacgccgtcggcatcgcgcagggtcagtacggcgtggtagagcaccggcgctgcatggctccacggctggatgccctcgatctcgatcgtatcgcccgcggcggggccttcgtagacggcgtagccctcggggtcggtcacgacgagggcagccgacgcgccgtcggtctcgccgtccagcttgacgaggggcgtcagcaggccggtggtgttgtcggcggcaaggtcggccttgagccagatgtcgttgatgtggaccctgggctttgcgtacaggtagaccgagcggaagatgcccgagaagcggaagaagtcctgatcctcgatccaggcggcgctgctgcgcttgtagacctcgacgcagaggcggttgttctcgtcccgaatgtacggtgtcaggtcaaattcagacggggtgaagctgtcctcggcatagccgacgaactggccgttgcaccacaggtacatggcctgctccacgccctgaaagctgacgcagacgcgctggccgcgcagggactcgtccagatcaaactctttgacatagctgcccacggggtcatcattccaatcgacctgcggcgggcgcaggcagctgcggccatcccacgggtagagggtgttggtgtactgcagctgaccgtagccctgcagctcgatgtgcccgggcacgcggatcgtgccgaagccggacaggtcggcgtccggctgccagaaatccgccgggcgggcggcagggttggcactccacgcaaagcgccatgcgccgtccagtgactggcgcagcgatgtcaggccgctttcggcctcgtccaaggtgcggcagcagagatggtcagagtgtgcgtccagccggttcacggcaaagacggtggggtcactcagccagcgaagttcaggggtcatagggatctctcctttacacaatcaggttcttaccgtcattctgccacagggcgcgcggggtgtcaatggaaagtttcacgcagatattttccgtattttttgcatctttacgggaattgtgctgtgtttaacacttcgcggcaggattttttgagtttttccgttttgtctggtggcagattgtacgttgcagcaccagatatagcggtggcggcaggatttttgcggggtgggttgttatagtcggcacacctggggcgcaaaaaagcgccgacctttttgcaggggcggcgttttggggtcatacttcttctgtctccgcctccgcggcggcgcgcagacgctcccgcacggggcgcagggcctcgggcagagcctcgtcgggcagatcgctgatgccctcggtgctgccgcgggcggcagcggtctcatagaaccagcacttgtagtccagggtgtccatcgtctgctgcaattcggccatgcgggtctcgagcacggtgcgctgcttgcggaacagctccagccgccgggcaatggtctcatcgccctgcatggccagctcgatgtattcgcggatgtccttgagggacatgccggtctttttcaggcactcgatgatgcgcagccactcgaagtccttctccgtaaaaacgcggatgccgccggacgagcgcccgacgaagggcagcagcccttccttatcgtaatagcggatcgtcgatgcgggcacacccagccgccgcgccatctcccccactgtataggccatgtgttttcctcctatgacttaaacccaggtttaacctgtgtatcagtataggacaaaagggcggcgttgtcaaggcgggcggggtcacccgcggtattttcccctcatctggctgaacggtttcctgttcttgcgcacgccgcggggcgtgccgccgttcccctgcccgcttttcttttatagggaaggctttttctattttttattgacaaacgcgcggtttgtttctatcatgttcatataagcaagggagggaccgccactatgctgacctataatatggatgtggaggaacgcagcacctggctgcgcgccacccccggcgcggcggcgctggcacagccgttttactgcaccgaggccggcaacttttatggccgcgcccattttgccacggcccgcactgataaggaaagctatctgctgttttatacgctgtccggctccggtctgatcgagcagaacgaccagcgcgtggagctgcccgccggcagcgccctgctgttgaactgccgcaccccgcaaagctactgcactgcccccgggcaggatcactggcaccactactgggcgcatctggacggcgcgggcgtcgccaatctggccgaggtactgcagccgcaggggcggctgtcccccgttacggtcagtcggctggagatgcagccgctgtttgagtcactggccgccgagtgggagcacggtgccgccgcacagatcgagatctgcctggtcctgcaccggatgctggccctgatggcccgccagctgctggccggggacgagagccgctctaaccgcaccttgatcgaacaggccgccgagtacatccgccagcactatgccgagccgctgtcgcttgacagcctgctggcccagacgccggtgagcaagagctggttcctgcggctgttccgccagtacatgggcacgacgccctacaattttttgctgtccacgcggatcacacgcgccaaggagctgctggtgctgacggatttctccgtctgcgagatcgcgcaccaggtcggctttggggatgagagcaacttctcgacccgctttaccgccatggtgggccaaagcccccagcagtaccgcaaaagtgcaatgaagcccgcggaaaactgaattaaggaattatgggaaagaaggcatttgtatgttgaaaaccgaacgcatggaccgtgtccgtgccgccctgcgcgcgcagggactgacgcagatgatcgtctgcgaccccaagagcgtgtggtatctgaccggcgtcgccgtggagccctatgagcgtctgctggcactctacctgcccaccgagggcgagccggtgctgtttttgaacagactgttcaatgtgcccgagcctccgtgcaggaccgtctggcacaccgacacggacaagcccgtggcgcagatcgccgaggtcgtggacgcgggcaggccgctgggcattgacaaggagtggcccgctaagtttctgatcccgctgatggagacccaccccggtatgcaggtcgtgctgtccagcgactgcgtggacgactgccgcgcctgcaaggacgccgaggaacaggccctcatgcgcgaggcgtcccgcatcaacgacgcggtaaacgaggccgcgaagcactatataaaggccggcatgaccgaacgcgaggtcgccgagtttatcgacgcgcagttccgtgcccacggctgcgaggggccgagctttacgacgattgtctcctttggtgccaacgccgccgacccgcaccatgagccggacgacaccgtgttaaaagagggcgactgcgtgctgtttgacatgggctgcgtgaagagccgctattgcagcgacatgacccgcacctggttctgcggccagcccactgaaaagcaggccgccgtgcacgatctggtgcgccgcgcgaatgaggctgccgaggcgctcatcaagcccggcgtgcgcctgtgtgagctggacgccgccgcgcgcgacctgattacggaagcgggctacggcgcgtatttcaaccatcgtctggggcatttcatcggccagaccgaccacgagaagggcgacgtcagcagcgcgaacaccgccgtagccagacccggcatgatcttttcgatcgagccgggcgtctacctgcccggcgaattcggcgtccgcgtggaggacctcgtcctggtgaccgagaccggctgcgaggtgctgaacaggaacgataagcattgggatgtggtggggaaataactgccgtcatccctgcctccccttgaggggaggtggccccgcagggccggaagggtggctggcagccgacctataaaagggttgctgcggcccacccctcaccgcctgcgggcggagctcccctcaaggggagcctaaagaatttcagagaggtgtacgattgaaaaaacatctgttccgtatcattgccgtcctgtccgccgcggtcctgctggcgggctgcgcggcgtcgcggctgcggctgggggctgcggctgcaggcggcgtgtacaatgcgtttggcaccgccatgtccgcccagaacagcgccatcgaggtcaaacagaccgccgggtccgccgccaacctgcggctgctggcgggcggctatttacagctggccgttgcccagtccgacatggcgcaggatgcctacgacggcagcggcatctttgcccacgagagcaccgagcgcagcttcagcgccgtggccgccctgtatgaggaggccgtgcaggtcattgtccgggccgactccggcattacgacgctggaggaactgcagggctgcacgctcagcgtcggtgaggaggaatccggcaccgagcagaacgccgggcaggtgttggccgcctgcggcctgaacaaccgcctggtacacactgtaaacctgaactacaccgacgctgccgcccggctggccgacggcacgatcgacgcaatgttcgtcaccgccggtctgcacgccgacgcgctggagcagctggccaagacctgcgccatccgtctgctctccgtcgatgggggtgtcggtgcgcggctgctggcggcctacccggcctaccgcgcctgcgttatccccgccgggacctacgccggtcagggtgaggacgtctggaccgtcagcgtgcaggcgcttctgctggcgtcgaacgcgctgtccgacgagaccgtccaaaggctgactgcccggtattttgacagcgtggacgccgtggccgccgccgtgccggtgccgctggtgaccgaccccgccgtggccgccgcgcagagcgttatcccctaccacaccggggccgctgcgtactacaccgcgcagggcatcacccccgcagggccggagacgggcgcgtcccctgaacaggaggccgccgcatgatcatctcactggatatgtaccagacgctgtttgcggcggtctgcgtgctgatgctgggccgctttttgaaggcgcgcatcggctttctggaaaaattctgcattcccgcgccggtcatcggcggcgtgctgtttgccgttttcacctgtctctgctatgtgaccggcattgccgagtttgaatttgacgatattttaaaggaagtctgcatggtgttcttcttcacctcggtaggctttcaggccaacctcaaggtgttgaaaagcggcggcaaatcgctgattatcttcttggggctggtcgttgcgctgattttgtgccagaacttcctcgccgtcgggctggcggatctgctgggcatctcgccgatgatcggtctgtgcaccggttccatcccgatggtcggcggccacggcacggcgggcgcgttcggccccgtgctcgaggacttcggcgttgcgggcgcgaccacgctctgcacggcagcggccacctacggcctgatcgcgggcagcgtcatgggcggcccgacgggccgtctgctcattgagcgccgcaagctgctggacaccgttgtggccgaggacgacagcctgctggtggaggaagaaatcaagcacgagcgccacaccagcatgtacccggctgctgtgttccagctgattatcgccatcggcatcggcacgttcatctccaaggcgctggccatgaccgggctgacgttccccatttatatcggcgcgatgatcgccgcggcgtgtatgcgcaacatcggcgaattcacccacaaattcacgacccacatgggcgagatcaacgacatcggcggcatcagcctgtcgctgttcctgggcattgccatgatcacgctgaagctgtggcagctggccgcgctggcgctgccgctcatcatcctgctggcgggccagacgctgctgattttcctgttcacctactttgtgattttcaacatcatgggccgcgactatgacgctgcggtcattgcagcgggcgtctgcgggtttggcatgggcgcgacgcccaacgccatggccaacatgcaggccctgtgcgaaaagtatgctccgtcggtcaaggcgtatctgctgatcccgctggtaggcagtctgtttgcggacttcctcaacagtctggtcatcaccttctttatcaactttatctaattgggaggtctttctgatgttccgcaagctgcgcgaggcgctgaaaaagcagcgctaccgtgtccacagtgacgatgttgccctgcccgaggtccacaccggccagattgcccacagcgacgcccccgagaccccggagaagcacaagtccatcaactatgaaaacgtcgccatcccggaggttcatattccaaagaagaagccctgaagccttctccccctgggggagaaggtggccccgcagggccggatgaggggagagcttgccgcggttgcccgcaaacgggttgccacagagggttcggccctcatcagtcaccttcggtgacagcttcccccgatggggaagcctttttgtacagcaaaacgcccctgaccattcggtcaggggcgttttgcccgtaatgttagtcgaggaagttctcgttgagggtgacaccgaagtcgtgggcaatggcgcgcaggtcatcgtcggtgatggtctggcggatcaggccgccgcccatggacaggaccttgacgtagatctcggcactcttttcaatcgtgtgggcgaggccgaaggtgatgtcaaagtcagggccggaggcaaacaggccgtgctgtgcccagatagcggcctgataggttttcatcttctcggaggttgccatggcgatgtccgcgccgcccgggaccatccaggggcagacgccgacgccctcggggaaaacgacggggcactcggtagcgctctgccacagggcgcgggagaagtcacggtccgtcagcggcaggatgtaggtcagcgcaatgacgttggtggcgtggcaatgataaataacgcggttcgcgccgttggtagcggccttgcggacgctgtggttcatgaaatggctggggaactcggacgtcgggcgtgcgccgtcggccagaccccaaacgatgcgccagctgtcgcccttgtcgttgatctccacaatgccgatgctgtggatcgggtcaggctcgacgttgcggaagaacttgccggagccggtggtgatgaagtactcaccggccagattatcggcctgcacgcccatgttgacccactcgcgcggctcggcgtcgaagtagggacggcaggcggcgacgtcctccccggtcatgcggtaggtcaggttgccgccgttgcgctcgtgccagccctgcagccagccatcgttgcacatgcggataaagcccttgacgcagggaatttcataaatcgtagacataatttctgctcctttatatcgttgtgttggcttccccctccgggggaagctgtcagtggccccgaccactgactgatgagggcaaagctaccgacagcagcccgttaccgggcaattgccgcaaggccgcccctcatccggcctcgggcggggcctcggccaccttcccccaagggggaaggcatcccgaaatcagcgcgtgatcacatccaccggcacgttgaagatctcggcaaccttcaaaatcgtgtcgatgtggtggccggtggcggcggccatgtggtgggtggggccggcctcgctccagcggttgacgaactcgcgggcaccgcagctgaagcgggtgcgcatgttcgtgtcaccgaaggtgaagatcgggccgggctcgttgacgccctcggccacgacaaacttgaagtggccgtccttgtcctgcgtgatagccagataggtcacatcgcccaccggcgggtagaactgggtcaggtagccgccgccggtcttgccgtggaacacgggcacgatcttcatggtcggctttttggctgtggagatgtcggcgtcgccggagccggagtggccgatgatgcagatgtcctcattgaagtcgatggagtacatctcgctcagctggccgcagcccgcaatggtcttgaggatggacatggccatggcgaccttgatgtcgccctcgacggcgcaggccgtgccctgcttgatgagcatcgagaacgcggggatcagcatcgagtccagcttaccggccacgcccttggcgaagccgtcgtagtggctggcgacgaaggcgatcttctcgtccctgacccactgctcaaatgcgacaacgtagcgggccatatcccagaccttctccaccgtgccgccgccctcaatatcgaaggtgtccagaatgtcctgcgccttggcacggatggcgtcctcgtcggtgatgttgtcggcgatggcccacatcttctcccagtcaaactgcttggtgtagagccacatacggttgtacaggttcgtctcatcgatgtacagatccatcataccggggtacgggcggccgatctgcgcaaggttcgtatcacggaagcggcggcgcacctgcgcggccttgcaccagtcgttgatttcggcctgcacggcggggtcaccgccctcgacaacgccggtgatgacggcgtggcgcttaccggcgcgctccagatcagcgaccatctcgccgacagcgccgcaggcgtacagctcacccagccaggtgggggtgtcggtgttggcgtagtcgggggccttcttcttctgcacgttgacgaggacgacgggcacgtcgaggtcgcgcacggcgggcagcatattgtaagaggtagcgtaggtcagcagctgcagaatgacaaggtcaacgtcggcggtgcggaacttatcgcccgcggccatggactgctccttggtggtgacgatgccgccgtcgatgacctcgacggtgtcgggtagcgtctttttgaaggcggcgtactggccctcaaactcggggaccagcgtggggaactgcggcaggtaagcgcccagcgcaatggcgaacacgccaacgcgggctttggtttcgactaacatggtgggacctcctgtatatggatttgttgtgatgtgcgtgtaggggagggatttatccctcccgggaagtatacggtgtcgggcgcgggcacgggagggtcaagaccctcccctacaaaccgggggtgaacggcaggctggcggcggcatgagggcatgccgccctacggttggatgtagggcggggtgcccccaccccgccgggtcgtttactccggctgatactctttaatttcaaagctgcgccggatggcggcgcgggcctcggccaggtcggcaaaatcaccgctgtggatgaactgcaccatcaggttgcccagcgccgtgccctcggtggggcctgcaaacacggtcaggccggtggcgttggcggtctgctggttcaggtagccgtcctggctgccgccgccgacgatgttcaggcttgtgtaggtcttgccggtcaggctttgcaaggtctccacggcgcggcggtagtcctgcgtcagggagttgtagacgcactgcatgacctcgccggtggcggcgggcacgggctggtgcgtgtcggcgcaggcagccctgacttcttcgatcatggaggcaggcgctaagaagcggttgtcatcggggtcaacgcagctggggaagtcggcggcctccttcgcggcggcgatcagctccgggaagctcgggcgggtgccggtcttttcgccaagctcacggcggacggactggatcatccacaggcccatgatgtttttcaggtaacggtagcggtattcatagccgccctcgttcgtaaagttggcggcgcagctgttcgggccggtgatggccgctgcgttttccacgcccagcaggctccatgtgccgctggacaggtaagcggcgtactcatcccgcgcgggcacggcgaggaacgccgagccggtgtcgtgggtcgcgggcagaatgacctcggcgtcaaagccgacagccttctgaatttccggcgtcagatgccccagcaccgtaccggcggttcggatgggctggaagatgccgcgcggcagacccagcttttcgatcagtgcatcgtcccagtctctgctgtccgcgcccaccagcgccgtggtgctggcgttcgtgtactcattggcgggcacgccgcagagcaggtagttcaggtaatcgggcaccatcaggaacgttttggcggcggccagctgctccgggtgctcccttttgagcgccatcagctggtagaccgtgttgaacggctggtactggatgccggtgcgggcgtagtggtcggcaaaggtcaggccgtattccttttccagcgcctcgcggatgccctcggtgcgctcgtcgcggtaggcgacggcgtcgccgatgcgcttattgtccgcatccagcagcacaaaatcgacggcccaggtgtcgatgccgatggtcgcgggggcaaagcctgcgtcgtgtgcagccttcaggccgttgacgacctctttcgcgagggtgtcgatgtcccagcagaggtggccgttctcgcggtggacgccgttttcgaagcggtagacctcctgcagggtgatttttccgttctgcacggtgcctgcgatgtgccgcccgctggacgcgccgatgtcgactgccagtgtacaggtttgcataagctctctccttctttgcaaaataacagtgttgcagcatttgcttttcgtctgcattatacgacacccgggcccggctttccatccgcaaaagaatttgattgtttgggaaaatttcacacgtccctttccgcgttcccggcggttttgtccgggtcccgtgccggaatgatccgattgacacgccccgtgccgtcccgtataatagaccctgcaaccaataaaggagatgttacattatggccaccgcgcacaaaagccgtgtgctggatatgacccagggcgacccgttccgcctggtgctgcaattttcgatgccgctgttctgctccaaccttttgcagcagctgtacaacctgaccgacactacgctggccgggcacctgctgggctccgccgcgctggcggagatcggcgcgacagcggcgctgtacgggcttatcatgaactttgccttcggcatgaacaacggcctggcgctgacggtcagccgctattttggcgcgggcgatgaaagcgggatacgccgcgccgtgggctggatggtcacgctgtcggcggcggtgtcgctggtgctgacggtgtgctccctgctgggccgcgacgcgctgctgaccgttttgcaggtcccggcacaggcatggggcggcgcgtccgcctacctgaccgtcattctgctgggcattccgctgacgatgctttataatatggaggctgcgctgctgcgcgccgtcggcaacagcgtgacgccgctgctgttcctgctgttcagcagcgtgctgaacgtcgggctggacgccgcgttcatggggccgctggggctgggcgtgcgcggcgcggccattgccacggtgctggcgcagggcattagcgccgtgctgggcgttgtgtacatcctgcgcggctacccggagctgcgctttacgccccggcagctcggggctgccacgcgccgcgccgtgaccagtatgttctgggcgggcctgagcatggggctgatgagcgccatctacaatctgggcagcgtggcgctgcaaagcagcatcaacgcgctgggcagcgtctacatcacggcgcagaccgccgcgcgccgcctggcggagctgtactttatcccgggcggtgcgctgggcatcggcgtggcgacgtttagcagccagaatctgggtgcgggccgccgcagccgcatctggcagagcgtcaaggccgcgcttgcgatctattttgtgtggtgggtgtttgtgatggcgttcaccttcctgctgggcggggccgccatccgcggcatcacgggcagcacggacgaggtcattatctccaatgcgctgctgtacctgaaaatcagcgcaccgatcatcccgccgatggccgtgctggtcattctgcgcaatatgctgcagggcatccggcacacggtagagccgctgctggccagcgggctggagcttgtgggcaaggtgatctttgccgtatggctcgtgccgatccggggctaccgcgcggtctgcttttgtgagccgacgacctggatcgtatgctttgtgtttatcctgctggcggtctggcgctgccggggcgatttgcgcgacgcagacgcagaaaaaatttgaatttttttgcaaaaagggcttgcaatttggaagtcgttctgctataataatatgcgtcgccaagaggcggcgcaataagcgcggttagctcagctggtagagcatctgcttgacgtgcaggaggtcacaggttcaagtcctgtaccgcgcaccaagagtctgtgacatctaagatgtcacagactctttttttgttgtatcgcccagaaccggcaaggccgatgtcgcaagcgggcacgggcggatatggaatccgcccctacgttttttgcaggggcggagagggacgcgtttttccctgttgcgtgtgtaggggcgaccattggtcgcccgccaacttaccgccgcaacgcattttccgggacagttgtctcgtaaggcaagcgggcacgggcgagcaatgctcgcccctacaagagttttcgccagtctgggcccgaaatattcctgcccgccgcacggttctctcccccaccgcctgcgggcggagccccctcgcagagggggccaagagggggcgcgtttttgcctgttgtgcgtgcaagcggatttatttgcgctttcgccttgtcaaaaaccatcttatgtggtatactatttctctacaagtccacaggcaaacccggtgcaaaccggcgacgcaaagctataggggcccatcgggtcagccagttgccaacaagaaattgttgttttactgccgccggtagcttcgcatccttttggggcaggagttgacgagggtgaaaacacagcgatacaccggcggcacaaagcagggcatctataacgctctgctgttttctgctgcccgcggatattgtttaatacggtcagacagcgctttcaggcatgggtccgccatgtcctgaaggcgttttttcctgcgtcacagcttatatagcagaccgtcaaaaaataaggagaaaaaccggatgaaaaagaaaccactgcacagaatttcctccctgcttgcagccacggtgctggggctgttcctgctgaccggctgcgccggaaaaagcaccgaggcggtgcaggcacaggaggacgccgacaccattcaggtctatttgtggtccaactatctctacgaaaagtacgccccctacgtgcaggcgcggctgccggacgtaaacattgagtttatcgtgggcaacaacgatctggacttttacaaattcttgcaggaaaacggcggtctgccggacattataacctgctgccgcttctccctgcacgatgcggcctccctgagggacagcctgatggaccttgccaccaccaacgaggcaggcgctgtctacaatacctacctcaacagctttaaaaatgaggacggcagtgtaaactggctgcccgtatgcgcagacgcccacggctttgtggtcaaccgcggcctttttgaggaatacggtatcccgctgcccaacgattacgccagctttgccgctgcctgcaaagcctttgacgaagcgggcatccgcggctttaccgccgattatctgtacgactacacctgcgcggaaacgctgcaggggctttccgccaccgagcttaagagcacggaagggcgcaaatggcgcaccgcctacagctaccccgccagcaccgcccgtgtcgggctggacaataccgtctggccgggcgcctttgcgcgtatggagcagttcattcaggacaccggtcttacggcggcggacttagagctgaattacgacgccgtgaccgggatgttcggcaagggggagcttgccatgtactttggcagctccgccggcgtacagatgttccgggagcagggcatcgacgcgacctttttgccgttcttcaaccagaacggcgaaaaatggctgatgactaccccctacttccaggtggcgctgaaccgcgacctggagcaggacgccgcccggcgcgaaaaggcaatgcatgtcctgcacgtcatgctgtcggagggggcgcaggagcagatcctcgcggacggacaggatcttttgagctacagccagaatgtcagctaccacctgaccgacaccatgaaggacgtgcgctcggtggtggaagaaaaccacatgttcatccgcatcgcctccgacgatttctttgccatctcccaggatgtggtttcaaagatgattgcgggcgaatatgacgccgggcaggcctaccgtgcgttcaacgcccgccttctgacagaggaaccgtccgacacaagcgacgttgtgctgaccagtgaaaccgcctattccaacgtgttccacaaaaacggcggcaatgcgtccttctcggtcatggcaaacacgctgcgcgggctgtacggcaccgacgtgctgatagcacccgccagcagctttaccggcagcgtgctgcaggcagactatacccagacaacggcgcgcgccatgatcatgcccaacgggcttatgtcgtaccggcgcaccatgacgggtgccgagctgaaggacaccgtgcgcgcctttgtggaaggctgcgagggcggctttaccccgttcaaccgcggttccctgccggtggtcagcggcattgccgtgcaggtgcaggagaacgacggcagctatacgctgaccggcatcacccgcggcggccagccgctgcaggatgacgacaccgtcaccgtgacctgcttggcaaccgaaaagcagatgacaccgctgctgcaggacgaaagccgcgcgtttgagcgcggggaggccacggtcaaagacgcctggagcgaggcactttccggcggcagcgtgacgctggccgcgccggaaagctatattacattcgggggggggtaatgcgctgtggaagatactaagcataaaataaaaataaagcggcattcccggcgaaattggcatgctgcggtggcctgcctgctgtcgattgcgctgcttgtctgccttagcgcgcagtacctttcgtttgtgtcaaaaaccatctatgcggaaagcacccagcatttgggagaagtcctgcacaaatccaacaatatgctgagcatgatcgtcaagaagaacacctcctacctgcatgtgtggaacggctttctgagcagtgaccccgatgatgccagcacgcaggcgtatctggagtcagcgcagcagcagcttggctttgccgaattctactttctttcttacgacggcaactacatgacccccagcgggaaaacgggctacctgggcctgcagagcaatctggacgagcagctttccgaccagaaggacgttgtgttgaacacggccctgcccgggcaggacccgatgctggtgttcatctgccccgaaaccaagggcatctaccgcggctttgcctacgatgccattgccatcggccactacaacaatgttgtgatgaaggccgtggacgattcggctttcggcggagcggccagctcctttgtcatctacccggacgggcaggtcgtgatcgaaaatatctcagaagactcggaatccatttataactttatagcgatactgcaagagtattccgaccttaccgaggcgcagatacaggagcttacggacgattttgcgcagggcatcaccggaaaccgcgaggtgacgctggacggcacaagatactatatggtctacgaaagcaccggcatccagaactggatcctggtggggcttgtcccgcgggattccgtcaatgccgccatgaaccagctttggcagcgcacgatgcagatcgtagccctcgttgtcctgtcgattgcggcaatgatccttctgatggtcatgcaccggggccgcaccaagctgcgtcgccagaacaccgcgattttgtaccgggatgtgctgttcgagaagctgtcccagaacgtggacgatgttttcctgctgctggatgcccaaaagaaccgggcggattatgtcagcccgaacatagaacggctgctgggcctgacgatgaagagcgtgcgcaagaatatcggcacgctggccctgctgtacccggcggatttccccggccgcaccaaaaattatctggaagggcttgcctgcggcgaccaacgcgaatgggacacggagtttgtccatcagaaaaccggggagcatcgctggttccatgtggttgccataggcagcgaggtcgagggccaaactaagcacattctggttctgtctgaccgcaccgccgacaggcaggcgaaccaggcgctctcggatgccgtggccgccgccgaaaacgccaaccgcgccaagagcaccttcctttccaatatgtcccacgacatccgcaccccgatgaatgccatcatcggctttaccacgctggcggtcagccatctggacgacagggaccgcgtgaaggattaccttaccaagatacttgcctccggcaaccacctgctttcgctcatcaatgatattctggatatgagccgcatcgaaagcggcaagatccagctggacgagaccgaggtcaacctgtccgacgtgctgcacgacataaagaccatcgtcagcgggcagttttacgcaaagcagctggaattgtatatggacgcgatagatattaccgatgaggacgtctattgcgacaagacccggctgaatcagattttgatgaaccttttgtccaacgccatcaagttcacccccgcgggcggcacggtgtcgctgcgggtgcgccagcttgccggccaggtcagcggctgcgggcagtatgagttccgcgtcaaggacaacggcatcggcatgagcccggagtttgcccaaaaaatctttgagccctttgagcgcgagcgcacctcgacggtaagcaagatacagggcaccgggctgggtatggccatcagcaaaaacatcgtagatatgatgggcggcaccatcgaggtgcagaccgcgccgggcaagggctctgaatttatcgtccgtgtgccgctgcgcatacaggcagagcaccgcaaggcggaaaagatccccgcgctggagggtctgaaggcgctggtggtggacgacgatttcaacacctgcgacagcgtgaccaagatgctggtcacggtgggtatgcgcgccgattggacgctttccggcaaggaggccgtgctgcgcgcacggcagtccatcgagatgggcgatacctacaaggcttatatcatcgactggcgcctgccggatatgaacggcatcgaggtcacccgccagattcgcagtttgaacgatgatacgcctattattatcctgaccgcctatgactggtccgacattgaggccgaggcaaagtccgccggtgtcacggcgttctgccccaagccgatgttcctgtcggacctgcgcgactccctgatgaccgccatcgggcagaggccggaggagcagcagggcgtattgcccaaggaacccaccgactttgcgggcaagcacatcctgcttgccgaggataacgagctgaaccgcgagatcgccgtggagattctgaacgcctacggctttgaggtcgataccgccgagaacggcgccatcgccgtggaaaaggtccgcaccgccgcgccggggcagtacgatctggtgctgatggacgtgcaaatgccgatcatggacggctacaccgccacccgccgcatccgcgagctggaaaaccccgccctggcaggcatccccattcttgccatgacggcgaacgcctttgacgaggaccgccgcaacgccctggaatgcggcatgaacggtttcctgtccaagcccatcgtgatcgccgaccttgtgcaggagatgcgcaaggtcctgtaacacgcggggtttcagagccgggaatcatacgcaaagccaaaacaaaaaacgcagccacgctattttaccgcaaaatagcgtggctgcgtttttttgtgggtgttcctgttggtcgaaaacggaatccgtaggggcgcattctatatgcgcccgcggaggtttgtcctgccgcaagcgggcacggggggcgtgacggctggtgggggttatgactttaggtggtcggtgtaccaacgctgacggtaatataccgttcatgtcaacaagagccttttggtttttagggacttcggctatcagcacacagccgcaaaagaaagcaacgaccgttatattgatgtagccccggagtacatggcatttatgcagcaatacaaaaaacgccgggagtcgatacgcaatcagttgagcagtgaattgtacgaaaaataaagaatcgcagctatgccattttgtacaaaacggcatagctgcgatctttttttggtgagccgtgagggattcgaacccccactcaagcggttatgagaataccgaacctcttaaaattctatttttcttgtgcaatcgtaccagatactgtgtcttatagaagtcttatctttaggtaatgtgacgaatcttttggtcttatttagtagtgaaactgcccctttatcgccagctttatcgccagaaaaaagctggcgataaaaaacagctctaaaaacgtatttttccctaatctggcgatgaagaaaccaaccataggtacgagtcttttgccacacaacagcgaaacacgaagcacgatgcggacggcaaggatgttttcgccatctctttgatggatacggtttacaccaagcgcgaggacgcaggcaaagccctgctggggctgctgggtatggcgatgaaccgcaccgagccggtttccatcgggcagtacaagggctttgatttgcagatcgcttattttgcaatggacaaaatgtatctggcgtatcttgtgggcagcggcatcaatccggtgcagctgggcgcggatgcggtcggcaatacggtacgcttggacaactgcctgcacaacctgccgcagagcgtgaccgaccttgaatccaaattggtgcagctgcaaaagcagctggaaaacgccaaggaacagcttgcgcagccttttgcacaggcggacgagctggctgaaaagagcaagcgccttgccgagctggaggcacttttgaacctgaacgaaaaggatattgtgctggataccgtgccggacgaagagcaacagtgtcgttcggacaatcgacagcgtggacaagaaaggtagaaggttttaagatgaaggaaagaagaagcaaccgggtcagagatggccccctgcaaggagttatcaagatgaaaaaatggatcgtaatgcttgcgatgctgtccctattgacagcctgcgcacaggcaccggaaccggaatccgctgaattgacggagctgtcggcagcgacatccgaaagcgcagaagccgaagaaacacctgcaccaatttcaactgccgagccgacagcgacacctacagccacgccggagccgaccgcaacacccgcgccgacacccactgccacccccgcgccgactcctgcccctacgccggaacccacggcagtgccgacggcagaacctgccccggcgcaggtcaggtatgagctatggtgctgtgccctttgatttggcggcaggcaccgaacagtggtggagcatcgacagctccgattccgcttattgggcggtgcaggaaaacatcaacgctatgcgcgctgccggtggactggcaccgctgaccatggacggtggcttgagcgccgcagccgatgcccggtgcgagagttttgtggcaggcggtccctttgaccacagcggtatgactacccgcagcgagatctgcgccgccggtccgctgggttctgcaagtgccgtttgcaccggctggcaaggcagccctgcccactacgccaacattatggaacccagcttcaccagcatgggtgtgggctgctggttctgccaaacggcagagggacaatataagctgcgatatcattctgcaaaatatttcccagatcaaaagcaaatacaaggacgactgggaaacgatcatcggcaactgcgacagccttgtttaccttggcggcaacgattacagcacctttgagtacatttccaagctgctgggcaagcagaccattcgcaccaaggggcagagcatcggcaagggcagccacggttcgtccagcgacagctatcaggtcacggggcgcgagttgatgaccccggacgaggtgcgccgcatgaaacgcagtgactgccttgtaatgatcagcggcgaagcaccggtgagggacaagaaatacaacctttttgaccacccgaacctgaaatacacacccgactaccgcagcccgcggggactgctgcatcggtttgcaacacccatccctgcgccggatggctacacgatgcccccggattatatggcgcaagccggcaccgtatcgctcgcttatgtggcggagctgacctgccccgaaattaccgaagatctatatgatgaattacaagaatgggaggaatctctgttatgaaaatcaaaaaacctgtatccgcaccggaaacccagcgcaaaatcaagcgcagctacctgacggttgccacggttgccgccgcagcaatcgtgatggctttgcctgtgtatgcggacgacccgctggcaaccatcaatgcactcagtgattttgtgttcagcgccattaaggcgattggtgccattctgctgggcttcggcattgtacagatcggtcttgccctcaaaagccacgatgccgggcagcgtgcgcagggctttatgacctttttcggcggcgtagttatctactttgcaaaggatattttggatatgattctgtgaaaaaagccatgtggcacttgtatgtattggcgtactgtggtacattaaagcaaaaaaagagaggtgtctgttgaaatgcaagcaaccgttcaaccgtcgcacgatgaacttttgtatcagtgctatgtgaccgaagaattggaaaaagccaagaaacaagctgcttctacggacacgcagtggcaaaaccacgatagtgtatgggaatcattgaataagaaatacggtgtataaaaccagtctttgaccgttttgcttttcagcaagacggtcatttcttatgccggaaagaaggtgaaaccttgaatcaaaactggatcgtagaaaatctgaacaacgccttttccacttggaacggcaaattaacagagctttgggggctggtgactaccagcccccaatcttttaagggcggcgcagtatggggcgtaatgcaaatgtcttaacagcaaagatttcggcgtcccccagtcaagaaaccgcgtgtacattgtcggatatcttgatgagcgatgtagaggaaaagtatttcctttcaccgaaacagcaggaagttctcttattcaaacccacggtggccaccaaggggagcgcgtctactcccccgaaggactaagctgcacattggcgaccaatccgggtggcttcggtggcaaaaccgggctgtacgaggtgggagtgccgatcaagtgcgccacaaaaaccggctaccagatggcacaggtcggtgacagcatcgacctgagctacgccacagtcaacagtcggcgcggacgggttggtaaagagattgcgcatacacttacaacgggctgccaacaaggcactgttgaagttcgcccggtcaaaaatcccatcaagtccgacctcgcccgcaacaccgaacgcaccggtaagcctggcgcacccatgcatacacttaccacaaaagaccgtcacggcgttctatgcgagggtcgcatccgccgcctgacaccgcgcgaatgtctgcggctgcagggctggacggatgaccgcatcgacacgatgcttgccatccagagcgataaccaagcctacaagcaggctggcaacggcgtcacggtcaatgtaatcgaagccatcggtcgccgcattgccgccatggacgcagaactgcggggtgaggcgcttgccccttgatttccgtgaccagtattttggctgtgaaattgaactgaccgggataaaccgcgccacggcagcccaaacgctggccgacctgtttggcacccgcgccgagcattccggcggtggctatgatgcctaccgcgtcaaagatttggacggtaaagagtggaaaatcgttcgggacggcagcatccatcccgaatgccgtaggcggtctgttcttattggggagacctacaaggtcgaattgaactctccgaaactcgaatacggcgagatggaaaagctgcaggaggttgtccgttccttacgccgcgcaggcggcatcgtaaacgacagctgcggaatgcacgtccatgtggatgcaagcaagcacacgccgcagagcctcaaaaatgtgctgtccatcatgtattccaaagaggacattctatttgcagcactcaaagtcaaccctgcccgcatcgacagttactgtcaggcggtggatgagccgatactggaagaaatccgcaagctgcccagcggtgcgagtatggatcagctgaaagaccgctggtatcgcgggcgggacggcagtgactatcactaccaccagagccgataccatgccttaaatctccattccgtgttctaccatggcacagtcgagtggcggttgttcaactccacgctccatgcgggtgaagccaaagcaaacatcattctggctatggcaatttcggcgcagggcatcaaccagaagtacacgcagttccggaaaacgcccatcggggataatccggcgttcaccttccgcacctttctgctgcggctggggctgatcggcccggagtataagaatgtgcgaatgcacctgctgaagaacctgcccggtgacaaagcgtggcggcacgacaagtcgctgtatcccagcaatcaaccacggccccgcactgacgaggtcagataaggagaaacccaatgtctcgaaaagaatactttgcctatggctccaatctgaattttgatcagatggcctaccgctgtcccgaagcaacggtggtaggcactgccaagctggatgactatgagctggcattccggcgcggctacctgacgattttgcccaaagagggcgcaagcgttgaaggactgatctggtctgtcactgaccatgacgaatcacagcttgactgttacgagggctacccgacattctatgacaaggaaaccatgacggtcacagatgcagatggcacgccgcatgaaatcatggtttacaccatgaacgcaccgtaccgcgaccagttgctcccggtcagcagccgctacaatgcggttgtcatgcaggggtgtctggatgcgggcatctctccgcagcagttctatgatgctgacgaaaaataccgcaaagcctacaaggccagagccgcgccggtccctaagaaacacgctcccgaacgctaaccaagcccgctgcaccgtgcagcgggctttttcttttgcaacaaaaggagaaattcgtatgaagaacaaacacagaataaagcagggcttgtcgctgctgctggcgggtggaattgcgctcacaaatctgggcgcagcgctgcccgcttttgccgaggatgccgcagccacgccggagacagcttcagcggccacaccggaaactgctgaagccaatgtcccgacaccgaatctttcgcagatcactgaaaatctttacaacgatctgccggacgcgcctaccggcagttaccttggcagcatgggtctgcccgtggcaaccggcgagacaaaaatcggtatctccgcgtgggtttctgacctgtatgacggcgtagatgcccatatggatgccgatgcgctgaacgcagatgagaacacggtcacaatcggcaaaactcccggtacagactatgccattgttccgctgctggcgcaggtcgaatacccggcagacggtgcggtatccgaaatcatactgccggatgatgtagagcttttaagctaccgctccactgattatgagcctatcccggcagacgagcaggagcaggctgaaatcctgcaccagacatactcggagcagtcggcagcagccaccggcttgtatgtgaaagcctctgccgattttacggcgcagctggtctatacggattcagacggcagttcgcagtcaaaatctatccaagtacagatcagtgaggatgtcactcccacacagatgtatgccgacaccggcgatgacggcattgccgcctatgctgcaggcccgactccgccgtataccaccggcaaaatcaccagtattgccaaggagggcggcacatggctgatttggttcaacggtcaggaagcctactgctgcagccacggcctgaacggccagcccaagggctgccccacctacaacttctctcatgtgtcccgccttgaacccggccagtatacccccggcaaccactatgcaaatcaggtcaacatctggggcggtcttggtcagctgagtctggatatgctggatgatcgtcctgttgtggcaagccttgaagatgatcctgaaggctgtgaagaacagccggacatccttggcagcctttacgatgaaacccagcagtggatcatggaaaactatcccgacagctacgcggcgcagacctatattgctgctgcagaagaactcataaacggtacagatgcacagtccggtgaaaacggctactacacctacatctataacccgcccgcagggtatgcgtggcaggttgtggcactggtcggtgaagaaattgcgggcggcactgagatcccggatgtgccgagtgttccggaaccgaagtactattccgctgcatggacagctcccgcccagactgccggcggcagctttgatctgacattcactgtcaacaccgacaaggttcagctaaacacgctggaaaaggtggacggggcggtcattaccgtcacgcccagccggaccggcggcagcgtggacggcggcagctggcagatgagtcctgccggagcgcagaccattaccacaagcggtcacacgcaggatgacagttttcacctcaacggcggcgatggttctgccacatggacggttcactacgaggtgtccaagaccagcaccagtacgctcagcggacaggaaggaccgttcaccagccaagcagaagcagacgccgcagcagaagctgccaagaatgcggccatcgggcagctgcagaacgaggcgcagggcatggtggatgccgccattgccgcggcgcgggcgcagcttgccaatattacattcagctatgacgaggtcaccatcccgcacggctttgattccacgcccggtgcgctgggcagccaccagaccattacggttccggctaatagttccaatgactataaaatgcagaacgatgaatggtcggtaaaagtcagcatcgacaaaatcgacagtgaaaccaagcagcgcatcaagggcgatgccgagtttaagatttttgcgtgggacaccgttcggcagtgctatatccccaatggtgggtataacctatacaagattgaacgccagagcaacggcacttacaaggttataaaccacagtgactatgcgggcggttcggatgatttgttctatacccagcgcagcgagggcaagtttgtcatcgtggagagccgcgcacccagcgggtactacggcgattggacggatgcaaccaatcccggtacggcgggttctgttcttggcaagcgggcgtatgcctttgaaattaccaaatcactggacgcccagacgatttggctgggcaacgccgattataacgctgacatcagcacgaccaacagcggcggcacccttatcgacaccggcgagggcatcgtcactatcacctttggcagccgcaaggcagataagacctacgccacagaccccacgggcattgccaacaacgaaaattcctacaccatgcacgccaatgccgacaagatgcagaacgaccgtgtcctcggcaatattctgctgacgaaagtggatctggacgccgcgcggtatctggctgcgagcagaaacggagatactacgctggaaggtgctgtgtacgatctgtacgccgccgagaatatcacgcacccggacggcgtgaccggcattgtggactacagcaaaatcaccgatgccaacggcacgcccctttggcacaccactgtcctcaccaatggtggctgggataccgattacctgcccattttgcagaaagaccggctggtagcctctgcgaaaatcacagacggaaagctggcgtttgccaacctgtacatgggcagatattaccttgtggaacgcgccacagggctggtgctgcccatcgacggaaacggcaagctgtatggcttacacatccgtgatccctgtccgccgccttgaccgagcggtgaagtatgtgatgaacaaagaaaagaccacggctgtatccttgcaggacgccctcgattatgccgccaaccgcgataaaacagagcaatcctgctttgaaagctcgtatgcctgcacgctggaaaccgcctttgccgatatgcggcaaaccaaggaacgctggcacaagtcgggcggtgtgcagggataccaccttgtacagagttttgcagcaggagaggtcacacccgaactggcgcaccaaatcgccaaagaacttgcagaccgtgtgctgggcgggcggtatgaatatgtcatcggcacacacctgaacaccgggcatatccattcgcatattgtctggaactcggtcagctgtgtggatggcaaaaagtatcgcagcaactataaaagctatgtgacggaaattcgcgcggtgtcagatgaactttgccgaaaatataagctgtccgtcatcgacaccgaaaactcaaagcatgtagcaaagccctacgtcgaatggctggccgagaagaacggtcagcccacttggcgcaccgccatccgacaggatgtggacgaagcgattcaacaaagccttacatggcggcagtttcttaacgcgctggagcgcaatggctatgaggtgcgcatggggcgcaagtatcccgtcctgcgtccgtccggaaaagagcgctttgttcgattcaaaacgctgggcaagcggtacacgccagaagccatccagacgcgcatcctgtatccacgaagctaccgtccttatgttgaaaatccaccaacaatccaacatggccgtctgcgcagcggcaagccccgccgcaagctgactggcctgcgggcgttgtattatcgctatctatacgaattgggcgcactcccccgcaagccgcgccgccccagctatgccgtgcggcaggatgcctataagctggatcagagaatccggcaaatggaattcttatccaagcacaacattgacacgctggcacagctggaaactcaccgaaaagccctgcaaacagaaattgggcagttgcagacaaagcgtaagcaactacccaaaaccgatgatgtacaattgcaatgtgaatcggtccacacagccctaaaacagcttcgccaagaggaacggctctgccgcaaaatcgcagaacactccctagaagtgcagcaacacctcaccgaagcccgccgtgaccgcgccgcgcagcaacagcgcgaacaggaacgcgcgcgtgaccgccgccccgatattacaacacgttaatctgtaagacccagcagccaatcccgcgcattgatgcggcgaatgccgtcatactgttcctccggatcatcgtccatcgtaagaatatatttggggtagtggtcgcggatggacagtaagggtcgcagctcccgttgcagggtgtccgcatcacgaacggaaagtgccacttggtaatagaaggtactgttgccgttcattgccacaaaatcgacctcaaaagaatcgacctttccgacatacacatcatagccgcgccgcagcagttccagataaatcacattttccagaatatgacctgcgtctgtattgcgtttgccaagcagcataaatcgcataccgatatctacgacatagtattttcccaaagttttcagatactgcttacccttgacattataccgctgtgcgggatagataatgtagctttcgatcagcgcatcaagatagcgttcgacggtctttacatcaacttttcgtccttcggatgtcagggtgtctgcgattttcttggaggaaagcggactgccgatgttgtcaaaaacatagcgcagcacacttttcaacatcaacggatcgaggatctttcttcgtgtcaaaatgtcttttacgacaatcgtgttgaaaatgccatccaagtaatcccgaatctcgttcggatgccccttaagttccagcgcatagggaaaggaactgttttccagatattcggtatattttattccgcgatcttccatactgccggtactctgcatatattccttaaaagaaagcggcagcatttcgatttgcacatagcgcccggaaataagggtggctatttcactggacagcatataggcattggaacctgtgacgtatatatctacatttttcttgatatacaagctgtcgatcactttaggaaaatccgtgacgtgctgtatctcatccagaaaaatgtaagtcatcttttcgggaacaagacggtctttcaggtaagcgtacagttttttatagtcggtaagttcctcaaaatccatatcctcaaaattgatggcaataatttggtcttgttcgacgccattctgcagcagccaatcttggtacatttccatcaaaacagactttccgcagcggcggatacctgttacgactttgatgagttgcttgtccttaaacgcaatcagtttattcaggtattcagttctggtaatccgcataataaaccctccgcaacttttaatgatagtatacgccaaaaagtgtaaaatgtcacgcacttttttggaattgaatccaaataattcaagaaagaaggatgtatatgaattattcaaacaaagcatatgttgaacacttgcgccgcaagtacccgcccggtacgcggctgcaactcaactgcatggaagatgagtttcccgtgccgcccggttctatgggcacggtggaatgtatcgacgacgctgggcaaatccatgtagattgggactgcgggcgcagccttgcgcttatccccggtgtggactcgttcagccgcttgcccgtgcccaaagaaaaggccggtgacgccagatgaattacggctccgaacccgcagaccaagtcgtccgctactcgctggagggcgcggagtttgctctgcgtatttccggcaccgctgcgaaaaacttctttattttcgcacaggcggtgctgcatgacagtaaaaagacccacggcaaaacccatcttatccgccttttgaaagaacagaaaccgctgaagtttttcacggtggacaaagaccgtatgcacgattttgcccgcgctgccaaagcacatgggctgctgttttgccccatccgcgacaagatggaccccgaccacattgaaatcgctatcttgcaggacgatgcgtccaaagcaaaccgcattattgaaaaactgcagttggatgtcgtggacaccggaacggcagaactggtcgatgccgtgcagcagaatttggaaaatgcagcccccaaccacgaggacgcgcccatcgtggattttcctctgggctcggagaacgccagtccgtccgagcctttctccgacagcagcaggttttttgcaaactcgccgtcgccgcgcgccgatcagcttcgagccaagggtgagcgccccagcgtccgcatggaactgcaggatattaccgcctacctgcgaaaccgagcagaggcacccaaagaccgtatgcccaagctgccggtaaaaatccggcgcaaagaaaaggtgctgtaaatgttttccgtttgttttcaaatgcggactagcttttacagcgcctttgggatatgttgtaggcaacaggaggttcaaaagctatgacagaacgcaaagtaaaactcgaccgtgcgaacaaaatcatcctgcttcgggcgctgggagatgtctattacggtcagcgtgcccgcggcggcagcaccgaagtgaccggacggctcatccttcgagtgaacgatctgcccgcaggcggcaagctgacgatgtcggcggcagagtatcggctggcaaaagcagccctcaaccaactgcgtacccagcgcttggctgagggcgggtacaccgatgccgtggatgatgcactgacgcggctgctccacgcccacacgccgctgtttatctggtgaatccgactatgacatgggaaaaattctggtcgatcattgaccgagtccgcgcccaagcagatatgcaggatgaagcgtccgtgaaacagttcctttacacggaactcatcaaattgccgcaggatgaactgctcggctttgattgcgcatggcaaagttatcgcaataaagccaactttcccaaaatggtcgcggcggcctgcatcatcaatgacggcagttcggatgacagatttaccgatttccgtaattggctgattatgcaggggtacgatgcttatcggcaggcgctgattggccccgataacctcgcggcactcaacattccgttccgagatactgagtggatgggatgcgggaatgtggcgtggtatgcttatgcagggcagaagctgcacacctattttgaaaaggaaggaattgccgccaagttattccgaaagtatccggctctgctgaaatcgtctgccgatttacatcaggcaatcatgcaggagcagcttgcgccgtgtcgtgcgccggaaaccgaatgggaacgacaaatgctgcgaacggaagtcaagcactacatagataccagtgggctggcgtacagctacaacgaattctatactcaaaatatgccggataaggttgcatggaaaacgctgcaaagcgatttgtttgcaaatctgccgcaaatcaaggcggaacgtatgccgcaggacttttccgcagttttgccgaagttgtggagaaaacgtcaggcatgggatgccgagcgtacaaaacgcccgccctatcgcggcgaagaaaggtagcctaccacgccgggaaggaagaacccttggtgggtctggctgctgcccctgccacttgtgtggtgggcggcgctggcggtggcttgccgctggaagccgggcatgaagataacggctctgctgagtgcgttaaacagcgcactggcagagccgtttgcgttggcgtgggtcagcgacagcccgcgctttttgcttgtgtttacggtgatttacgcggtggtggttatcgtggccgtgacggatcagaagaacacccgccccggtgcggagcatggctcggcggcgtggggcgatgtgttccggttaaacaagttctacatggacaggcacgggtcgaatctgctgctgacccaacactttcacattgggatagatggctacaaacacaagcataacacgaacatcctcattgtcggcggcagcggtgcaggcaagaccagaacctacggcgtacccaacgtgctggaatgtgcctgttctatggtaattacagatcctaagtccgaaattttgcgtaagaccgggaatttgttgaagcaaaaagggtatgaggttatcgtattcgacctcataaaccctgccgcctcgttctgctacaacccgtttgtgtatgtgcatgatgaccgtgaagtgctgaccttgattgaaaatctgattcaaaataccacgccatcacattcaaaaagcagcgaccccttctgggaaaaatccgagaccgccctgctgcaagcccttatgttgtacctactgcacgagaccccgcccgaagaacaaaacttcccgatggtgatggaaatgatagccgccgcagaagtccacgaggacgatgacaactaccaatccccgctggacatcctgttcgagcgcttggaaatgcgcgaacccgacagcatcgcttgtaagcagtaccgcattttcaaacaagcggcaggtgatatatgctctaagtgacttcttaatcatgattgtgtcatggttagtgaagcagtcacttagagtatttttgtttcaggaggtacagccatgagaaatgaaaaaatcaccccactgtacgagcgcctgagccgggacgatgagttacagggcgagagcaattccatatccaaccaaaaacagatgttagaggattttgcccgccggaatgggctgccaaaccctacgcactttaccgacgatggtatctcaggcacccgttttgaccggcccggatttttggcgatgatggaggaagtggaggcagggcgtgtagaggcaatcgtcatcaaggattattgtgcgataataggactaaatcagaaagaccttgaaaaccaaggcattctggcttagtcccttctttttttgaccgaaaacaaaggactttcacaataatcaagcaagccggagggtgccgctgcacacttccggcagaaggaggatatagtgggtgctatcaaagtcttcttgaaggaggttgtgcttccaatcgcgcttgcgttctgcctcgcgtcatttctcaagccgatctatatgcctgacggcgtatgcgactacttcctaatgtggatctgcgtcggcttgccattcggcatccggaggatgtgcctctggctcgttccaagcggttacggcatctccggctcagtcggcatcttcgcattgaacttaatcataggcggtctcatcggaggactcgccttcttcatcgggctgctgctcggtatcattcataccatccgagaaatcatctgaactacatcgtaaacgaagagggtttgtttcttctccaatttggagtaagaagcaaaccctctttttttgttgcccaaaagccggagtatttgctggcgatgcggcgaaagaaaggagtttttaagcatgaaacgcatgacagccgatgatctgcaagcactggaattgctgatgcagaccacacccggctttgatcattttgacagcggcgcggatggcattctccctgagtgccgaagctgccgctttcatcgccccttctggaaatatcagtcctgcgtgtttgcagagtgtccctactgctgcaatcccgtttctaccctcaaaaatcaaagtggcacatctgctgccggaaaggaagtcaatcatggataacaaaatcgaagtcttcaagaatgaacagtttggagaaatccgaacagccctgatcgaaaacgagccgtggtttgtggcggtagacgtgtgcagggctttggagatcggcaattcctctcaagccatttcacggctggatgcagatgagaagatgattaccctcatttcaaatgagggtaataagcgaggcaatcccaacatgacggtggtgaacgaacccggactttacacgcttattctgagcagccgcaagcccgaagccaaagccttcaaacgctggatcacgcatgatgtcatccccatgatccgcaaaaccggtggctacatgacagactcccttctggaacgcattcagaaggaacctgcggtcattgtggagtttgctcaggcgttgattttggaaaggaatcgcgtaaaggctcttgagtgtgagctgatcacggcaaagcccaaagctgattattacgacgccttcatcaatccggatgactgcaccaatatccgaacgacggcgaaggaactgaaaatcccggagcgcaagttcgtccagttccttctcaaagaaaagtacctgttccgctctccttccgggcagctacttccctacaacaaggacagcaatgccggactgttcatcgtccgcgattttgtgacgttctgctacaccggttctcagacctacttcacgccgaagggcaaggaggtcatcagaatgaagttccagaaaaagtgcggcgaagaactgctttccaagatggcaaggtgattatcgtggcagtctatcgcgtaaataaaaatcgtggctataccgtcatggcgaacttccacctccgagacaagagcctgtcactcaaggcggtcggtcttctctcaaagatgctctcgttcaatgatggctggaagttctcaaccaagggactttctgcaatctgcaaggaaggtccggatgccattctctccgcgctccgtgagcttgaaaagcacggctaccttgtccggcaccggcagagagacggtaaaggcaggatgagcagcacaatctttgagatatacgaagagccgcaggagtccacgccagaacgggaaataccacacacggaaaatccatgtgtggagaagccagatgtggataatccacgcggggataagtccgcacaaataaatactgatcaagtaattacccaagaaagaaatactctctcaaagaactatcaatccatcaatcttgatgggatggacaggatggatgagcgaagcgagtatgaagagattatcaaagagaatcttgattacgacattctctgtcaggatccgaagttcgatgaagaccgcttccgggagatcatggacatcatgctggatgccgtctgctctaccgctccgaccatccgtatcaatggcgaggatatgccgcagcaagtggttaagtcccgctttctcaagctgaatagcagccacatagagtacgttctggaagcaatgaacaagaacccgtcagacatccgtaatatccgggcgtacctgttgaccgctctgtataacgcctctctgacgatagacaattactactccgcgctcgtcaatcatgatttctacgggcaggacagatcggcagggtcaaagaagccgaagacctacgattatagcctttgtgaagacactctttaatgaataccatcgtgagcaatgctcggaaaggaggacagcgtaaatgaaaaccatctgtcgccggattgtgccgccttagctgaggcagcattccctcaatcatttcaaggaaaggaggtatcactgcaatgcaggatgaagtcaacaccaaagttgttgcaatcatgatcaagggcggaaaaatctcagccgaggtgctgaaaaaggcactggacaagttcgtgcaggagattgagaaggcgcagaagcagatgcagcagcccaaaacctatcgcggcaagcagtccatcaagcatctgatgagccagaacgccgctatctccaacatcgaagtgacggatggcaacatcaagtcctttgagcggactgccagcaaatacggtctggactttgcgctcaagaaagacgtttccgttgagccgcccagctatcttgtcttcttcaaggggcgggacgttgatgtgatgaccgccgccttcaaggagttctccgcaaaaaccgtcatgcagaaggaacagccgtccatccggcacaagctggatcaggagaaagctcagagcaaggcgcagcacaaggagaaggtcaaggtcaaaaccaaggatcggggtgtggagctgtgaacaaacccgatgtgaagaagctcgttcttctgaaccttccgtatgtcttcgccttctactttgcagataagatcgccgccgtgttccgtctcgcacccggcacggcgttcatcgacaggttgacaaacggctttgccgtgttcggctctgcctttgcaaatccgctgcccagctttcatcccatcgatctgctcatcggtctgattgccggtgcgctgctcaagctggcggtcttcgtcaaaggcaagaaccgcaagaagttccggcagggcgaagaatacggatctgcccgctggggcaagccagaggacatcaagccgtacatggacccggagttctccaacaacgtcattctgacacagacggagttcctgaccatgaacagccgcccgaagcagccgaaatacgcccgcaacaaaaatatccttgtcatcggcggttccggctcaggtaagacacgctttttcgtgaagccgaacctgatgcagatgcacagcagctatgttgtgactgacccgaagggtacggtgctggtggagtgcggcaaaatgcttgaaaagggcggctacgtcatcaagtcgctgaacaccatcaatttccggaaatccatgcactacaacccttttagctacatccgcagtgagaaggacatcctcaagctggtcaatacgattatcgtcaacacgaagggagacggcgataagtccggcgaagatttctgggtcaaggcggaaaagctctactacacagctctcatcggctacatctggtatgaggcacccgaccacgagaaaaactttactaccctgctcgaaatgatcaatgcctcggaagccagagaggacgatgagacctttaagaaccccgtggatgtcatgttcgatgagctggaagcccgcgaccctgaccactttgcggtcaagcaataccgcaaatacaagctggcggcgggcaaaaccgcgaagtcgattttgatttcctgcggtgcaaggcttgcgcccttcgacattgcagagctgcgggagctgatgagctacgatgagatggaactggacaccatcggagaccggaagacggcgctgttcgtcatcatttccgacaccgatgacaccttcaatttcgtcgtggcgatcatgtattcccagctcttcaaccttctctgcgacaaagcagatgacgtttacaacggacggcttcccgtccatgtgcgctgtctgctcgacgagtttgcgaacatcggtcaaatcccgaagtttgataagctcatcgcaaccatacgaagccgggaaatctcggcgtcaatcatcttgcagtcccagtctcagctcaagaccatctacaaggatgcggcggacaccatcacgggcaactgcgactgcactcttttcctcggcggcaaggagaaatccaccctcaaggaaatcagcgaggtgctgggtaaagagacaatcgacctttacaacacctcagaaacccgttccaacaacaactcctacggcttgaattatcagaagaccggcaaggaattgatgtctcaggacgagatcgccgtcatggacggagctaagtgtattttgcagcttcgaggcgtgagaccttttctcagtaacaaatacgacattacgaagcatccaaaataccggcagctctccgactatgacaagcggaacgcctttgacatcgagaagtaccggcagcacaagctggtagtcaagcccgatgacacattcgacctctatgatatgggcgaggtcgaagcggattaaagccccgtcgctgcactgcgcagtgggtaaagcctgatggctcccaaagcagaacagcgacggggcttcttttttatgcccattttcaaaaatacacaaccaatctttttcaaatcaaggaggaaaatctatggctttcatcaatcaggctgtcacggttcttcagacgctcgttatcgccctcggcgcaggtctcgcagtgtggggtgttgtcaacctcatggaaggctacggcaacgacaaccccggcgccaagtctcagggcatcaagcagctcatggctggcggcggtgtggtgctgatcggcacgaccctcatccctctgctctccggtctgttcggttaatccggcagccgcgcagaagtaaccatcgaggcgggtgctggaaaaggcactcgcccctcacaattcaccaacgattcaaggaggaaattcaagtatggcatttatcaatcaggcagttacggttctccagacgcttgttatcgccctcggcgcaggtcttgcggtgtggggtgttgtcaacctcatggaaggctacggcaacgacaaccccggcgctaagtctcagggcatcaagcagctcatggctggcggcggtgtggtgctgatcggcacgaccctcatccccttgctctccggtttgttcggctaatccacggcaagcccagcttaaccgaagggtggtgaaatattgggcagcattttagaaaagatcgaacaagctctcaaggatatgctgatcggatggatcgagagcaacctgaccaatatgttcaccgatgtcaacgagaaggtaggaacgattgccgccgaagttgggcaaacaccgtccggctggaacggcggcgtgtaccagatgatccggggactatccgaaaacgtgatagtccccatcgctggtatcatcatcaccttcgttttgtgctacgagctgatttccatgatcaccgagaaaaacaaccttcatgacatggacacatggatgttcttcaagtggtttttcaaggcggctgtggcgatctatctcgtgacgcacacgtttgacatcgtgatggcagtattcgacatcgggcagaacgtggtttccggtgcagccggtgtcattcacggcaacaccagtattgatattgattcgacgattgcgcagatgcgtaccggcatggagaacatgggcgtcggagaactgctcggactgtcgatagaaacgcttctgatcagcctgtgccttaaaatcatggcgatcctcattacggtcattctctacgggcgcatgattgagatttactgcaccgtgagcattgcgcctattcccatcgcaaccatgagtaaccgcgaatggggcagcatcggcacgaactatctgaaaggcttgttcgctttggcatttcagggctttctcatcatggtctgcgtcggcatctatgcggtgctgatcaacggcatgattatcgcagacaacattcactcggctctgttctctgtggcagcgtacacggtcattctgtgcttctcgctgttcaagacaggaagccttgcaaaatccatcttccatgcgcactaaggaggtcggcagcatgaaaaagtacagcatcatctacgccgatcccccttgggcgtatcggacttactccaagaagggacaggggcggtcggcagaaagccattatccgacgatgtgcattgaggacatcaaggcacttccggttggcgaactggctgcgaaggactgcgctctgttcctctggatcacgttcccatgcctctgtgaagcactcgaagtgctgacggcatggggcttttcttataagaccgtggcttttgtatgggtgaagcaaaaccgcaagaacgatgacctcttcaccggcatggggtattggacaagggcaaacgcggaaatctgcatccttgccacgaagggacatccgaagcgagttgacgccggtgtgcgtcaggtcatcctcagccacatcgaagagcattccaagaagccggatgaggcgcgggaacgcattgttcggctcatgggagaccttccccgcgtagagctttttgcccgtcagtctcccgaaggctgggacgtttggggcaacgaggtcgtatgcacggcacatcttccaatggaggaaacaccatgctgcggctaagacctatctctcttcgagacgccaacgagtatgtccggaagtatcaccggcatcataagccggttgccggtcacaagttttccatcggctgtgaagcagacggtgagctggtcggtgtaatcatcgccgggcgtcccgtcagccggtatctggatgacggcttcacattggaggttacaaggctatgcaccaacggggcgaagaacgcttgcagctttctctacggcgcggcggcaagagctgctgcggctatgggctataagcgcatcatcacctacacgctggaaagcgaaaacggtgcaagccttcgtgcttccggctggatctgtcaaggcaaagcgggtgggcttcgctggacaggcaagcgtcagccgaaggaggatcaatatcccgcacaaatgaagctgcgctatgaaaagcagcttagaaaggaggaaacagtcaatggcatttgttccggtcccgaaggatcttaaccgcgtcaaaacgaaggtcatgttcaacctgaccaagcggcagctcatttgtttttccatcgctgcggcagtcggtgtcccgattttctttctggcgaaggcatatctcgacttgtctacggcggcaatgctgatggtggttatcatgctcccgttcatcttcttcgcgctttacgagaaggacggtcagcccgccgagaagtatctgtaccacatcgtacagtccatgttcatccgggacaaggtgcgtccctaccgcacgaacaatctctacgctgagattcagcagaaaatcaaagaacaggaggaattgcagcttgaacaacagcacagcaaaggcaaagcctaagatgacggtcaaaaacggcgtcgtttacggtgatgccctttccgctcaggaaaagaagcggatcgtcatgcagaagaaaaaggacagaaaggcaaagaaagtccgcaagtccgcccagcagaccatcccctatgtggagatgtgtcgtgacggtatctgcaaggtgaacagccgcctctacacgaagtccatcgcctttgaggacatcaactaccagcttgcgcagaacgaggacaaaactgccatcttcgagaactggtgcgactttctgaactactttgatagctcgattttcgtccagctctccttcatcaatcagaaggcaagcctcaatgagttccgcaagcgcatcaacattccggcacaggaggacgccttcaacgacatccgctccgagtattccggtatgctgcaaaaccagctcaccaagggcaacaacgggctgatcaagaagaagtacatcaccttcggtattgaggcggactccctccgcacggcaaagccgaagctcgaacgcattgaaaccgacatcctcaacaacttcaaaactctcggcgtgaaaaccgagccgctgtccggctacgaacggctgaaagtgcttcatgatgtgttcaatatggacagcaatgagccgttccgcttttccttcgatatggttgcccggacggggctttccagcaaggacttcatcgctcccacttcctttgacttccgtgaaggcaagtgcttcaagatgggcagaaccatcggtgcggtgagcttcctgcaaatcctcgcgccggaactcaatgaccgtatgcttgccgacttccttgagatggacagcaacattacggtcaattttcatatccggacgattgaccaggcgaaggcaatcaagagcatcaagtcgaagatcaccgacctcgacaagatgaagatcgaagagcagaaaaaagccgtccgctccggctacgacatggacatcatcccgtccgacctcgccaccttcggcggtgaggcgaagcgtctgttgcaggatctccagacccgcaacgagagactgttccttgtgactatcctcatcatgaacacagcaaccaaccgccagaagctcgaaaacgcggtgttccagaccgccgccattgcccaaaagtataactgtgcgctcaagcgtcttgactttcagcaggaggaagggctgatgtcctctctgcctatcggcgtcaatcaggtggagatcgaacgcggactgaccacttccagcacggcggttttcgtgccgttcaccacgcaggagctttttcagggcggcgaagctctctactacgggctgaacgcgctgtccaataacatgatcatggttgaccgcaagcagctcaaaaatcccaacgggctgatcttgggtacacccggttccggtaagtccttctctgccaagcgcgaaatgacgaacgccttcctcatcacggaggatgacatcatcgtctgcgaccccgaagccgagtatttcccccttgtgcagaagctcggcggtcaggtcatccgcatttcgccggtcagcacggattacatcaatccgttggacatcaacacgaactactccgaagaggaaaacccgctgacgctgaaatccgacttcattctctccatgtgtgagctgattgtcggcggcaaggacggcttgcagccggttgagaagaccatcattgaccgcagcgtccgcatggtctatcaggagttccttgcagaccccaagccggagaaaatgccgatcctcgaagatctctacaacattctgagaaatcagaaggaaccggaggcacagcgcatcgcaaccgcccttgaaatctatgttcacggctctctgaacgtcttcaatcacagaacgaatgtggatgtcaacaaccgcttcgtctgctatgacatccgcgaactcggcaagcagctcaaaaagctcggtatgctgatcgtgcaggatcaggtgtggaacagagttaccatcaaccgcgcccagcacaaggcaacgcgctactacatggacgagttccaccttttgctgaaagaggaacagaccgccgcgtacagcgttgaaatctggaagcgtttcagaaaatggggaggcatcccgaccggcatcacgcagaacgtcaaggatcttcttgcctcccgcgaggtggagaacatttttgaaaactcggattttgtctaccttctgaatcaggcatccggcgaccggcagattctctcgaaggcgctgaacatctcgcccagccagcagaactacatcaccaattccaatgccggtgaggggctgatcttctatggctcgaccatcgttcccttcaaggacgatttcccgaaggacacccagctctaccgcatcatgaccaccaagcccgaagaaaccgtacagaattaaggaggattttgaaagtttgaaacaaatcagtgacacaccaccctaaaaaggggcgcaacaaaatagaccgtcggtcaggcggtcaaaaaacgaggatggctggctatcctgacgaggacaacggagaagggtttgaaacaataaagcccattcgagcaagcatctcgaaggctttctcttgggagatctggcgggccataggattcttgtcttcctggatgtaggcagcaggattgtacggctcgttcttgcttagaatatggtagatggcggttaagagtctcctggcaatggcaactatggcttttttcttaccgcgccgtttttgcagcgcctgcttctttccgtagatttcaggatgtttttcaccgcggcttgcagcaagagcgacctgaatcagcaagggcttgagataagcaccggatttgccaatgcgagtggttttcttcttaccggcactctccgcgttttgaggggtaagaccagcccaagagcagagatgcttagaggtatcaaacaccgtcatgtcggccccgatttctgcaagaatgcggatagcagtaaaagcgtcatggatgccggggacagtcagcagcagttcaatctgcggaagatagttttgagcaatctccagaataagggattcgagttctgccttatgtctttccagagaatccatgtggccacgaatgattttgagcttctccgcctgctcataagtgaagataccgtcaactgcttcctgaatctgtgcaatgggtgttttacagcgcccatctacaaagggagccacgtcaaactgctctcccgggtgttccaacaactgtgtcgtgatggcggatgcgctcttaccgaacacattactgaacacgtcatcaagcttgaagttggaaacagtgagacaattctgggcgcggttcttctctccggtcatgtaggacgaaagcttgacccagtaacgacaaagatctcgaagctgccggatatccttaggtggaatgaagctgccgcgaacaaggtcatgcttgaacaagtcggcaatccactgagcgtctttcttgtcagttttcttccctttgatagccttgacgaatttcgggtggctgactaccacatggcaggactcctccaaaatgttgtgaactgggaaccaatatttacctgttgattccatacaaacatccttacagtcgttggctaaaagccagtcccgcagttcgcgcaggctccctgtgtaggttgaaaatcttcgtgattgatactctgtaaccccttgcgcattggtagcggcaatacaggcgatgagaaaatcccggtgaacatccatcccacagcaaactggatatacgatttttagtcttcccataacaactcccctcgcaaaaatattgttgagggcatccagggactgggcatccagctaaaaacgagttgcgtctttacaaagataagtttacaggctctatgtcctacacattggtgcttgaatggatgcccggtgacttatatatgagcgcggttacagcacgctgcaccgcacctacctcctcgtactctgtagtatggctgcccccaaacaaagtttaccaaattacactctattgcggaagcaccagccttgtttcatttctcgttggtgcctttcgcggaaaggcatggtcatatatgaataagaacttcaatcttgagaacgccaagagcatcatcgcagaagccagcggtgtccccgtaaacaccacgtttggcagcatcaccaagccgattgaccttctgcttgaggtcatcgacatgagcgccgatctcattgccctcatccacgaggaaaccgaactgaaaaagcaccatcgcgcctacctccacgttcatgaggaactggaggactgcgccgaccagatggcagagcgtatgcaggagattttcgatgagaccactgactgtgtgatcaagctgatgaaggatgtccacgagacgttccgagtccgcaagcaggaagcggctgaggacgatgccgataccgtcaccatcgccaaggaagactacgaaaccatgatcgacgatctgctcacgatgtccgaaatcattcagtgcgtcgcagatatgcgcacgcaggatgtgaaggcaatccgcgagttcggtaagttcgtccccgcctttgccgcctttgagaagaaccgcctgagcctctatcgtgaggcggcgaaggaagccgaggaaatcttcgaccgttgggcggacgagattgacgatctcgatgaggactacgagccggacgagttcttctctgactgagccgtccggctctcaaaggaaggagctgatacccatagagcttgacatcattcataccggcgattgccttgaaatcctgaaaactctgcccgatgacagcgttcattgctgtgtgacgtcccctccgtattacgcgctccgcgattacggcatggatgctcagatcggcagagagacaacgccgaaggaatatatctcgcgcctgacggaagtatttaccgaagtcaggcgcgttttgcgtccggacggtacgctctggctgaacatttcggacacctacgccgggaaaggcaatcagggcgattttgttgacccgaagaaccccaacggcagaaacggtcaggctgtggctctcaacaacaaggttgagggctgcaagccgaaggacatgatcggcattccgtggatgctggcttttgccctccgcgataccggctggtatctgcgcaacgacatcatctggatgaaggataaccccatgccggagagcgtgaaagaccgctgcgcccgctgctatgagcatattttcctgttctcaaagtccaagaagtatttctttgactacaaggcaatttccgagccgattgcccctgcaacggcagaacgcctcaagcgcggcatgaaaggcggcaacaaatacggcaagcccgttcccggtcagcctcagccgcaatccatcaaccgcgcgcgtgagcatggcgagatcaaggacgctgacatcaatccgctccgcaacaagcgcgatgtctggaagatcaacaccgtccctttcaagggcggtcactacgccgcctatcctccgaagctggttgagacctgtcttctcgccggttgtcccgaagacggcattgtgcttgacccctttatgggaagcggcacaaccggcatggttgccgcgcagatggggcgtcatttcgtcggcatcgagctgaatccggcgtacaccgagcttgcctacaagcggatcggaggtgaaatctgatgtccaaggaaccggaactcaaagcccgcgacaaggtggtcgtgcggatgacgcgagacggcgcggtcgagaaaaacctgacggctggcaccgagcagcgtgtgtcaaagcggctggaagaagcagagttggtgaagtccgctgagacagtcgcgccttccgaagctctttctgcggaggaacagaaaaaggtgcagatgcgccgtcagcatcgtcagtttcaggcggaacacgccgaggataacgacacacagccgccttcggaaacgtccgtcacagaagagaaaagggcagaaaatccaccccagaatgcacctgaaccgctgccctcggaaacgccgttcaagccccctgttttggagcagcacggcgtttcttcgcataccggcacggtgattgccgaaacggttgtcacccacaagctgcgcaagacctctgcggttgaagccgttgatgcagatgccgttctcactcaagcggcggagactgcctctgcaaagccgctctcggacgatgccgtcccgcccacgaagcggatgcagaagctcgaaaggaagtctgagaaggcacatgagcgtctggatgctgcccgtgaaaagctgcccacgcacaaggttctcaagaaagagcgtgtctttgatgaagagaccggaaagggcaaaacccgccttcattttgaggatgagctgaaaaagcccaagagcaaaggcaagctgcaatttgaggcagataaaaccgtccgcaaggtcggtgacacccttgcttccggcattcacggcaaaatccatgaggtcgagcaggaaaactcggcggttgaggcggcgcataaaacagagattgccgctgagaccgctgcgaggcatttccgtcatcatcgggaaagcagcgtcaacaagccttatgagaaggtttccaagctggaacataaggcggatgctgctgatgcgaagctccaatatgagagaaatcagcaggagcatcctgagatgaagaagcagaacatgaacaagcactaccagaagcagaacatcaagaaggaatatgccgctgcacggaatgccggttctcagactgccgggactgccacgaagaataccggcaagaagctcggcgaaaaggtgtccgacaagctcaaggagttctttgagaacaacaagaaggtcttcatctggatcggcgtcggagttgtccttctcgttttgctcggtgccggtatcagctcgtgttcgatgctcacctctaccggctcgtcggttatcgcttcctcttatctcagcgaggatgacgcgatgctcggtgcggaggcgcagtattgccggatggagcaagagctgcaaagctatctcgacacctacgaaagcactcacaactatgatgaataccacttcgatctggacgatattgagcatgacccctatgtgctgatctccattctctcggctctccacgagggcgagttcacgctggatgaggtgcagggtacgcttcaaatgctgtttgagaagcagtacatcctcaccgaagaggtcatcgtcgaaaccagataccgcacggagaccgacacatggacggatgcagacggcaacacgcacacggaaacctatcgcgtcccgtatgactactacatctgcaacgtgaagctcgaaaacttcaatctctcccatgtcccggtctacatcatggggcaggaacagctctccatgtacgcgacgtatatgtcggtgctgggcaaccgtgaggatctgttcggtgactctccctatgtggacaagtacatcacaaatcctcccgccgactacaatgtcaacccggaatacttgaacgacgagaagtttgcgacactgattaccgaggcggaaaagtatctcggctatccgtatgtgtggggcggctccaatcccgacacatcctttgactgctccggctttgtcagctatgttctcacgaacagcgggcttgtgaacaccgggcggctgggcgcacaggggctttacaacatcagtacgccggtctcaaaggcgaatgcacagcccggtgatcttatctttttcgtcgggacgtatgacacccccggcgtgtcccatgtcggcatttacgtcggtgatggggtcatgatccactgcggcgatcccattcagtacacatccatcaactcttcctactggcagcagcatttctacgccttcggaagacccgcctattaaaagaaaggagtttttcatgaatccaaagtatcagaaagtcctctccgacatcgagaaggctgaaaagaagaaatccgaaatcgaaggacagctcaaggagctgtacgacaagaagacggagctggaaaaccttgaaatcatcaataccgtgcgctctatggtgatggacaaggatcagatcatggcgttcctgtcttccatgaagggcggcaccaagcctgctgaaaatacggaggtaatcgacaatgcgtaagaagtttcgttttctgaccgtccttgcagtctgcgtcatggtgctatcctgcttctcggtgacggcgtttgcctacgccgatgataccgagcagaaccttcccgttacggaggcaactcagcccgaacagcagcccgcagtcactcccacgccggaaaagccggagggtgagccgattgacaatgagggcaacgcctacacccgcgacttgctctatgacaaggcaaccaacaagcagttcatcactgtccagacgaagaacggcaacaccttcttcattgtcatcgactacgatgcgcccatcaacgaggatgaggaacagtatcagacgtacttcctgaacatggtcgatgagagcgatctgcttgcgctgctggatgaagacactgcggctgctctgaccacctgtaactgcaaggaaaagtgcgctgccggtcaggtcaacacagactgcccggtctgcaagaccaacatgagcgaatgcaccggcacagctcccgttatgcctgagccggacaaggatgcagaaaccgacgttcctgctcccaagcccgaaaagaaatccaatgtcggtatggttcttatcgtcttcgtccttgttggagctgcgggcgcggcgtattactacatcaagttcgtcaagggcagaaagcccaaggatgaggatatggacttcttcgatgatgaaggctacgaggaagagccgtacatcaacgaggatgaagagccgcagattgcggaggatgctgaaacggatggtgatgaagattgatcttagtcattgctgaaaagcccagcgttgcccagtccatcgcaaaggtgttgggcgcgacgtcccgcaaggacggctacatggagggcggcaattacatcgtttcgtggtgcttcggtcatctggtggagctggcagacgccagctcctacaatgagcggtatgccaagtggcggtatgacgatctccccattgttccggaaagctggatgttcgaggtcacgaaggacaaagcacagcagttcaaggtgctgtccgctctcatgaaggacaagcgcgtcaccgagctggtctgcgcaaccgatgcaggacgcgagggtgagctgatcttccggctggtctacgacaaagccggatgcaccaagtccttcaagcgtctgtggatcagctcgttggaggactccgccatccgcgaaggcttcacccatctccgggacggcaaggaatatgaccgtctctatgaagcggcactcagccgctcgaaggcggactggattgtcggtatcaacggcacccgcctgtttaccacgctctatcacaagaagctggtggttgggcgcgtccagacgccgacccttgcaatgctggtggagcgcgacgggaaaatctccacgttccagaaggagaagtatttcaacgtccatgtcggcaagggcgatctgaccgccgatctggaaaaggttaaaaccgaagaggaagcaaaaagaattgcggcggcttgcgagaaaaagcaagccgtcgtttcttctctcaagcgggagacgaaaaccgtcaatcctccgaggctctatgatctgaccaccttgcagcgcgaggcaaaccgatactacggctttaccgcccagcagacgctcgatctcgttcagacgctctacgaaaagaagctcctgacctatccgcgcacggacagtcagtttatcacggacgatatggaggacactgcccgtcaggtcatttctatcgtctgccgccagcttccgcttttctccggcgtttctgttactccggacattgcccgcgtaaccgacaacagcaaggttacggatcaccatgccattctcccgaccgtccagcttgaaaagcaggatgtttcggcgcttcctcagtcggagcagaaaatcctcaatcttatcgggatgcgccttctgtgtgcgaccggcgagaagcacacctacgcagaaacgcagatctcgctctcctgcgagggctacgagttcaaaaccaaggggaagaccgtcgctcaaaacggatggaaagccatcgaagagctgttcaagtcctccctcaagacgaaggaaaaggacgatcccatgaagtccctgcccgaagtccatgagggcgatattctggatggtgtgtctgccagcgtcaccgaacacttcacaacgcccccaaagcagtacacggaagacacgctcctgtctgcaatggagactgccggaaacgatcagtttgacgataacaccgagaagaaaggtctcggaacacccgcgacccgcgccggtatcattgagaagctggtgaagtccggctttgcagagcgcaaaggcaaatcccttattctcacaaaggacggctgcaacctcgtctgcgtcctgccggaacagatcacctctcccgcaatgacggcggaatgggaaaacacgctcatggagattgagcgcggcaatgcggatgcagacgcctttctcagcggcattgtccggatgaccggggatctcgtgaaagcctatccgtttctctccgatgccgaagcccagcgtttcggcacgggtaaggaggaaatcggcaaatgtcctcgttgtggatctccggtctacgtcggtaagggcaacttctactgctcgaacaaggactgctccttctgcctgtgggaagacaacaagttcttttccagcaagaaaaagaagctgacaaagaagattgcaaaggagctgctggacaagggctggtgccgagtgaccgggctttacacgccgaagaagcctcagctctacgatgctgtcattcgtctggatgacagcggcggcaaatacgtcagcttcaagatggagtttgaccgatgagccgcccaaagtatattgcctcttgcagcggaggcaaggatagtgtggcaacccttctgctggctgcacagcacaatgaaccgctggatgaagccgtgttcagtgaggtcatgttcgacaaagacacaagcggcgaagtcccggaacaccgggacttcatttatgaccagctcaagcccttctgcgaaaaggagctgggcatcaagttcaccattctccacgcggacaagacctacgatgaggtgttccatcatatcatcacccgcggaccgcacaagggcgaggttcgcggctttgcatgggctggtatgtgtgcagtcaatcgggactgcaaaatcccgcccgtccgaaagtacaataccgcgctttctccggacactgtgagctatgtcggcatcgcggaggatgagccaaaacgccttgctcgtctggatggaataacgaaggtcagtctgcttgccaagtacggcatgaccgaagcggatgcctacaagctctgtcaggaacacggtttgctttccccaatctacgctcactgccgaagaaacggctgctggttctgtcccaacgccagtgactcggagctgctgcacatggtcacaaagcacccggatatgtttgacagactgattgaatgggagaaggaggataacatctttcatcgtcggctgacacgcagagaaaccccgtctgaggtaaaggctcgtttattgagcaaatctcagacgggggtttcttctccccgaaacaaatccgaaatggaggtttgaaatggctgaaaacaaaaatgcacagcaagtccgcgaaatcacggacaagctggaacagggcatcaaggagctgtttgaatccgagcggttcaaggaatatctccgcacgatgtccaagttctacaactattccttcaacaacacgctgctcattgcgatgcagaagccggaggcaacctatgttgccggttatacctcgtggcagcgtaactttgagcgtcaggtcatgaaaggcgaaaagggcatcaagattcttgcacccgcgccgtacaaggcgcaggaagagcgtgagaagattgaccccgcgacgcagaagccggtgatcggcgcagatgggaaggctgtcacagaaacagttgaggttctgcgtcctgccttcaaggtggtgagtgtctttgatgtttcccagacggacggcaaggagcttccggacatcatcgtcgatgagctgaaaggcaccgtcgaaaactacgaggcgttcttcgacgcgctcaggcaggaatctcccgtccctatttcctttgaggacattccgggcggtgcaaagggattcttctcgccggttgaaagccgcattgccattcaggagggcatgagcgaaatccagacggtcaaaaccgccattcacgagatcgcccacgcaaagctccacgccgtcaagccggacgagaaagccgcgccagaagataagaaggatcggcacaccaaggaggttgaagcggaaagcgttgcctacaccgtctgccagcgttacggcattgaaacctcggactattccttcggttacatcgccggttggtcatccggcaaggaaaccaaggaactgaaaagctctctggacaccatccgcaagacggcggctgagatgatcgagggcattgacgccaagctcaaggtgctgctggcagagaagtcacagtccgtcgagcaggaaaccgttccggaggaaaagccggaagtccccatttaccgcgagacagcgaattacgcctatgaagccgatgagctggagtcatatcgtgcttctctcgccgcaaacgtggaatgccgcaaagcgattgaagcggcgatcagctccaactacggagataaccggctggatgcggatgctgccgtaaaaagcgtccttgagcaattctctccggagcgtgtccgatatgtcctcgcaaacaccattcagcagaaagactttgacgggcgcattccccagcccctcaaggaatgggcgaagaacgttgaggtctgcccggagaatgcctctcgcttccttgtggataaacccaatcccggactgacggcacttttcgtggatgcgttccgtcagcagaccgaaccccagaaggaagtcacttctgagaaaacagaggaaagagacccggaggtcgttgcatgggagaacggtgagattacctctattgaggtaaaaacagtggaggtcaagtctccctttgcccccttgccggaggaagcggcaaaagcaccgaaagcgcaccgcctgactgccgaagagaaggagatcaaagccgccgtcatggacacgctcaaggggcagatcgcctataacaacgacggtatgcgggcgtcctatcgcgcctctaaccactccttcaatctgctggcgcggaacggtgtcaggatcgatggcaacacggtcacgcagaacggtgagccgctgttcaaaatccatcgccgtcatgcggcgcggaaaacacagggctgttaccgtgagctgatgccgacgctggaatacgtcaagcaggagcagaagcaggaaaagccctctatccgcgatcagctcaaagccgccgcgaaaacgcagccggagaagaagtctccggtcaaatccaaaacacacgacatggagttgtgagaaaggagacgcatgaagaaatacacagacattgacatcgttgcggagctgcagaagctcgtggacagtcatgtagacagctacaaggaagacttcgacatcgacaagcgtatcatccgccgcgctgccgaaagccggaatcccgaagacaaaacactgatgtggttctgccgtccgcatgggacgcactgtcttaacgaaaatcaggtcttcattcagggaacgcgagatcacaacaccttccgtttctatgcggagcagacctacgacgagtgcgttgcccgcgtcattgtcccgaaaaccgtcaagcacggcaaggtcttcggagatgtctttgagatcaactaccgggaacaggcggcaaatgtggcgcagaactcggttgcgccggatcatgaccggctgaccttcgcagacggctttgtgctggatgcgccctgccgcagcagcttcgatgcagcaatggctctggtcggtgagcatggcggcgtcaaaacccaccagacgctcccgaaggacgcggaggcgctggcagaagtgctgtccaaacagaaaagccgccgtgacagacttccggaggcagagagaacggaggcgcttgcgtctctgcccgttgctgaactccgcaaatatgaggcaatcaaaaaggctcaccctgacgcgctggtctgctttgcccagaacggctattttgagctgtacggcaaggatgcaaaaaaagccgcgccgcttctcggaacaaaactccttgagaagaaggtgcgcggcaagccttccatgccggttactggcttccgtgaaaccgcatgggtagccggttctcataagctctggaagtccggcgcagatgtctttctcagcaaggacggcgagaccttcaaggaactcaaagccgcagattacattcctgttggcgcgacgctgaatgtggacggaatcaagtgcagaattgacgcggttgattttgctgccgatgaagtccggctgaccaacatcgaggacaagaaccgccccatccgcttttctgagagcatccagtatgtccgcgcctatgtggaggatgccggaactgccatctacgacaccatcccaaagaagcccgctgcccgtgaatccatccgtgacaagctgaaatccgcgcagaaagcccagccgtcccacacaccgaagccgcagaaaaacaaaggaaaggatatggtactctgatatgaaaaactttaccgtagaagaactcaacctcatgtgctgcttcaatacgtccagccggaagcggctgatcgacgatatgaagagcgtcaccctgaacgacatggacggagagatcgcagagctgatgtataagaccatctggaagctcgacgccatgaccgacgcggagtttgaggaactgtatatcatgccggacggcatggtggatgactgaaaggaggatgcctatgcccgtattagacggtaattttgaagccttcgtcacgaaccttggcaagtacaacgagggtatgctggtcggtgagtgggtgaaactgcccaccaccgaagaagagatgcagaaggtctttgagcgcatcgggatcggcaagcaggatgagttcggtcagccctatgaagagtggtttatcaccgactacgaatgcccgatctatggcgttcagaagatgcttggcgagtacgagagccttgataagctcaactaccttgccgctttgattgacgagctttccctgagcgatcaggaaaagctcgctgccattatggaatctggctgcgatgaggtcagcgacatcgacgatctcatcaacctgacgttcaatctggactgctacgacatcatgcccggtatcaacgacgaatccgatctcggctactattacgcccacgaagccggtatctactccgaaaaagatctcggtcctctggcaaattacatcgactatgaacgctatgggcgtgacattgcgatggatgagcagggacgtttcaccgatgagggctatgtccgcgttgcaagcgagaggtgggacaggcagtttgacggggagcttgatgatattcccgacgaataccggatcaccggctcaggggaagccgccgagcgtgacagcaccattgccgttctcatcgttgagccgggtaaggagccttatgtgaaggagattgactcggatctcaagtccttgcagcatgaggtcggcggctgcatcgaggcgatttatccctacgaagacccgattgccttagtctgcaacgaggaaggcaagctggaaggtttgcccctgaaccgcgctctgcgtgatgaggacggtgacatctacgacgttgttgccggaacattcttggtagttggcttgacggatgacagcttcggctctctgaccgtagagcagatgcagaagttctctgaccacttcaaagtgccggagcagtttgtcaagctgggcgataagattgtggcgattcccatgatctcgaaggagcagcagaagcaggaaagcatcgagcagaaggactttgagatgaatgccgacacctccggtctgacggttgccggtcacatcgggacgtggcacaccattgaccagcacgaagtcggcggtcacagcttttatctgatgaagcatgacacctacggcgatgaagctgcctgtatcattgtcgatgagcgcggcaagctcgtccttgatgatgtctacaacggctttgacgatgacacgctccgccttcttgaccttgaggtcaaggaagtgccggaaatgcccgatcccacgctctccgttcaggatatgaaggactacggctacgcatgggctggcgttcttcccgccggtcaggaggcggctgagaaggctttggagaagggctgcgaggtttaccgtctctattccgataacaccgagggcttgtgcgtagatgccaaggagattgccgatcatgcggcaaagggcggaatgctcggtatcagcaaggaaagctggatggcagctcttgagaaggaaaactacctcaaggcagcggagatgtcgatggaggatgactacggcatgattgatgggatcatcaacaacggtccgaaggaggacaagaccgcagaggtcaaagcccccgaaaccggcgaaaagtcctccatcatggacaggctcaagtctgcaaaggctgaaaagcagaaggaatgctgccctcccaaaaagcacaaaggagagattgagttgtgagcagaagtcagaaatggcggcaggagtggtcgttcttcatcggggacagcggacgccggaagtataaccgcttctgcgtccgctgcgtccatagctgcaagcagagtttccgtgcggatctcatcgcctgtccgcacttctcccgcaaggcatcgaggtgtagacagttaggggtcgaaaaagcctgtgattgcaagcctcagagcggcgcaaattgaccagcctaagtgattgtattccctgcgtggtttcatctttagcgcggaaataagtgtcgatttcggcacttgtttgaatgcccggaaaacgaatcaagagcctctgtcgatgcccgttaggggtgtcggcagaggctctttttttatgacatattcaaaatagcggacagcagctcttgaacccgttgccggtattccggctttatatccgaaatacgtctggcaagcgcaagggcttccgcttctggctcatcggtcccaaagataattcggtccgcactgacgcccagcaaacggcaaagacgctgcaaggcttcaagagaaataccggaagcaccacgctcaatagcactcaggtgattcggcgtcatgccaagcatttctgagagcgtgtcctgcgtatagcccgcctgttctcttgccacttgaatattgccgccgatttcaatattgatgtccttcttctctcgcatagcctcaccgcctttgcatttagtgtacctaacggcggtgtcattatccacggtacgttgtcgttgattttactaacgacaatacgttgactgcccgtgatgagggtgatagaatggagttacctaccaaaagagtgaaagaaggggtgtcatgtcgcgcattattgagtttagaaagtctgctcaaaaagctgcaaagcaatccgttcaaggcaagacttgtgcgtttaccggtcatagaccgcagagtcttccgttcggctttgatgaatccgataagcgttgtacttctttgaagtctgttatgcgggatcagattgtagcactcatcgagaacgagggcgtcacgcattttattaccggcatggctcttggcgtcgatatgtacgctgcggaaattgtactcgatttgaaatcaaaataccctcacattactctggaaagcgcaatcccttgtgagacacaagtgatcaaatggtctgtggcttcacgggaacggtattataatatcgcagcaaagtgtgacaaggagaccatgctgcaacgggagtacacgccggactgcatggacaagagaaatcggtacatggtcgatcacgccgattatattctcgcagtatggaatggatgtcccagcggtaccgggaataccgtgagatatgcccacaaaaagggcaagaccgtcatcgtcatcaatccggtttcccttgatgtcacgcgggaataaggcaaaaaaatcccttctgaatcaagcgttgtgaaaaccgtgaagtatttcccgatagcgaatacccattgcactgctcagtgattattgaaaacgtgtacggcgtatgctgcccagtgaacatctccatggaacacatcgaattttcgcggcatcgcaaaacggaaagtgtcaccttatggacagtccattgccgagggaaaaataaatcgctggaaacgggaacgcccccggcactgtgcgtctggcacagtgtcgggggcgtttttccgtgtcttagttatgagccagttcatttaggagcagctttcgatagtccacatccaagatgccgcgatggaagtccatcaaacggtgttcgtcgaacagcttttcacagagcttggtcagcggatgattcattagctttgcagaaatgccagtctcgttgaaaaaccttgcccatgtgaagacctcttctaaatcctcctgcccaagcgtggcaggaatgatagcgttgcagagacggacaatggggctgtccgcaaatcgctctgcgacttcctccggtgtgcattcatagcggtcacagtcaaaggaaagcgcatcctcaattttaagataattttcggtttcatcccgcgtcaaggttatggtgtagtctcccataccggacggcacatcaatattctccatgacatcaagctcgaaacgggagccgccgatgatcgcttcaaaggagaaggactgacagattactgctgggtttttgtctatcttgtcctcattcagaaatgacagcggattatactccgtcagttcccagccgattttacctctctctgtttgctcggcaatctgctggatcagatattgttcttcttcgtgcagattttcattgtacaacatgatacacctccgttttctgattgtcgttttttggggggctgctctatgtttccgaagagactgccgtttgtatcatcattccttggctgagggcagaccttcgtaaaacttcctaagttcgtccaaactgcttgtccgatttttgataggcagggagtcccatgtaatgtcatgatagcgttccggcggctcgtcccgcagtcttcggtcgataatgcagacaatgccggtgtctgtgaaattgcggatcaatcgcccgataccttgcttgagcttgataatcatttcgggaacgcggacatccatcagggcatcctttgcgacggaacacttatactcgataattggatcggggacagggaacggaagccggaaaatgatgacattggaaaggctttttccttcaatgctgattccttcccaatatgcacccgtccccagaagtacggagttcgtatcttccttaaactcaagcagcaccttgtcctgcgacgatcccggctgctgcatcaggattttgtacggaagatttttctcactgagaatggagtagacctcttccatgtcggtctttgccgtaaacagcacgagtgcctttccattggaaatgctcaggatctcaagcagccgctccacacccttttcaatgaaggcttcatgttctctggtcgggtgcgggagatcgtcgcaatagtagatcatggcgtgttcatcgtatggatatggggaaggctttggctcggataagcagccgcgatcaccagcgggaaagccggtattgctgataaagtaagaatactgttcttccagagacccgctcgtggcgttcgtcagcgtggcagaggtcaagatggttctttcatcaccattgaagtataggcggctcacaatttcttttgtgtttttagggcaatagacgagttccgtgttgctgccgtgctgctcaatccagatcagcatatcatctatccggtcaagaagctctgaaagggactcgctgacggcatccagatcatcagaggcagcaaaggaacggttgtttctgaaatccatgctggaataaatctgaatgctggacgaaaggttgtgtatggcggcgttcatctcggtaagcagttcaatcgcactgccgctttggtcaaagaaaaagcggtcagcgtagcgcatatcctgatctgcatcgtcgatctgcttttgaacttgtgctttcaggcagttatagaaggcgatgattgcgctctctgcctctcgcttttcaccggacacactgctttggtcagagggtcgcagttcatagaatgcgcttttaatcattccaaagagcataccttgcccgaaacgctccgttgtggcactccgcaccttatcatccaagttgtgcgcttcatccacgacaagcagatcagcggcggcgttaatcagtccgtcctgcccgcgtcgtagtttcatgagatgctgggtaagaaagtcctgattgcacagaacaacaccgtccgtgtattttaacgatgcacggaccttgtaatacttgcatttcttttcgcaggagccgcaattcttcatgctgaaccgctgcacgtttaccttgtcccagacgccttgcggcaaaacctccgggaaatccttgcgttcctcatacccctgctggattccttctttgagcgcgtccggtgggtctgctttcgggtcacacatatactcgtctgcgcgtttgttgcagagataatgggtctgtccttttgcgaggatgacatctctgttcagcccaagaaggggcattaccgcgtggacatcgcgccagagctgttcttgaagcgcaatggtcgaggttgcgatgatgaccggcttgttcatgcgtttgctgtacagcagcaccggcacaagatagccaaaggacttgccaatgcccacgccagcttcaatcgcaaagtgctggtcgtttatgagggcgtccacaatctcaaatgacatatcctgctgcccttcacgcatttccaatccatgctgcggggcttcatcccaaaagaaggtgctgacttgctcactcatggagtacagctctgcttttctgcgctttttccgttcctccgatgtattgaatccaaaatagaatctgttgtccatccacattcctcccggaatagaaaccaaggctatccgcgtttcagttcaatgctgacgtttccgttctcgtcgatggtcagcgtcatgtgcttgatgtgcttctcatagaactgccgccgctctgcgggagacatttcgatcctcgtgtttcgcagagctgcatcaaacatatcgttgacgttcaggtgaacggagttgtcaatccagcggtacatctccttgaacagtgcgtttttcttgatgtcctcgctgttgccggagtagaagtcatccagatagcagtagaatatcccggattctgcaagtgctgccttcatatccggtccgcatttttcccgctcaatcatgacaaggaatctggcatccggtaaggaagagatcagcccccagtagtcggaatcgcttgagacgatgacgaaggaatccacttgcttctggtagtgttcctgacaggctcttgcggtgagcttgatgtctaccagtgatttgttctgcttgatccgctcaatcatgatatgctcaacgggaatgcgggtgtagttttcaagaatccgccatgccgtagcggtgtgtacgtcatcaaagagaatgatcgccgtaatcttttgcatgacctcataatcaagatttttgagcgtggcacacagtttgtacgggtcggagttttcgcagtccaccaccaatacggttttctcgctgtcatctatgaagtcgtagatattgttttttacaaaagcccctgcatcagagactttactgtattccgtgaaggcgtcgcaatgccattgataaagcagggtagcaaacttcttatcattatagaggacattaccctcgtccatcggtacccagttgatatacatttgataggggtagtaggagagacttgcgtaataaatatcggcagcatctttcgttccgtcctctgtcaaaccgtttggcatgatgaacagctcttttatgtacgcccagttaatccagattggaaagaggctcttgcagttgttaatgcggtctgaaatcagccggttgatctcgataatgtggtggcagagctttgtactcgacttttttataaagctgattccgtcatttgaaagctgctgcatactggaagccgggatgatctctggcattgaaagcagccctcgatactccattcgcatgatgtcatttattttccggtagttgcgctcaatggcggtgcggatgatacatagattacgaatgatacgggcatttttatcctgttcaagccggttgtatatctctatcttcggcggctcgtgttcattttggaaaatacgaagcgggacgccgatcaggtaagcgacctttgacacaagctcataggtgctgtctttgtaggcaatctgttctccggcatattcgattccattcaacatgactgaattgcccatgatctactcctttctcgtaggggagttaagcggtcattacattgtccgtccacatctcacactggctcatgacagtctggacagcatcatccataccctctggcggatatttgtgttttttcagcaaccttttgaccaggcggcgcattccagctcttgcgctctctttcttttgccagtctattgtctggtttttgcgaagcaaatctgtcagttctttcgtgatagcaataagctcgtcatgctcgtaaaagtccttgattgcttgcggctttgtgagggcatcatagaaagcaagctcgtccgctgtcaatccgagtttttcaccctcggcggcagcagcggcaatgtctttcgccagcttgagtaattcttgaatgacttcctcgttggtcagcattccgttcaaatagcggttcattgcgctctgaatgatttcggagaacttttcagacttgacaatatttgttcgacggtaaacagagacctgttcggaaatcagttttttcaagagttcgactgcaagattcttctccttcatgtttgccacttcttcaagaaacttcggatcgaacaacgaaaactcagtctggacatcggagaagaggttgataacaccttcgctcttgatgctgtgcttcaaaagctcgttaatgcgctcatttacttccggaagcgtaaacttctttccggtaccgcctgaaaccaagcgcacggtcattgttcttacggactcgaagaaagctgcctccatgcgagtttgctcgtctaccaagctgctgcacagcgaaagtgcctgcttgagaagcagggcttctttgataaacacattctgtgtcttctcatggtcgggaagctcgtactctgcaacactcttgccgagtatgaagttcactccgccgctgatgagcttcgccctgtcgaggtcgcttccggtcatgaatttctcataactgaatccgtggaacaaatctctgcaaatagagagcttttcaaggaacttcggatatgcagccttgcttacatctgtatcaccatagttcttcttgtctctggcagtatagtcgttcattgcctgtttcagtgcagccgcaataccgacgtaatcgacaaccaaaccgccttctttatctttgaagacacgattgacgcgggcgatagcttgcatcaggttgtgtccagccatcggcttatagacatacatcgtagcaagggagggaacatcaaagccggtcagccacatatccacgacgatggcgattttcagcggagagttgttgtctttgaatttccgcgccatatcgtccttatgagctttgttgccgataatctcacgccattcttcgggatcgttattgccttgcgtcatgaccactgcaatcttttccgtccacgctgggcgtagctcaagaatgcgcttataaatcttcattgctatgggacgcgaataagcaacgatcatcgccttgccggttaggatattctcacggtaattctcgtaatgatcaagaatgtcatttaccaaggaattgatcgtctggtcggcaccgaggattgcttccatctgaccaagttcctttttgctcttttcaatgacatacggatcggcgttgtcagccataatgtcatactcattatcgatcagatggagggtgttctcgtcgagtttcaggtgaatcacacggctctcgtagtagacgggtctggtcgcgccatcttcaactgcctgtgtcatatcatagatgtcgatgtaatcaccgaagacctctcgtgtactgcggtcttttgtggagatcggtgttccggtgaatccaatgtaggtcgcattaggaagcgtgtctcttataatgcgggcagtgccgataacggttttcgcctcgacttcgccgttgtccttctgcttgaccacaaccttctcattgagaccatattgcccacgatgcgcttcatcagccatcacgataatgttccgacgctccgaaagagcttcgttgctttcttcaaacttctgcatggtcgtgaagattatgccgtttgcctgtctgtttgcaagcagttctttcagattcttgcggctctcagcgtgctgcggcgtttgccggaggaagtccttgcagcgggcgaattgtccgtaaagctggtcgtccagatcgttacggtcggtaatgacaacgatagtggggctttctaacgcttcttgcagataatgagcatagaagaccatagacaacgattttccgctgccctgtgtatgccagaagacgccacccttaccgtccgtcacggttgcgtgttttgtagactcaatcgcctttttgactgcgaaatactgatgatacccggcgagtatcttgaaagtattctgtccatccacattaaagcagatgaagtttttcacgatgtcaaggaagcgggtcttctcaaacagtcctacaaagaatgtgtcaaatgatgcgtgttgcgtattctcatagctgccgtctgttgttttccactccataaagcggtcttcgccggacgtgattgtaccagcctttgaagtggtcaagtcgctcatgacacataccgcattataaatgaacatagaggggatctcatacatatagttccggagctggcggtatgctgcggaagcatcggtttcttcgcgggacggagacttcaactccacaatgacgagtgggagaccattgacaaagagaatcacatctggtcttttttcggagttctcaatgaaagtccattgattcgcaactgtgaactcgttactggcaggatttttgaagtctacaaggtaaacaagggtagagcgttcttcacccttgtcatagtattttaccgggactccgttttggaggtagtccataaagaccatgttcttctgcaaaagcgttccggtttcaaagttcttgagcttatagattgcctccgtcagagcgtccataggcaggctcttgttgatccgctgcaaggaaggtagcagaacatcctcataaagcggcgagtgataatcgcgctccacgtccggtccatagatatagttatagcccagttcttcattgagaagctgcaagacagcgttctcgtaatttgattctgtaaaatatcctgccatagtatgtcactcccttttacgccagactcgccccgaactgatccagcgtgttttctgcatctctgtcagtgacgggcttattcatcgctttttcaattaggtttagaaggctttttgctctgtcgatgaaatagccattgaagtcatctgccttcaattctgcatagttgataaagtgcgattccacccgtgcttgcaactcattctcggtcagtccatcaaccttctttagaattgcccccagatactcactcggcgcatttccgccaatcgagcggttggtggctggaagaatcggggtcttgttaatgatggaattataccgttcgcgcttgatgcccattttctcgcaatatgcttcggggaatatatggtgaatatccggagactcaagcatactgtttacaatgtcaatcgtcgtgttgttcataaagtcacgacacttctccttgtaaagaagagccattatacctttatatgccgcgctcaagcgagtttgaagggttagcagccgcgtagaagaaaagactgcgctgttaatcgtgtgcattgcattcggacgtccattgacctcttcaaccatgtcctcaatgtcataggcatagcgggtttcgttcgcaccgccatacatctcacccaaaatcccgcaccaataccaccgagaaagagttttgattgtgtttggctcattgcatttggattttccgagaacagcgcagattgccgcaagtggaatcaactgcgttgtatagggcaaatctctttgacggaaaacgcactgatcacgaagaagaaactcctttgcgattttgaacccagacagcactgcatcccggttcgctatgtacgattcataaggaagtcccagaacatctttctttttgcaggagattgtgtttgtctttccagactgcttgttcaaatagcttgtatagagacaaaccgttgtcaggaaggtagtctcatcaatcccatcgaacaagtctgttctcagcgtgtcaccgaaaccgcaaattgtatttcgacactgcacccagtcttttctcaggtcaaagtctcttgtggcataagttgcggtaacaagctcaaacaccgtgagaggaacaccgccagtattgacgttctcaaacaccttgcacactgcctctcgcggcgtggacttgtccagtgtaatcacaggcagcttatacccggaaattgtattcagcacatccgcttggaaacgcttgaactcgtccattgcttccggcttcattccgtagtgcgtcatgtagcccatgaaccagtccataactgcgttgctgtcgaatacgatattgaccggaaacagcttgttctcgtattcatattctctggtggagagatcgagcttcacatcccggtcaaagttctctttaatcttacggtcttcggggatggagaggacagcatcaaaacgatcctcatcatcgtcgaggcacttctccattgagagatagtaataacgcttaatagccttgcctttttctgttttggtcgagaccggctctttagaggatgttgcctgataaattgaagtaagccgctgctgaccatcgagaatcaaatgctccggcttcacagaaacgccttttacgcccgtaattgtacggtatttgaattggatgtccggattgccgtattgcagccgcatgatggcacccataggataaccctgtgataagctggcgataatgcctctaattcggctatcatcccaagtccagtcgcgctgaaactccggcaactgcattgagccggacttaacttccgctaaaagctgacttaggtttgtatcaagagattgtggtgaaataatcacgtctgcgcctccttcattgagtcttactgatcggacgagcccagtctgctttccaaatctgaaatatcactgcgtatggaagagatgtccgactcaatatcttcgattctcgaagttaatgttatctgctgaaattgaatatcctcgatctgcgcgtataagccacgcattgccaaaattagctcaaccatcagccccttgtcatcaagggagagaatgcgttctttttcagtctgtatcttttgagcctcctgttgaagccgctcttcctcacgagctgcttctgctgcggctttctcaagacgaagccgttccttttcaagccgctttttctggcgctcgtctttgcttcttttcaagctctcctgaactttatcaaacatggtatatcctccatatcaggtaaacgataatttacggcagcaagctcaagccctgtttaagaagtggtttgttgataatcctgacgctatattatggaaggaaggcaccttctccaatctcattgaaaagactatcagcggagattggggcaaagattctccttctggcaacaacacagagatggtttactgcattcggggagcagatattccggaagtacgtgcaggaaataaggggaaaatgcccacacgctatatcttgccaaagaactatgctgctaagcagcttgttgacggagatatagttgttgaaatctctggtggtagcccgacacaatctactggacgcgccgcagctgtatcagacgctttgcttgctcggtatgataagggaatggtttgcacaaacttctgcaaagcccttaaaccacgtgctggttacagtatgtatgtgtactactattggcagtacctctatgaccgggacattttcttttcctacgaaaatggaacaacaggcatcaaaaatcttgacatcaatggatttattgaaacagagcctattgtcattgcaccggaggacttggtggagaagttcgatgccgtttgccaaaccgttttctcgaaaatctatgccaatggtatggaaaatgagcagcttgcccttgttcgtgacactatattgcctaagctcatgtccggcgagattgatgtctctgccgtccagctctaagccgctaaattatcgtttagcttttggttgttctcaattttatcatccagtgatgagagaacagcggctatccgtttctggttgttcagatccggtaaggcgatttcgacctctccaagaagtttcgtattgatagaaggcatggtcgcgcctactgcaatattccgaacaaactgcttggtttcttctaaacagaaataataatataggtacagagaatcaaccggttcagttgggcggactcgtaagcaacgtcccgagaacatccatccgtcgtgtgatttatcaacataggaacagcggtcaacagacccaactcggctgaatacaatatcgccagttgaaagagtatacttaatcaaccgcgctttatcgctgtcggaaactctggggagattttgctcggtgaatactcggttcccaagatgttcaacagtgacaataggggttccggtttcaacgtagtcttctttgtggagttggcttccgaacggaccagtctgtatgtctgcgatggttttaagttgcgtcatcctcattttcatcccatcctatccaatgtattttctatgtgccagcttcacattctgttgtttcaccattgcatagtgcatggtggtgtcgattttctgatgccctaagagctgctggacttgctctatgggcattcctttgtctatggcagttgtagccagtgtacgcctgaacttgtgagggtgaaccttcgggatattcagacgctttcccagctcccgaaggcgtgtctccactccgccaatcatcaatcggtcaaagggcgctttcagtgaaacaaacaaagccgggttttcatcggttctgccctcaagatagttttgaaggtgtatcttcgtccttgcatcgaagtagaccaatcgctctttattacccttgccgataacaacgcattcgcgttcgttgaagttgatgtcttcgcggtttagcgtgacaagctcaccaacacgcattccggaggatgccagaagatcaatcatcgccaagtcccgtgctgttgtgcagttgtcacgcatcagctctaacgcttcatcggtgtaggtgtccttgaccacctttgcagtcttgactttgtgaatccggcgtaccgggcttttcaagataaagtcctcatcctcaagccaagagaagaagctggacagaatccgacgaatgttgtctatggttactttgctcgacctgcgctgaacctgatagttggtcaaatagcggcgcaaatcatctgtggtgatctgttgcacagcctttccaactctggaaatcagagcctcaatcgtcttccggtagtagctcagggttttctccgaacagccttcgatccgctttgccgtgataaatgcttcgactgcatctgtttcttctgctgggattgagccactatcataggtgatcgttgccccaactaatgtcgcagtcattgcatcccgaaggtgcatgagctgttcgttgttgagatacggaagcattttttgctgtatctccgtgatgagttgttctgtcattgtcgtgtctcctttcgaggtaagagaacgacattcagtggcagtcccttttgtaaaactctcgccactggtgagagctattcaggcggtaaacgataatttagcggcttagagctggatggcagagacattgatctctccggacatcaactttggaagaagggtatctcttagtatggacagccgtttattttccgctctattagaataaatctgctcaagaagtggtgaagcaatggtattaaacccagctaactcttcttccgatggtagaacaacagggtatgtcataatctgctgcttatctccacggggcattttcgttcctttcgatccagcaaccataaatgcgaagaacttgtcggcatatagagtgctgaataggtacgccgagtaacacggctgacttggcgtaaagcaaagaacatcggttgagcagccacatttgtcctcacagtagacaatcttcttaaagtaaggacgaatgttggaaatcaacgtatcacctttatggcaagcggttgtctgtgatgtagttggtaggcttgtcgcctcggttgaaccagcttttcccgacagcatattttccgttgagaagtaggttctgacgttcaactcagagacagctactttgtctgttgaatatgagcaaatatccgagaggactccctgatttactgccaaaatgtcattgccgaaccgcccttgatatatcgtttgcaggagatcagctaaattatcgtttatctctttgtttacaatcaacttcctatcaatagattcaagcgtacctacgatggcgttctgctcatcaaatgacacggggtagttgatcataatttcatctaacaggcggtcacggtttagttcagtttgtcccgtagagccttcatccaactgcaagacttcccattggtgcgctttaagagcgtaaccaaggaacttctgcgttacctttccgtttgaacggataaggatcatgtgtccgtctattgtagttgcggacggaacatcttcaatttgcgcaattctcccagcagttcccgcacctgtcgaattgatcagaatatcatcaggtttgacatatcgttcaggagggactttctttttcagggtatcatgcaaccttgaatctccatagcttattcggaaattccgattgcacttttgattgagaactctaatggttgtctcggatgcttcttctgcatacgaaggagcaattcctttggaaatatacccaaccagctctcgtaacggtacctcatgccactcagatgtcatatccaatcgcccccagtcgttctttgatctgagcttcaatttcatgagacttagtgaaaagctcagacagttcagaagtcaggcgtcccattttctcttcaaacggctcaccgtcatcttcctgttcctcaatgccaacatagcgtcccggcgtgagaatgtaatcttgctttgcgatgtcctgcgtagtaacaaccgcgcagaagcctttttcatcttcaagcgttccttctacaaaggcgttgtaggtgtcggcaattttcttgatgtctacatccgtcagttcgcgcagcttccgcgtaaccatagtgccgagtttccgtgcgtcgatgaatagtgtcttgcctttctgcttcttgttctttgcaaggaaccagagcgataccgggatctgcgtcgtgtagaatagctgcgtcggcattgcaacgatacagtccacaaggtcagcattgataatgttcttgcggatttcaccttcaccgccggactgcgaagaaagcgaaccatttgcaagcaccatgccgatacgaccattcggagcgagatgccagatcatgtgctgcaaccacgcgaagtttgcatttccagcgggaggcgtaccatactgccaacggacatcatcaacgagtttatccgcaccccagccggagagattgaagggaggattcgccataatgaagtctgccttgagttgagggtggcaatcgttaaagaacgtgtccgcattaaacttgccgaggtcggcttctataccgcgaatggcaagattcatctgcgccatcttccatgtggtcgggttggagtcttgaccaaagacggaaatcttgttgatgttgccgccatgattttcgatgaactttgcggactgaacgaacataccgccagagccgcagcacgggtcataaacacgtccattaaacggttgcaacacttcaacaagggtacgtacaacgcaagagggagtatagaactcaccagcaagtttgccttcttgctcggcaaacttggagagacagtattcgtatgtccgaccaagaatgtccttactgtttccatgctcgatcatctgaatgttggtgaagagatcaaccacttcaccaagacgccgcttgtccagctctggacgggcgaagttcttaggaagaatatctttgaggcgcttgttttctttctcgatactgcgcattgcgtcatcaatcaccgtgccaatttccggcgtgtgagcggcagcagcaatcgcactccatcgtgcattctcagggacaaagaagatgttttcggcagtgtattcgtcctgatcctcttcaaatccatcgccttcttcaaccagttccttgtactttgcctcgaagcgatcagaaatgtatttcaagaaaatcaatccgagaacgacggacttgtattcggatgcgtcgatgtttccgcgcaggacgcaagccgcgtcccagatttgtttttcaaagccgatattgcttgtgttattctcagccatttcagcaacctccaaagttatagtttcacacttactatcctacaaaaagagctgtacgaaaaaccggacttagttcttgtccgttcgcacagcctcacatatatctccgatgtcacagttcaagtaatcacaaatgcgcagcaaaatagagagggacacttcttcccccttattcagttttgtccatgttccggcagacaaccctacttcatgtcgtagagaagccctctttatgtcgcgttccagaagaagcatccatagtttcttatagcttatgcgcacggcaaccatcctttcgcttgcttgcattcaacatcgcttataatattataccggatttcattctcaaaagcaatccgttgatgcagaaattaaagaaatagtttcaacttctcgaaccttctctcaaggatgcagggcatctccggtcaacagaagatgccctgcttttgaagagattattcgcgctgtgtgccgcgcagatgatcacggtcatggtcagcagaaggagcgagaaacgtatcaacattagacttgattgtctctatttgctttacttcttttttgagcttcgcacgttcatcatagagtcgctgctgctcgtcaagaagtcgctgctgttccgcttgcagtgtcttcaagctcggcagtttttcatcgccctgcatggcaagcagcgtactccgcgccgcctcaaagatcacaagttcggcttcatgctttgccttgaagctcggcttgtctttcgccttctggaaggcgtcatatacgggttttaggcgctggtagtttgagatgtttttaataagcggctggacttcccgcagacgtgcttcaacgactttcagttccttgccggtacgatcataggagctgtgaacatcctcgaccttcttctcaagatcggcgtattggagcaagttgttttccgtgagatagttgagcgtccgtgccgcttccttgaggatcgtgagcttggctttatactcatagcccttgctgtcgataagtctgatccgctcctgaatatctccgatgagagagatgcccttcggcacggtctgcctccggtttctgcgcggcgtccgtccggcaatccgctccttgatgcgttcctcggtgtagttctctccgatggttttagaccgggtaaaccgctcctgtccttcagcgcgaaaggagatatatttgccggtcttgatttcataaccagcttcctgcatgagccgcagaaaatcatcgtaatccttcgctgtaatgacaagccggtcgatggtctgcttgagtttctgcttccagctcgtgccgcgtttggcttcggtgtactccttgtagcccatgcctttgttctgagagggagggataacagagagaccgttttccttacagagccggtcgctgacctcgcgcatatcatagtaaatccgcttgtagctcttgtatgcgtggtagtccacaaagtcaaccgcattgaaaatcagatggttatgaacatggtctttgtcaatgtgagtggtcagcacatactcatattttcctccgaggatttcgtctgcaaactgcttgccgatctcgtgggcaagctccggtgtgacctctccaatttcaaaggactggatcacatgacgggctatgatcctgaccggattcatccctttttgctcggctattttccgcgtccactcaaattcccgcgctgcggtctcgctggcacagccgtaggacgagaccagcagcttctcatcggtcttttcgggattcagaatgtacgcgattgccttgctcaaagttcctcggattgctttgattttagtaactgccataccgcgtccatcttttctttcagctcgtcaatatcgtcctgatagaatcgtcccgtcgagttgatcctgcggcagacggtattgatgttcacgccgatcttgttgatttcggcggcgagctttttctgctccgtgtagtccacaacgatgatgtagccgtcgatcagcatcttccttgcatacgcaccgaagttctccgtgccgatcatctccatcttctttgcaatcgtccgttcttcctgtggtgtcagccaaatcttcttctgaatgtctcgtgttcttcgtaccatgctgcgccctccgtcgtaaagattagaagggtttgggactatcccaacaagcaaaaatctgatgttaagggcagggtctccttaactgatttttctccggtgggtactcaccggatttgcttgctaatctcccaaaatcgtattccccgaagattcctccgtgaaatgtcccttcactttacaacggacacaaaaagggcgtttgttgagtaccggatttcaaaaaagtcaaaaaatcattggatttcccatgtgaaagccactgtgtctgtcacatcaatatcaaccggctcaatctcaggtgcggcgcacttgctcatcgccatgagaggctgaatgcagtcttcaacatcgtagcttgttctggaaaaaacattgagttcgccccagttgtagtcgatgttgagcaactgcccaagcgtactgcctgatgctttgcaaagaatctccgcctttgccctggcgttctccgtcgcattgatcagcagctcttcgctgactcttgccggatttttcacggtgaacgcaatgctgagttctggttgcgccccacaatccgcaatcgcagaaatgacctttgcaagctgcttgctgtcaaagtcaaaggcaagtttcaagcgatagctgcaagcatatccggcaaactctcgcttgtaatttccttgccgatccttgacattctcgtaccttgtctggacatcaaagctcgtggttttcaggtcttccttgcgatacccaacgcggactgcggcaccttgcagtctttcgattctctcggcagcttccgacattgcgcggtcataggtttcagataagacttcaatgttcagggataggatgatgtaatccggtcttgcggagacattgcctgtcccttttacggtgattattctcattactttctcccgtcctttctggaattgtagtcctcatcaatacgctttttccaattcgtacccagcggtacgctgcatcggacagcggaaaccgcttcgctcagaacttcatagttgagttgcgttccctcgcggtcagagtggtaattgaccgctcgatctgctccaattccaaaatgctttgccgtctcaactgcatcaatgtttgcaccgaggaaaagaaactcccagccgtacttttccttctgtcgctcaatcatcttcttgaccttctcgctgtcataacggcggcttgcattctccatgccatccgttgtgatgacgaacagtgtgtgttcagggacatcctcttttcttgcgtacttatggacattcccaatgtgatgaatcgctccgccgatagcatccagaagcgcggtgcagccgcgaacggaatagtctctgtcggtcatcggatccaccttctgaaccggcacacggtcatggataacctcgctcacgttgtcaaagagaacggtagagatcaatgcctcgccattctcttttttctgcttttcaatcatggagttgaatcctccgatggtgtctgtttccagtccgctcatagagccgctgcgatcaaggatgaatacgatctccgtcaagttctttctcatgttttgtacctccgtatataaaaatatgactgcttggtgtctcaccttacagtcatattgtacttcggtattcacttcatttggtcgcatggcaagcgacattattctaaggacaagaacagctctccgtcaatgcttaggatgtcatccatcggaatcttcgtgccgtcctgcatggtaatcaggcgctcaaagtcatcaacctttatgactgcgccggttgcagttacatacgcaccgccagctttgcgctcatcaggtttgaagtaggttatttcaacctccggctcttcatcaagggcatccatgagaagctgatacctcatgttcaaagcggtcaaggctccctcatcaagctcaatcctttcgtcggtcagacgtccggtttccttgattgcagaatcatagccggtgagggcggcaaagggcgcaaactgcgctgcacgatctgacatcggcatttgtggtcgcgttttggaaacgtggtgaggaagtcccatgatctcgtcgtattttccgttcacgccttatgccctccaatctgcgcattgcggtctttcgcggttgcaccttcttcaagattcattgccttgaggatggcgttctttccatacttcttcttgatggcaagcgtggcggcttgtatcttccgctcacgctccaaagcggcatcttcggctttctgtttttcctcttcggcggcatagtcggtaaagaggtcgagctggactgcaccgtcgtttttcttcggtacatcagcttccggcaggacatgatttgcaacaacatacatacggcggacaagcagattcttatccacgatccggtcgaagagttctgacacagcacacattattttgcgagtagaggatgtgtgaccgtcgaggttaatagagccgtgcgcctgtttcggaatctgcctcccataatgatctgtctccaccgcgccgtgatactttgcccgtcgcgccggatcagtcaggttctcaatgtcgtagccaactgtgagaaccatctggtcggtgacaagccccttgtctaccaagtccagcacaagcaagtccgtcatttcccgcacaaccagcttcgccttctgcggctcataggggcagtgcaaaacctgaccagagctgaggctgttggagctgggacggtacgctttgattgcttcaatggtggtcggttcccatccccacgcatggtcaatgagcaattccgcattcttgccgaacagcttgtaaagcaagtcctcgttccgctctgaacagagggcaacatcacccatcgtgaacatcccgttctgctcaagtttcttggcaatgccccgacccacgcgccagaagtccgtgagaggctgatgagaccaaagctcacgccggaacttcatctcatccagctctgcaatgcggacaccgttcttgtcggcggggatgtgcttcgccacaatatccattgccactttgcagagaaagagattcgtcccaatcccagcggttgccgtgatgccggttgtctcaagcacgtcgaggatgatcttcatggcaaggtcatgtgccgagagcttgtaggtgttcaggtagtccgtcacgtccatgaacacctcgtcgatggaatagaccacaatgtcctccggcgcgatgtacttgaggtagacctgatagatgcgggtgctgtactccatgtaatacgccattcggggcggcgcaatgataaagtcaatcgccagagacgggtttgcttgcaactccgagaagaagtgtgatgtgccgtccagtctgcgtcccggtgcgtcgtgctgccgtccggcatttgcttccttcacacgctgcttgacttcaaacagccgcccgcgtccggagataccgtagctcttgagggagggcgtgacggcaaggcagatggtcttatcggtacggctttcatccgcaacaacaaggtttgtgtccagaggatctaagccgcgctcccggcactccacggaggcgtagaaggatttcaggtcgattgcgatgtaagtgtgttgtttcaccttctttgcctccgctttcttcttagatcagccctaatgacatttcattggagcttttaatgttgaatacgatacgccattcaatatcaccctccaccggctcaaagtgtagagaggaacaaactgcatgaagtttttcttttgagctgtctccacacacgattgcgattggaccgtccgctccgccgataatgccgatacaagcaatatcgtttcgtgcctctggtgcatagcggtcagagcatggcgcaatttccaaaggcttgtccccctcagcgcaatcacagatcgtaacatcgctgtcaggttcaggagaaagtgtatagctcatagcagtaaaatgcgtaggataaaaccagcggtcagaaccgtaacgcttttcggaaattgtctgctgctctaattcctgtacagtcaatgtgtatttttttccactgaccggatggaggaaagaaaacgaatcaccgggagcgtgtgccttgaaatgtggtcccgggacacgacacgactgctgctccattgtaagggagagggcttttatttcaggacggcgtttgcttgtccacggaaaagctgcccgaaaaatcatccatccataggatgtatccaaatcatagtgttccaatgcccactttgcttccgcttcattgatcaccccgtctggcaaacatggattaaagaccacggaacagccgtgggaggtcagcattgttttcccgttcaattccaaacgaggaataaagtcaaggcaaagtggattgtctaaatctatctgcatttgctgctcctgcgtgaagtattcgcaggagtcgttttcggggtgtaaatcccatttagttatgaacttgcgaatgtcttcttccggggtacgcatacaaaagtccatgacgagtcccttgctgcaagaatacgccgcaggaataacccaatgatgcctcgcccagtcaaattgcttattcaaccggatttccgttccggcatggtcttttcccgaatgtccccagaagtttccctcaaagtagaccttccactcaggcatggtcggttctgcttctgggttcatatcaacatcataatagtcctcggtgtacttgatcttactataatcaaaagatgcttgcagctttttgatgtatacccacggctgttccataggcgtcaatttcattttctcagcaagctctgatagcgttctttgctgatcctgcgttggagggttgtcctgcaaaaaggcttcaaactgggctttatcccacatccacgcctgttccagcgctgccgaatcactgcaagcaaggagcaacctcagaaagtcttcaaaatcgtttgccagcggatgaacaaaatccggagccgagttcatgggactgacggaaaataccataccgccaaagtctcgaacaaagcagaagtggatgccgtccacacccgcccagccaaaaatagatgcaccttttggcgtgcaaaagtatgggttgttatcttcacgacgctccacccctacgggcgaaaggtcaataccacttcgcaaaaatttctgaaacactttatccatagaccttatgctcctattaaactttggtcgaaggcaaacagagcctcgttgatctcaaagacattatagttcccatgctccacgaaatactccacgatgatgtcaaacttgttggagtgggagagcgcaaagccagccttcatgagcatatccttcatttcaacaagcggcagctcaagggcaatggcaaacgcaatgaccgtgggcttggaaggcttataagacttgtccgagcggatcttcgagaagagcttccggtcaatattcgccttcttatagcactgcgcgtccgtcatgccgcgctcatcaatctttcgcagaagcatctcggaaaaactctcgtcgatctgtcccagcgcgtcatcaagggttgccgcctttttgggggcagccgccgcagagacgggaggcatgagctgttcgattgcctcttcacaaacggatgcctcgcaaggcatgggttcttccttccggaaggcgttcatcctgcgcagacgctcggaacgattatcagtatgctcgtccacatagcggtcatctatgtacgctgcaatatcggcaaacagcttgccgctgatctgataggctttgcggtcaaaaatgacgatgtacaccgtcatttcgttttcgagaaggaaactgctaatggtgtcaatcgccactttgagagcctgatccttcggatagccgaaaatgccggaggaaatcagagggaacgcaaccgattcgcagccgtattctttcgccagcatgagcgaagtccgatagcatgagatcagccgttcgcgctcaccatgccgcccgtcataccagcgcggaccgacagcatgaatgacatatttgcagggcagcttatagcccttcgtgatttttgcgctcccggttttgcagccgtggagcgtttcacattccaccagcagctccggtcctgcggcacgatgaatgcagccgtccacaccgccgccacccagcagcgactcgttggcagcgttgacgatggcgtccacattcatttttgtgatgtcatttctgacaatttgaagcggcattattctatcctccgtcctatcaaagcggcatcggtgtccgggcgatcagaatgaccgccagaatcgcgcccacaaatgccgctgcccctacgaccgccaacacctttttgtcgagcttcttcttcgctgccttgccaatcagcgcagcgcaagccatgcagacagccgcagcaacaagcgcaatgcccagcgtttcccatagccaagaaagttcatgtaggattttcatgcgatcatcatctcctgttcattaaaccggaatttgacactttgtatttatcgagaatactcttgaaaccattttgcaaagcgtgatttattgaaaataatgaatttatatagttctccatttttcatattaactgttgcaattggaaagactatccacttccaagagatttcttttatttcctgcatcggcaaaactaaatttctgtattttttgtcaactgtaagcttgtttgtcttgtaagtaagcgactgactatcgaggtacagacctcctccaagtatgccattgtgacacaaactgcaaacaaaagatttcatagaaacatccctccattaaatcccgagttgtctgccccttaaagtccaagtccttcaacccacgccgcaagctcctgatgcccgacgctgcccttgaaaaccttgccgtccatcagctttgcgcctttgcagctcggcgcaaggcgttcgttcgtcttgccaatgccgcttcctccggaggttgcaaacgggatgatcgtcttgccggtcagatcatagctctcaagaaacgtattgataatcgtcggcgcgaggtaccaccagatcgggaagcccacaaagatggtatcatagtccttcatgttgtcccgcttgacggcaatctcaggacgggaggcaggatcgttcatctcaatcgtgctgcgggctttcttgtccatccagttcagatcagcttccgtgtaaggcaccttcggctcaatctcaaagatgtccgcgccgattgcctctgccagcgtctcggcaaccttcgcggtcacgccggacgcagaaaaatacgctacaagtttcttgctcatggtgttttatcctttcaatatcttcgtaagctgctgtgcagacacacccggcaggatggaggaaagatgctgcatcatgcgctctttggattcctgcgggtctcgctgatagccggatgtgataaagtcgtacccgaaaagctcttccggcgtcgcgtattctgctacaccccagccataaggtcttccgtatctatcctgcatatagacgaaatccgcgatgcagacatagctctgcatttgcagtctcgtgatgcacgtctcaaaaccgatgttgccgcccttgcggtagttcagagcttctttcagccgtttggaaagcatcctgccttcaccggttattacttcataaatctccttgtccttgtaggacgccaagccgtcatcccaacgggcatcaaagtcatagccgtcacgccggaagttcgcaaagtccggaatccactcccgactcacaaatccagccttcttgttgaaaagtttgccgtaaagacatttgccgctccgcgcagccggtcctttccattcccacggaccatctacatcatccgcaaaccataactcatgtgggcaaagttcctcgatggagaagccgtgaatctcgttccgaaagaagggcagaaagccgtattgctcgacggcggcaatcaaatcatctgcactatgtagttgtctggcatatctctttgacattactccgcctcttcaatcacgccataatcaatcaggatattcttctccgcatactgcgggtaaacaacacccatcatctcatactgatagcgtcttacgcggcgatgctcctgaaccggctccggtgcatacgcagcggtttcgcagtgcgcatactccggcatttccgcaagatcatcccgaacggcacggataagcgcgtctgccacatcatcaatgttcttgccggtctccacggcaaccagctcgtgcttccggattgccttgtccagattaccgggggagcgaaacagcttgtatttcatatcattgcccgtcctttctctctatcggtctgtctattcttcctgaaatctgttctttagggacgcaatcatcgcttgcgcggcaatggtcagatataacactccaatttcatagataaagtcgcggtcgatcacgataaagtattctctaacgtgtgtaaaaaccagttccagcaagtccctgtacagtggatcatcaaagggcttgaaccgcgtaaacttgcttttggcagcgtcccatgtcatagacgcttcgccctcagcactggtcattgcctcacagagaatcatgctgacgcccatttttccgttgccggtcaggagttctccttcgtaatagctgagtaggtctttcttgcgtcgaagcggaactacatcgcagttgtcatccagctcaaatgcgatcagctccgcagcgagttcccgccagaccgcataaccggcgttaatggttccgtcctcttcgcggctgatggtatcgtccatgcagtatcgctcaaagaaattatctccgtcaatctcgttgcgggtgcagaagatatgcgccagctcatgcagaagaatgtgcttcaactctgccggatgacgcgctatgtctgtgcgcagaaggattccgtccgcgccgtctcctgtgccgacgaatgcagaggcgtgaaagtcaaaatagccgtcctctgtatatcggtcttccagccggtcagggaaatactgcttgcagaactgctcaaagacttcctgctggttttctgtctgaaagcagcgcagtacaaggttgtcctcactgaactctgcccccaagcgttcgttaaagatggaagcggcatagaaaagggcttctttatagtcgtcgttgttcatctaattactatccttcatcctcattcacccctccggtctgacatttttcaggaagtcagagtgcggtacatacggcaagttgagctgccagcccatgcggttcagctcgttgagcttgatcagcatcaggttgatgtttgttcccattgcagcagaaagctgcaccacatcgtagtcctgcttcatcaggtcaatcagctcatcatcgtcaatgatcaggtgagaggcaaacgcattcgcctcatattcgtgttttgtgcgcatatcgaacagcacgaactccgggagcggttcgttccctttggcaagatcgcgatgaaaggtatcatgcccgatctcgtgaccgcaaaccatttgcatgatcagatactccatgttggagttcagaagaatatgccgctctttatggcggtaggtgtacattccgagcagatcgttcagattgtcaaggaaatggagatgaatgcccagctcacgggcaatcttcaaggtatctcttgttccacagcttttgacaatgctgttcgcctttttgtatatttcctcggagcgaattatcacgggaccttcacccctttcatgttgaaaacagtcaaagtaaatccgtcaagaaaccgagacgcagacagttattcctctgcgtccgtaccggtcttcttgtatttcttcggcgtgtatttctcaacatttcgggctttggattcccaatatatatcctgcaacgccttcatcaccgcatccttgtcctgctcagacagcgtaccgcccgcaaacaagccggacatcccttcaatcaggtcctttgcctgtttcatgccacgggagccgtactgctcggatgcctgaaccacaaactcttcgtcctcggtcagcagatagttcacatccaccttgaagtattccgcgatttttctgtaagcgtccttggtacggggaaaggaaatgccgttctcgtaccgggtaatcatacgcctgttgatccccagtgcatcggctacttcctgctgggtcagcttccgcttctcccgttcagccttgaatttctctccaaacgtcattttggtaatcactcctgttcacaaaaagtttgcgacatcaaattgcgcaagtctattgacaaaggcacttgaagtgcgtataataatgactgagcaatccaactactcatagtatatcctgaattgctcatcctgtcaaggggcatgagtagttgtacacgaaaaagttacatcttttgagcagttcaaatggacaggcatttatgctgccgaagatcatccgtaccggcatacaccgatatgagggaacaggagtgagaaaaacagaaatggctacacagtacagaaaagcatacgtcccggttacgctggatgtggacaaggagggggcaatcctccctcgccttatctggtgggacaacggtgtaatctttcaaatcgaccagattctatacaaatgccgcgccacatccaaaaaggttgggggcggaggcatccgttacacagttcagattcgcggaaaggagtcatttcttttccacgaaggagacaagtggttcgtcgaagcaaaggaggacaactgctcatgattttatcccagcgccaacttgaagaaattgcagcctcaacaacgaaggacttcaaccggttctttttcggggatgaggcggacaagcccgaccgatcagctttgccaacacccattgatcagtttgcaaagaactatctcggtcttcgcgtatcattcgcccgtctctcgccggacggaagcatctgcggtgtcactgcctatgccgacactgagtacaagatcacggaacttggtattacgcgcacactggctttgaagcgtaatcaggttatcttggacgagagcttcattctctccggcaacgtgcagcggctctgtgccaagcgcagatttacccttgcccacgagtgcgcccatcagattctcttccaactggaatcggaagaggtaaaggcgtcctgcgaaatgaaatattccgcacggacagcctatacgccacgagagttgaaaacccgcgaggactggaacgagtggcaagcaaatgtcttgggcgcggcgatcctgcttcctcaaaaagaggttgacctggcgatgcgtcggtttgcagaaacgccgctgatcaattacgaggggaggtattcgtatggtgatcacttaacgctgcgccttttctgccggttgttcggtgtctccaagacaacggcgtctatccgccttcgtcagctcggctacatggtagatcgtccattcagtgagtatgttgacccattggaggtgtggtaatgaagagagcatccattcgggttcaggaaccgacgccggagctggtcgaaaaaatccacagggcaagagttgccatttcccagcagaagccccgatacctgaaatgtccgtattgtcagcataatgccattgctgtctacgaggacacgagaggtcatgtagaatccaagtgcaagaaatgcgggcggatcacagtctttgatgtgctgaatatgagaagactgcgaccgcgtaccaagtaagaaccggaggacaagcctctgttctaaaataaaatatatgtcatagctgagctgtggagccgcctgataggtgaagtcatcctaatgccgcatgagacagagtttaattgctctgttttatcggcatgggattcaaacctcaccgtcatgcggctctttttctgtcttcacccttcccgctgctcccgcgcagcggaaaggatgaacaatgaaaatccccaagacccctatcgcgtttgattacgacctatggactacggaggacggcaagtgcatggtgcgcgtgaaacgaaccggcgaagtttccgaggttgaccgcaaggttatgagaatccttcgcgcagaggaaaagcggatcagacgctcgtatggctctgacaacacctctgaggatgaggacggcgcagagaaactttctgataccgtgctgtcccttgaagctatgccggaggacgatgtgaagtccgctgcatggctggcagactcccgcgactgcatggaggaactgatcaccgccctcaaagagaaggagcttctttccattctgaccgagaagcagcgcgaattgtatcttgcgatgacccgtgaaggactgactcttcgagagtttgcccgaaggaaaggcatcggcatcagagctgcatttgacctcaaagcagcggtgcagaaaaaatttcaaagatttttttgagcggtactcaacaaacggcaaaaagatgtccgttgtaaagtgaaagggtcaatcagaccacttcactgctccttgaaaactgaatagttcagtgctgcggatctttccgcttctgcgaagcaacacagcttccgacgccaagacctcccgaaagggagtgagcgacctccggagagctataacagccgtgtggtgcggctgcttgcgacgatgcagatgccgggtataatgatacttccgtcttttctttgaaggggcggctcggagcgatcctcggaggggtgagagtcccatgataccgattgaccattggtagtccgcagcattcccagaactgcaaagttcttctggcaggggcgcgagctgcaaatatgccggacaatgaaataaacccaaaagaaacttactatatagtttcaggatgaaaactatgtggcagagtgtcttcacaagatgctctgccatatccttttgtcctgaataatcccacgaaacaggaggtgcttagaatatgatgggcattgaaacaatgaaaaacgtcagcccgaaaacggttgaccgtagcacactcgttcaaagaagcagcatccggcttgatcctgcggcaccgcgagaggacaggctgagggagttcatcaagcagatcagaaatccctattgttatctggacggaaaaactgtggtgaagatcagcttcgccgagacggacacgacaatggaagattgtctggaacactatctgagaggtctttgatttatgaacagtctgaatcttttcgcccggttctatggacaagcgattgagcctgtggtataatttaatcggtcaaaaaaagaagaatacggattaagccgcttgccttgatggtcatgtggcgttttcgtgttcctcttcataagagttgaagcaagccttcgtctttctgatttgatgtaccacaccaaacagaaaaacggaggttatttttatgccagataaggtttaccgcacggcgatctactgccgtctgtcccgtgaggatggagacaaagtagaaagcaactccatcgccagccagagagccatctgcgaggactatatcgcaaggcacgacgatttggagctggtctgtgagccgtttgtggatgacggttacagcggcgtttccttcaatcgtcctcagttcaaaaagctggaagaggcaatccgcaagggtgcgcttgactgcattgtagtcaaggatctcagccgcttctcaagaaactacatcgacggcggacgttacattgagaagatattcccgcagctcggcatacgcttcatcgcaatcaatgatgcgtatgacagtctgaccggtgatccgcagtccgactcctttgttatcccgttcaaaaacttgattaacgattcttactgcaaggacatctccatgaaaatccgaagcagtctggaagtcaagcagaagagcggtgagttcgtcggttcgttcgccccttacggctacatgaaatcgccggagaacaaaaaccagctcatcgtggatgaagcggtcagcgaatatgtgcagatgatcttttccatgtacaaggacggcttctccattgggcgcattgcaaagcgtctgaaccagatgggcgtcctgtccccaatggaatacaagcattccgccggtgtgaagtttgataccgtcttcaaaaccggcgataccgcaaaatggacatacaaagccgtccagcgtattctcaccaacgaggtttatatcggcgttctggctcagggcaagcgcggcactcccaactacaaagtccgcgttatgaagagcaaggatgaatccgagtgggtcaaggttgaaaatgcgcatgaagctcttgtgtcctacgaggacttcatggcagtcaaggtcatgatgcagcgggatatgcgctgttcacccgatcaggacgaagcgcatctgttttccggcttcctgttctgcggagactgtcagcagccaatgatccgcaagaccgtcccgtcgaagacgaaaaagtatatctactacgtctgctccaccaataagcacagccggacgtgcagcccgcacagcatcgccgcaaaagaggttgaagagaaggtcttccgtgccattcatgaccagatcgagcttgtcatcaatctggaacacgcgcttgcgatgatagaacggcttccgtctcagagccgtaaggctttcaattacgaagctcagatcgccaaaatcgaggaagagattgaacggtaccaaaagctcaaactggggctttacgagaacttcatcggcggcgtcattgataaatcggaatacttcgagttccgcagcagctacaccaaaatcattgaggacaaacaggaggcacttctgcgggtcaaaaaagaaatgaagcagacggtgacaaccggcacgaccgaacggaactgggtaacgcttttcaagcagtatgaaaacgtcgaagagctgaaccgccgtgtgctgatgtcccttgttgaccgcattctgattcacgaaaaccacgcaatcgaaatcgtcttcaagtacaaggacgaataccagcagacgcttgaatacgttctcggctatgccgacgaactggatattgccgtataaaggagggatgagcaaatggcaagaaaaagcagaaaacaaattgcagtcgaagagccggttatcgagtctgtttcttccgaggtcttctcaacagccatctatgcccgtctttccgttgaaaacagcggcaagtctgaaaaggttgatgtcatcgcaaatcagattgagatttgcaagtcctacattgcagagcgtccctacctgaatctgatagatacctatgtggacaacggacgaacgggtacggtttttgatagaccggagttcaaccgtctgatgaacgacatccgcaccggcagaatcaagtgccttgtggttcgtgatctcagccggttcgggcgagattacattgaggcaggaacctatctggaacgggtctttccgcagatcgggcttcgttttatcgccatcaaagagaactacgacaactttgatacggacggctccggtgaaagcctcattatccctctgcaaaacatgatcaacaccctttactcgaaggacatctcccgcaaggtttctaccgcgctcaaggcacagatggaaagcggagagttcaagaagcgaaatctcccgtatggttatcgctgggacgaagaacacagcaatatggttttcgatgaggaaaccgcgccgattgtccagaagattttccaatggaagattgaagggctgtctcttccggcgattgcagaccggcttgatgcaatgaacgcacccaatccggagtttcaaaagtatcaggtcggcgtccgcacaggcaatgccacggcaaagaagatttggaacaagtcttcgctgacatccattctggataatcctcattacgtcggagataccgttctcggacggacgctgaatgccatctacaagggcgtcaagaatcagcacattgaccgtgaggaatggattgtttttcccaatactcacgaggcgattatctcccgtgaggacttccagaaggtacgagagctgcgcgacgctgctgcaaggacaagggttgagaagatggagcgcacggaggaaatccgcgctacgctgatcaatctctttgaagacaaaatcgtctgcgcagactgcggcaggaagctctatttccatcgcaagcgcgttgacaagcgtaaggacggcgcatggtacgccttctatgagtgcagttcatccgtcaagcgcggcaatctttgtacgccgcactatacgcggcaggacaaactcgaagccgatgtgcttgcggcgattcagcttcaagtcaaggcggctctcaattacgacaagctgcttgccaaactgagaaacagcgaaggtgaacgcagcatccgagatcagcagaatgcgctcattacaagcctgaatctgaaactcagcggtatttccaagaagcgtacccgtctctatgaggacttcacggaaggcgttctcgatgaagaggaatacgcctttgccaagaaagcctacgatgagcagtatgtcgatctttcacggcggttggatgaagcggttcagcggaaggtaaagtttgccgaagcaatgtccgaggacaataagtggctcacgctgatgaaatctgtcagcggcgcagcaaaactctctcaggagttgattgacgagtccgtagagcttgtaaaagtccataaggacggctcaatcgagctggtcatgaaatacggcgatatttacgctctgaccgttcagagtatcaaggaagtacaggaggcgatgtaaatgagcaaggaatacaacatcggcatctacatccgcctctcaatggctgatgaagataccggctatggcagcaaagcggaaagtgacagcatcggcaaccagcgtatgctcatcaaccgctttcttgacaatcatccggagctgtctcactgtcagcggtctgagtttgcggatgacggttataccggcacgaattttcaccgtcctcagttcacgcagatgatggagaaggtcaagcgcggcgagattaacctgatctgcgtcaaggacttttcccgcttttctcgtgactacatcgaaacgggaaactatctggaatgcacctttccgttcatgggcgtccgctttatttccatcaacgacggctatgacagtgacgattacaaaggcacaacgggcggtctggaagtggttatgcgcagcatcatctacgcggcatacagcaaagacctctccgtaaagactacatcggcaaaaatccagatgatgaagcaaggcaagtatgtcggtggctacgctccatacggctacgtcctgcatcccaccattcggaacaaacttgccgtagacccggaggcggctgatgtgatccgtcgtatcttccgcgaggcactggaaggcagcaacacctctcagattgcccgcagcctgaatgatgacggcatcccgacgccggggcaatacttcaagagcaagcatcccgacaagaagaagttcagtaacatgagcgagaaaatcagttgggaaaccgtgatggtctatatcatcctcaaaaaccttgtttacaccggaacgctggtcagccgcaaaatgaagtcctgtggtgtcggctcaaaaaagcgtgttgtcaatgagccgatcatcgtagaaggaacccatgaagctattatcagcaaggaagactttgagcttgctcagaaggtcattcgaggcggaggacggaatcccacgcgcaagcagcatgactatccgctcaagggactcgtccgctgcggaaactgtaaacgtgctatgacgcgccggaagaacaaggctggcattcggtacttccagtgcatccactcggtcaacaacggaaacacagactgtccggttggcaggagctttccggaaatggatattgagaaggttgtcttccatgccattgctcagtttctcgctttggcacagaaggaagcagtccaaaaccgagaagtcggtgatcttcggaaatctgccatcaaggaatgcgctgataaaatccggattcttcaaaagcagaacgagcagcacaaggcgtccaagctgaggctctacgaaaagtacgcagccggaagtatcacgaaggaagcgtacattcagcaaaaggcggcaacggacacgaaaattgctgaaaacgatgaagcaatccagtgcagtcacgaacggatgaaggagcttgactccgagacctcctgttcggatgaaaagctgaatgctgtctgcgatcagtacgccgactgcaaagctctgacctatgagctgacccacgcattcatttctgcggtctacatttacgatttcgacaacatagaaatcgtctggaagttcaaggacttcctcaatacatcagaaggagaagccaaatgaaagtatttctttatatccgtgttgcctgtgcggatcagcttgcggcggcaaatcagcgggaagagctggaacgctatgcgaaggacaagggctatgaggtagctgctgcggttgccgcagacggcatctccggcgtccatacggaaggcatcatgaacttcttgatgaacgaagccaagcgtcagggcatcggtgcaatccttacccgcgacgcttcgcggatcagccgggacgcttcctctttcatgaggtttgagcgaaaattcaaggagaatggcatccggttagagtatctgtccaagcctgacaacgagcttccggtcactccgatgatggaggcatttgcggcggcgtataagaaacgtcgcacaaagaacggcaaaagagcatagagaaaacgcaagccgttcacgggtggttgtccacctatgaacggcttgtaaattctcaaaatttttttagtccctacttgacacaagaagacatgagccggttaggacgcgactatctgaaggtcggtcaagttatggaggttttgcggcagcgaggcgttcgtctgattgccatcaacgacggtgtagacagtctgaaaggtgatgacgattttaccccgttccgcaacatcatgaatgaattttacgcccgtgataccagccggaaaatccgctctgtgtttaagtcaaaaggcatgagtggtaagcacctgacaggcaccgtgatttacggctacttatgggacgaaaagcgggagcattggctggtagatgaagaagccgccgaagtggtacgccgtatcttttccctcacgctggagggatatgggccttatcagatcgcctgcaaattatccacagaccggattgaaattcctgtcgtacaccttgcccgcttcaacgagggtgtgaaccgttcaaagccggtcaaagacccctatggatggggatcatctaccatcgtgaacattttgaaaaagcgagagtatttagggcacaccatcaatttcaagacccgcaagcactttaaggacatgacaagggaaccggcaaccctcatgtccatatcatgctgacgctccggcctctgaaagaaaatggacagtggggcgcaaagtgccgcaaggcatacgatctggacgagaatggacagcgtatcccggatgggaaaggcggttggaaaaatcacagagaggatacgaccgactggaacgataaagaaaatgtggagatttggcgggcagcgtgggcggcctacaccaatcgggcgttggaatctgccggtagaccggagcgcattgaccaccgcagctacaagcggcagggcattgataaaatcccctctgtccatctggggccagccgccagccaaatggaaaagcgcggtatccgcaccgacaagggagaagtaaaccggcagatcgccgccgacaacaagctgctgaaagaaatcaaagcccgcattacccgtctttatcgctggtcgaaagccgaaacggaaaaaccacaaacacagcaaagcagcttgaccgccttgtgggaggcccagcagcagttggacgctccccgcacccgcaccggcaaaatccgggctttgcaagaaagcgctgcactattcagctttttgcaggcaaacggcatccagtctatgcagcagcttcatgaaaaaatcgctgatatgaacagccgttactatgacctgcggggaaagatcgtcaaggctgagcgccggatcgccattcttaccgaacgcggggagatgtgggaacagtacaaccagtacaagtccatccacaagcagcttgccaaagtaaagccggaaaaacgggaacagtttgaacagcgccacagccgggaactgattctgtatgacgcagcggcccggtatctgaaagaactgaaagacagaggcgaggggataaccccgaaggcatggcagcgggagatcgaccagctggccgctggaaagcagacggacacgcttgccatgaaatccatgcgggaggatttgaaagcagtggaacggctccgcaaaaccgccgagcagctgtccagacaggaacgggacaattctcacgaccgggagccggagcggtaagggctaccgcgtttcacgacatacttttgcacacagaaaaaccgccgtacaggtttccccatacggcggcagactgtttatttgccgaacaagtcgctgtgtgtgccggtgcgggccagcgtcagcaccagaacatcatcttctatgcggtagacaagcagccagtccgggagaatgtgacattcccgatggcctgcccaatcgccggacaggtcatggtcacggttcttatccggcagcggttcgcccatcgccagcaacgctacgacctgctccagcagctcgatcttcaagccacgcttgatggctcgtttgtagtcttttttgaaactggtcgtgtacttgacggtatatttggtttctttcatcttttcaggtcagcaaataactcgtcaaggtcattgtagccctttacagacgggtcttttgcaatcctttccgcttccagcatggcagcaaccgtttctttgttcggctgttccagccttacttcaaagggaatgccgccttcacgaagcgactggcgcacaaagatgttaaacgccgtagtcaggttcatgccaagttcagtaaacagtgcgtccgcctgtgctttcaaatctgcgtccatgcggatactgatgtttgtggtatttccagccatacgatcaacccctttctgctggcaattatagtatatgccatttgcacgaagaaaacaatgctttgcacgaatatttaacaataaattcatttaaggaggttaccgactttatgaaagaaatcatttatgaagaacaataagtctgaacctatccccgtcatggactaccgccagtaccgcagggcgcggcggctggtacatgagtgctgcaactatgacggcggtaactgtatcgcgctggatgatggggagaaatgtgtctgtgtccagtccatttcctactccctgttatgccggtggttccgggcggcggtgctaccgctggatagggaactggaaacggccctgttccaccgcctggacgccaagcgttgcgccgtctgcggggcgctgttcacccccggctccaaccgggccaaatattgcccggaatgtgccgcacgcatgaagcgggtcaacgccgcaaagcgcaagcgaaaacaacgggagaaatgtcacgctttaggggctgaaaaacccttgtaaatcaaggattttttcgagggtgtcaaaggcaagctgatagatttatcctctgacccctaaaacggccttaaaatgcgtacagaatcccaagagaaaccccaaggaggaaccctatgtcagacaaccgaaaatattattacctgaaactcaaagaaaactattttgacgatgattccatcgtgctgctggaaagcatgcaggatggtgtgctgtattccaacattctgctcaagctgtatctgaaatcgctgaaacatggtggacggcttcaacttgacgaggacattccttacacggcgcagatgatcgccaccatcacccgccagcagatcggcactgtggagagagccttgcagatctttttgaagctgggccttgtggaagtgctggacagcggcacattctacatgagcaacatcgaacttttaatcggccagtcctctaccgaggctgagcgaaagcgggctgcgaggattcaaaataaggcgctttctgcgctccggacaagtggcggacatttgtccgacattcgtccaccagagatagagatagagatagagttagagaaagagagagagataaagagagagatagagaagggacaccccgcccacgcctatggccgttaccagaatgttttcctgacggacggggaactggcagacttacaggccagctttcccactgtatggggccagtacatcgaaaagctgtccgagtacatggcttctaccggcaagcgttatcagagccatgcagcgaccatccggcgctgggccggtgaggacgctaaaaaaacgataacaccctcacgcaaccgggattacagcgtaaaggaggatgaaactgtatgattgagattaccgcagaaatccgggcgttcatcgacaaggcagctgctggtgcggaactggctgaggacgagtatacagatccgtcagacggtctcattcactgtaagaaatgcggcggccagaggcagaccgttgtgccatgctttgggaaatccggctactttatgccgcgctgcatctgccagtgccagcaggaggctgaggagcagcgcaaggctgctgaagaacggcagcgccgcatggagcgtatcaaacgccgaaaagcacagggcttgcaagaccgttatctgtatgactacacattttccaatgataacgggcaaaacccattgatggacaaggctcatgcctatgtggagaactggaaagaggcatataagagcaatatcgggcttttgctgtttggagatgtgggaaccggcaaatcttttttcgccggatgtattgccaacgctttgcttgaccaggatgtgccggtgctgatgacgaactttcccaccattctgaaccgcctgaccgggatgttctctgaggacaggtcggagtttattgccagctttgatgagtatgacctgcttatcattgacgatttgggtgtggagcgcagtaccgagtatgcgatggagcagatgtttttcgtcattgacagccgctaccgcagccgcaggcccatgatcatcaccaccaacctgaagctggccgaactcaaaaacccgcctgacctggcccacgctcgtatctatgaccgtatcctagaacggtgcgccccgatcctctttgccgggaaaaacttccgggaggaaaacgccggggccaccaagcaggcggcgaaagacattgtaaacagtaagcacgactgattttttaccgggcggcacagacccgttcggagaaaggagcgccatgaacaaagaaccccgtactatgcaggtggcagacgccgctactgcgtccagagcgccggaaaacacggcggcgatggtaaagaaaatcggcaagacgacctacaaggttcatgtccatttcagcaataccagcacagaaaccatgagtgataaaatcaagcgtatgctcaaaaatgaaattcagcagatgtgacagactgataaacgaagccgccttgtgctaaactgatgatggtacgcaccaaaatttttgtcaaggaggacacgaaaatgctttacacagaaaaagagaagcatgaaattgagcgagtaaaggaggtctttgcggaacatctgcggcaaagccctgattttgaactgctctggtcggacaaggtaggctatgtctggctggcgattggcgtaaatccagtctatgtggataccggtatcagaatcgaatctgccgccgatctctgttacaggtgtttggacgatgtagctacggatgttttatatatgacgggcaacgatcacgcgctggaagcagccgatccgctggaattggccgaaatcaagcggcgctgggagccatatatcaaccagctgccggaatatgcgtatatctgcgacgatttactaagtggacgcaaataattcacatgcaaacgtgccagaagcaataaaatgcttctggcacgttgttacgaattttagagctttctatggtttcgatactctattattccccaaaacagtccgagaataaacagcgtgaccacaataataaagctgtatttgaatggtacaccaaaatgtgcttctatgacatcaagagttccgatagcactgagtaaagaaataatgtatagcagaacattcaaaatcgcagagtttctgcttttctttagttcattttgtgcagtcaaataggatatttttaggtgaagagcttctgcatgttttttgtaaggctcgctttccttaatgtagttcaataaattatgagtttcaattggaagattaggagagcaaaaaagattctgcaagtaaatatcatttcgtaccgaccgccgaagatctgtttcattttcaaggttagagttttgaaaaatatgaatatagagttttagcgattccaatataatggccgaatataaaattggttgaaagttatcacaatcaaagtcagaaactacactacaaccagcttgtggataatattggtatatttccactgtactaatgtccttaattggttcagcaggcgctttcgtatcaatgagtttgcaaaagtaatctgaaatattttcaatattattcgaaaagaccaatgtgtcatgcacaaagaaatattcttgggaacgataacacttatttgtcaattcccagataaactcagaaatattttcatatattatttcagaaattttcattcctgcctcgacaggtttctcttcatcaaagaattgatatttctccacagacagtaggttgtagttttctgcttttgccccgacatcatctttggcaagtggttttcctgttttgtagtttatgacttcaaaaacaatgaacaaaacactgttcatcataaaggcaccggcatcaatttgatacatctgaccatttatccaaactaaaaatggctctagccagaaagtaaattcgattttgaaatatcgttcatcaactaagatagattgtgcgtgcctaagattgatatagaaaccggaatctttcaaagagtcacttgcatcgttttctttttcagctgaatcttttgatttgaaggaaaatgtagtcgcttgatgtacataatcatattgggccgttacctccattttcccatcaacagaagtaatagtctcgtctgttgccacgaaagaaagatgatgcttttccagtaatgattgcatctgcttctttttgtgcgggataacattacgaagttttcgtaaaaaccagtttgtcgctttatactgtgtcgaattatatgcgcttaaaaataaaacagtatcatccacttgcaatgacctccgatctcgtcagtaaaatttatattattaattatacagccaaatgacatacacaacaagcatagtgcaacagataatactgttgcttatttttttgataaaaagtccttgacaactcgtttctggcaaaacggcgaaatcgattttggtaagtgtaggtgtgcgccttgccgcgtttaacctgccatccatcgccaagctgacgatgacggacgagctgcatttgcaggaattgggcgagcgcaaaatcgcgctgttctgctgcatcccggattcggacaaatccctcaattatctggtcggcatgatctacacccagcttatccagacgctgtaccgccaagccgaccgcgtacacaaaggacgcttgcctgtgccggtgcattgccttatggacgagtacgcgaacatttccttgccgaaagatacatttttgtcggcattggccaccatgcgttcccgcgctattttctgttcgattattgtgcagaacatggcacagttaaaggctatgtacaaggatgattgggaatcactggtcggtctgtgcgacgagtttctctacctcggcggcaccgagaaagaaacccacaaatatgtttcggaactgctgggcaaggagactatctccaccaccagctacaatcagagcaaaggccgcagcggcagttacagcatcaatcaccagcaatccgggcgtgaccttatgaccccggacgaggtgcggctgctggacaacagtaagtgcatcttgttcatccgaggggagcgccccgtgattgacctgaaatataatctgttgaaacacccgaacatccgctataccgaggacggcggcgcagcaccctacgactataccgccgccgacaacgcgcgggacgatctgcccggcgcacccgaaaattatgaactgctggatatggacgactttctgcccgccgaagcggcagaaatgaagcctaccatacaaagaattcggaggtctacatgaagctgaatcataacaaaaaatctgtgaaaatttctctcaatttgtttgcgctgtacgccgtcatggtgtgcggcattgtttttgccctgcccgcctttgccgcagatgacccgctggtcgtggtcgaaaatctctccacattcatcttttcgctgatccgcgcggtgggccttatcctgctggggtggggcattgtgcaggttggtctgtctttgcagagccacgaccccagccagcgcagccaaggtttcctgacgctggccggtgggctggtgattaccttcgccaaggaaattctcgaccttatcaccgcgtgaggacgacaccaagaggaaggacggtgatgccctgtgggtgagtcatggatcgtcagcaacttaaatgccgcgctctccacatggaacgacaagctggcggagatttggtcgctgttgaccgaaagcccgcagaccttcaaaggcgggcaagtttggggcgtgatgaccggcatccacggcgctttgcaggcgattggctatgggctgctggtgcttttctttgccgtgggtgtgatgaaaacctgcggcagctttgtcgaggtcaaaaagccggaacacgcgctcaagctgttcattcgatttgcgctggcaaagggcgcggtgacctacgggttggaattgatgctggcggtgttttcgattgtgcagggcatggtgtccaccattattacccaatcgggcagctccgggatgagcagcgtatcgctgccgcaggagttgatcgacgccatcaacaatgtgggcttttgggatagcatcccgctgtgggcggttacgctgatcggcgggctgttgattacggttttatcttttaccatgattctcacggtctacggcagaatgttcagcctgtggatgtacgctgcgattgcgccgataccgctgtccacatttgcaggtgaacccaccagcagcgtgggcaaaaacttcatccgaagctatgcaggggtctgtttgcagggcgtggtgattgccttgtcctgcattattttctccgccatctcgtccagcccgcccgccgtggataccggtgcatcggtggtgacggctgtctggacctatgtcggggaactggcgttcaacctgctggtgctggtgggcgccatcaagggctgtgaccgcatcgtcaaggaaattatgggactataagggggcaatctatggaaatcaaaatatcgaaagaagtccgcgactaccatgaaaatatctttttcgggctgaacacgcggcagtttatttgctcggtgctggcggtcggcgtggcagtaggcatctactttgccttgcagccgtatgtcggcaccgaagaaatcggctggatgtgcattctgggtgccgcaccctttgccgcctgcgggttcttcacctaccacggcatgaccgccgaacaggtgctttgggcgtggttcaaatctaaaatcctctgcccgaaacaacttgtgttcaaatccgacagctactattacgaagccatgcagcccgccatccgtgcgggcataaagcgaaagagaggtttgcctatgaagaaaaacacacatgacagcgaggaaaccgcttgattaaaaccctgtcgaaagcgcagaagatggaacgcgaaaagttccggattccgcgcagcgtacaggatgccattcccatccgccgtatctttgcggatggaattttccaagtcggcaaccagtattccaaaacgtggtcgtttaccgacatcaactacgccatcgccagcaaagaggacaaaacgtccatgttccttgactactcggaattgctcaacgccctcgactccggcgcatcggcaaaaatcacaatttacaaccgccgcatcaacaaggctgagttcgagcgcagcgtcctgctgcccgacaaggatgatggtctggacgaataccgccacgaattcaaccagatgctgaccgcacaggtcactggcacctgcaacagcattgtgcgggagcgttatctgaccgtaagcgtggtaaagcgcaacgcggacgaggcccgcagctactttgcccgtgtcggcacggatctggtgacgcaccttgcacagctttcctcggtagcaaacgaactgacactgaacgagcgcttgcacattttccgcgactttttcaaagcaggggaacaggctgcggcggagttcaacatccacgaacacgccaagcgcgggcagcatttcaaggattggttctgccccgacagcatggaatttgccgcggaccatttcaagctggatgcccgctatggtcgggtgctgtatttgcaggactacgccagctacatcaaggacagctttgtgtcggaactctgtgaccttgaccgcgacttgatgctgtccatcgacatcctgccggtgccgacagacgaagctgcccgccagctgcaaagcacgctgttaggggtagaaacgaatgtcgccaactggcagcgccgccagaacgccaacaacaattttactgcgacgattccctacgatatggaactccagcgcaaggaaaccaaggagatgctggacgatctaacgacccgcgaccaacggatggtgttcgggctggtgacactggtgcatctggcggacaataaggagcagcttgacagcgacaccgaaacgctctactcgacagcccgcaagcacctgtgccagctttccacgctgcgctggcagcagaaggacgggctggacacggtgctgccgtatggtctgcgcaaaatccaagccctgcgcacgctgaccaccgaaagcaccgctgtgctgattccgttccgtgcgcaggaaatcatgcagccgcacggtctgtattatgggcagaacgccgtcagcaagaacatgatcgtagcggatcgccgcttgctgctcaacggcaacagttttcgtttgggcgtttctggttccggcaagagcatgagcgccaaggaagaaatcgtgcagattgcgctttccaccgaggatgacattctcattctcgacccggagtcggagttcggctatctgaccgaagcccttggcggtgaagtcatccgcatttcggctacgtccgatacccacatcaacgcgctggacatggatcgcgcctacggtgatgagcgaaaccccatcgtcagcaagtcggagtttgtgctgtcgctgtttgagcagctcatcggtgacggcatggtgacggcgaaagaaaagtccatcctcggtcgctgcaccgagcaggtctatttgccctacatccgcaacggctaccaaggcacgccgcccacgctgcaggacttttaccgtctgctccagatgcaaccggaacccgaagcgcaggggctggcgctgtcgtccgaattgttcattaccggcacactgaacacctttgccaggcataccaatgtggacacgcaggcccgcattattgcctacgacatccgcgaattgggtgagcagcttatgccgctggggatgctggtgacgctggatgcgatttacaaccgcgtgattcagaactggaaaaaggggcgcagaacgtggattttctgcgatgagttttacattttgttccgctacgagtacagcgccaatttcttctacaagctgtggaaacgcatccgaaagtacaacggtctggtgaccgggctgacgcagaatgtggacgaactgctgcgctccgacaccgcccgcctgatgctggccaactcggagtttctcgtgatgctgaaccagagtgccaccgaccgcgcggaactggcgaagctgctgaacatctccgacaaccagctgggctatgtgaccaacgtccccgcaggctgcgggctgattcgctgcgcgggcaatatcgtgcctttcaccaacagttttccgaaaaatactaaactctatggcttgatgacgaccaagccggatgaacagcaaagggagtgaaacaatgatttataaaaataaagggccgccgagaagctcggtaacgattctcccatggataaaagtggttgacgaaattagtgatttgagagtagcaggaaatatcgacaggattagctttgtcgtattatcatgctattatttgtttattctgacactagtaatgtgctgtagaatttttctaattcatcagttattatttgtggaactatgcggttttcaaaattttcttcgttaatgccatgcatgcttaatgcgtgaagaagttttttgtcgaaatcgtattgttgctgcttttcaaggaatctttcaaaaccaacggatgcaagtttatctttatcacaaagttgatgaacagcaaaggcaatgttcatcttaaacatcggtgtacaaggggtacaaacaagataaaatagaaatgaggggcgatagagcggaaatgtcagattttccactctatctgaacacggtcgctggtggccttgattgtagagatcaaaccatcggcggcttttcttttgtcgtcaaaat

SEQ ID NO: 34 - DNA, 1601264 bp, Gemmiger sp.
  source 1..1601264: mol_type = genomic DNA
cttggccacgtcctcgtcggcgatcttgccgtagaggatggcgtccatgatggaagcggtgtagttgcgggggtcaaagttcttgggattggccaccatgtcgcggtagacctggccgatggaagcgctgtccttcagctcgggatggtcgcggaacagctccatgatgttgcgggtgcaggccagacggatgtcggtgtccacgttgatcttgttgatgccgcagtgggccacgtccaccagctgggctacgtcgatgccgaaggcgttctccagctggccgcccatggcgttgatctgctggacgtactcctggggcacggtggaggaaccatggctgaccaggaagccgttcacgccctcatggagcatgcactccttggtggcgatggcaatttcacggcggatcttggtgtccttgcccttgttggcgccgtggcaggtgccgtagctgatggccagggcatcgcagccggtctttttgaagaagtctaccgcctgcatggggttagtgtaggtggaggtggcgctgaagacgtggtcctccacgccggccagcacgcccagctcgccctcgacggtgacgccgtagggatgggcgtacttgacgacctcgcgggtcagttccacgttgtcctcgtaggacaggctgctgccgtcgatcatgacggaggtgtatccgccgtcgatgcaggccttgacgctttccagggtcttgccgtggtccagatgcagggcgatggggatggggctgtcggcgccatacttcttgacggtgtcgccgatgttctttgcaccgacggccttctgctcgggagtgccgtgcatgaagtccagctcgccgctcatgtaggcgttggacgcctctgcaccctgcaggatcgcgccggagcgcagcagctcatggatgcggatggcggcctcgatctggccgacgctgttcatgttgaaagcggcctgaccgtaacgatacttgtcggcagcttccagaatggctctcataggtaccagcatgatgtgttcctcctgcttgtgaattatattgataaaattaataaactaattaactgtggatattatagtccgctttttggtggattgcaagtaaaccgcaggcaaaaaagcgaacgggtccaaagattgtaggaaacgacaaatttttatcctgttttttgttgtctacgcaaaataaaaccgcatccgggccggaaagactgcccggtgcgggcagcttcccggcccggatgcggcaaggatttaactgacgctgacagtgcaggcgtagctgcggtgacccatcaggtccaccggctcgccggtcaggcggatggcgcgggtatcgcagaggtcggcgctgctggtgccgatgctcagctctgcggggccgggctcgaccacaaaggccatatcctcattgtagtagcccagctgtgcggctttgaggtcgaactccacggtcttgctctcgccgggagccaggctgatgcggcagaagcccaccagctgctggatggggcggatgacatgagcacccgagaagtggtagtacagctgtaccacctggtcgccggcacggtcgccggtgttggtcacggtgcagcgggcacggatggagccgtcggtgggcagttcctcagtgtccagctccagcttgcccagctcaaaggtggtgtagctcaggccgtggccgaaggggaagaggggacggtcggtgttgtccacatagccgccgctgaagatgacgctcatggcggaatcgtcgccgccaaagccgctgcctacccggtggttgtaggtgatggggatctgaccgatgtggtggggcaccgtgaaggtcagatgtccgcccgggttgatggtgccgtccagcacgtcggccaggacgcggcccgcctcggcgccgggcatgaaggcctgcaccatggcggcggtgtgctcggcagcccagggcagagcaaagacgccggggccgtacaggatcaggaccaccggtttgccagtggcgcacagggcttccagaagctgctgctgcacgccgggcaggtccaggctgctgcggtccttgccttcaccgccggtgacgttgatccagccgcagttgccgcccatggccgcgatgatgacatcgctgtcctcggcagcggtgacggcctcggcaatgccggaggtgtcatccccgatgatcttgcagccctcggcatagcggacgtcgaaccgatcggccagcaccgacttcaggctgcgggcgccgatcttgcccagaacggtgggcaggtcgtctagacgggcctggtcctcggcggagaacatggacagcatggcggcaaaggggttggcggagccgaatccgctctcgcatttcttttccttgttggcggcagcctcgtcagcgatgccgttgaaggtgacggaagagctgtcctcggcaccggccttcatcatttcgatgtaggcggggtaggtgtagccgctgatggggtagcgcaggttgtcggcatgggggccgacgaccgccagcttgaggcccttcttcaggggcagggtgccgtcgtttttcagcagggtgatggacttttccgcaatgcggcggctgaggtcagccttgtcctggttggtcatggaagcgcggaccttgtccacatccacatagggatgctcaaacaggccgtactcaaacttgatggtcaggatgcggcggacggactcgtcgatgagagcctcgtccagcttgccttcccggacatagtcggggagctggcggtaggcgttgccgatggggatctcggtgtccaggccgccctttttggccagcaggccggcttccttataagtgggggcgatgtggaagtagttgtacatcttcataatcgccgcgccgtcggaagtcagcatgccgcggaacttcatggtgtcgcgcagcagagtgcgggcgatctttttgttggcacccacgcacatgccgtcgatctcgccgtagttggccatcatgccggagacgtccgcctcgttggcagcggcctcaaagggagtggcgaaggtctcgtacagttcccggtcgttgatgcgggacacggcgcagttcaggccggattggctctccgcgtagcccaggaaatgcttggcgatgcaggccacgccttgcttgtcctcgccctgcatgcccttgacgtactccacgcccatgcggctgatgaggtaggggtcctcgccgtaggtctcgtaggtgcggccccagcggggatcgcgggagacgtcgatgacggggctcatggccgagttgatgcccaccgagcggctttcctggccgatgactgcggccatctcaccggccagttccggttcccaggtgcagcccacgttgatctgggcggggaacagggtgccgcccgctgccgggtagccgcagaggttctcggtctggagggcaacagggatgcccagacgggtctcctccacaaaataatgctgcaattcgttggaaatctcggcgatctggacggggtccacaatgccgaccatagaatactgggtaaagcggccgtggccgttggggaacttttcccgcagggcgtcgatgctgaccttgccatccacaatgaaggaaccgggcaggtcgccgcagagctgggcggctttttcctccagcgtcatgcgggagagcaggtcctccacacgttccgggatgggacgggtactgtccttataaatctccatacaaagactcctttgctgagtgggtgaaagcgggtgaaggcagaaaaaacatttatttattaaataaaataacaagaaaacaggtaaaagtcaattataattcttaaaaagtccggaaaattttgtaggaactaacatgtgggggtggcggcgcgtttggcagagcggtctggaagacggttccaaacaagaatagatattacaaaaaagtaaaaagcagtggaaaggggcgcttccgggctttctctcggcggggaacgtatacctatataataatagggccggcaaaatgtatggaaaaagtcaatttgttaaaacgtaaaaaaatctgcggtttttttggtgattatcccgtcttgaatagttctgaaaaaagaatataattaattcaataaataaataaaatgcacggaaaaaactgactgtttccgtcaaaaatcgtgcattttattttgtgaaggcagagaacaaaatacaggaggcaaggataatgaagaagcaaaccaaaaagcatgcactgcagatcgcatgcgtgggcatttgcgcagcaatgctcatgaccgcctgcggcggcaacaacacctcttccggttccgctaccggtgagaccggcagcaccggcaccagctccggttccgtctcggcacccaccggcggcggcgacggtgttctggacgtcggctacagccagacgcccgacagcctgacccccttccgtcaggaagcaaaccgtgacgcgccgtacatgaacctcatgtgcgagagcctggccgtcgtcaactccgacaaggagctggagccctggattgccaagagctggaccaccaacgacaacggcttcacctatgacattgagatcaaccagggcattaccgacagcgccggaaacgccatcaccgcttccgacatcgcctggtacatttccaccgccaaggaaaaggccctcaagcccgtctttgccaaggtcgagagtgttacccagaccggcgactacaccctgcaggtcaagatgacctccaacgttgtgggcgctttcgagaagatcctgaccgatacctacgccatcagccaggccgcttacgaggccagcagcgacgagttcggctccgaactgatcagcacctctccctacaaggtcactgagttcaccgccaactccgtcctgaccctggaaatccgcgacgattactggcaggatgtcaacaacctgcccgagtgcgtccgccccgtggtcgacaagatcagcttccactccatccccgaagcttcccagatgggcatcgccctggagaccggcaccatcgatatggccatgcgtgttgactcctccaccggcgctcagttcgtcggcaacgagaactacaccgttgagctgaccgaaggccatcagggctggcagctgttcttctccggcgccgacaccagcgtctgcgctgatgacgtgaagctgcgtcaggccatctgctacgccatcgacgccgacggcctggtcaccggtctgtgcgctggctatgctaccccgatgtacgatgcgcattctcccgtcatggtcggctacaacaccaagtgggagagcgaagaatactatccctacgacgttgagaaggccaaggagctgctggcagagtccaactacaacggcgaaactctgaccatcctggtttcctccgctaccttcagccagcgcctcggccagatggtccagaactacctgatggctgccggcatcaatgttgagctgaacctggctgatactgctctgtactccgctacccgtctggacggcaccaagtacgatatggtcatcaacaccatcggcggcacctacctgtccgacgcatgggccatccgttacgatcccgctgcctacgccaccggcgacgccaccagccgtcatgactacgacctggctgagctgctgtacaccgcatggactcccgacggctggaccgaggagaacatcgacgccgtccactactacctgaaggacaacgccattgcctacggcatggtcaacccccagaacatgaccatctggcgcagcgacctcgacctgcagactgaggtcaaggagatcgcgggctacattgctcctgcggcttccaccttcggcaattattgatctgagacagtgatttcctgaacggagatcggtttccggttgttccggtgagcagctgcttcggcgtccgctcgcagagcgggtcccccgaaaaaacgggggcccgctttatttgggacaacggtaagggaggtaaaacatgggaaaatacatcgtcaagcggcttttgtggatgatccctatcgtcctgggtgtcgcggtgctggtgttcaccctgatgcttttctgcccgggcaacccggcagagatcatcctgggcggcacggccaccgaggccgaagttgccgccaaaaccgaagaacttggcctgaatgacccgtacctggttcgtttgggtgaatatctgagcgacgtgttcctgcacggcgacctgggggcttcctggtccaccaacgttgacattatgacgtccattatggaacgcctgccccgtaccatgatgctgaccatcgttactctgtgcatttcgtttggccttggcattccgctgggcatcatcgcggccacccaccagaaccgctggcaggacaccggttccatgctggtggcactgatcggtctggccatccccaacttctggctggccctgatgctggtcctggtattctcggtcaacctgggttggctgccctccatgggtatcgacaacggtatcttctcctacattctgcctgcgatctccggctgtatgacatcctttgcgacctgcgcccgtcagacccgctcctccatgctggaagttatccgtgccgactacatcaccaccgcccgttccaagggcgtgcccgaacgggatgttatcgtcaagcatgcgttgaagaacgccctgatccccatcatcaccatgttcggcaccacctttggcaccttgctgggcggcatgatgatcatcgagaccgtcttctccatccccggcatgggcacctacatcatcaccgcggtcaacaaccgtgactacccggtcgttcagggcggcaccatcttcctggcgatcaccttcagcctctgcatgctggccgtcgacctgctgtacgcagccgttgacccgcgcattaaagcacagtatgcgtcgcccaaaaaggcaaagaaagaaaagaacgagggaaaggaggcagcagcacatgcctgaggcagtaaaagtaaaagctaagaaaaacagtgaattgctccgtgttctgcggcagatgtccaagaacaaggctgctatgctgggcctcattatcttcttgatcgaggtcatcgttgccatccttgccccgctgatcgcaccttatgactacaccatgatggacatgaccaactgctttgcgctgccttccctggcgcatcccttcggttgtgacgacatgggccgtgacatcttcagccgtgttctcatcggtgcgcggtactccatttccagcggcgtgctggccgtcggtttcgcgctggtcatcggtatggccatcggcgcggttgccggtttcttcggcggctgggtggataacctggtcatgcgtctgctggacgtgatccaggccatccccggcatggtcatgatgatcgtcatctccgccgtgcttggacccggtttcgtcaacaccatcatcgccatggccttcggctccatccccggcatggcccgtatgctccgcgcccagatgctgaaagtccgcgaaaatgagtacattgaagcggcagtctccatcaactgcagcaaaatgcgcatcgttatgagccacctgctgcccaactgtatgtctcccatgatcgtccaggcaaccatgggtgttgcccagaccatcaccctgtgcgccggcctgagcttcatcggcctgggcgtgcagcctcccacgccggaatggggcgccatgctggccgccgcccggcagtttatccgtcaggctccgcacctggtcattttcccgggcgttgccatcgccatcaccgttctggccctcaacctgatgggcgacggtctgcgcgatgctctcgacccgaagctgaagaactgagaaaggaggaactgaacaatgagcgaaaataaggagttcctctcggtcaaagacctggtggtcgagtatatgtccgacggacaggtcgtccacgcggtcaacggcgtctccctcaagctggagcgcggcaagaccctgggcctcgtcggagagaccggcgcaggcaagaccaccattgccaagtccatcctgcgtatcctgcccgacgttggctgccgcattgcgggcggcgaagtccatctggacggcgaggatctgctcaagctccccgagcatgagatgcgcaagatccgcggcaacaagatctccatgatcttccaggaccccatgacggccctgaaccctgtccagcgcgtcggcgaccagatcgccgaagtcgtccgcctgcacagcgacgacaagagccacgcccactgcgaaaagcgtgccaaggagatgctggagatcgtcggcatcccggcagagcgctactatgaatatccgcatcagttctccggcggtatgaagcagcgcgtcatcatcgctatcgccctggcctgcaaccccgacctgctgctggccgacgagcccaccaccgccctggacgttaccatccaggcgcaggttctggatttgatcgccgacctgcgtgaaaagtacaacaccgccatgctgctgatcacccacgacatgggcgttgttgcccaggtctgtgacgatgtggcggtcatctacgccggcaacattgtggagtacggcaccaaggagcagatcttcgatcatcccacccatccgtacaccgtcggtctgttcggcgccatccccagcatgagcgaggatgaggaatggctgcaccccatcgatggtctgccgccggatcccaccaatctgccgcagggctgtgccttcgccccgcgctgcaagtacgccaccgacgaatgccgcaagggccccatcgccgtccgcaagaccgcagacggtcatgactgccgctgctgcaacatggacaagatcgcagagcaggagggttgagttatggcaccggtgattgaagttaaaaacctgaagaagtattttacgactccgcgcggtctgctgcacgcggtggacgatgttacgtttaccatcgaaaaaggcaagaccctgggcgtcgttggtgagtccggctgcggcaaatccacgctgggccgtaccatcatccatctgcacgagagcacttctggcgatatcttcctggaaggcgagcgtgtcaacaacctcaagggcaaggcgctgcgcgctgcccgcgagaagatgcagatcatcttccaggacccgtactcttccctggacccccgcaagaccgcggatcagaccatccgtgagccgctgctggtttcgggcaagtactccaagaaggagatcgaggaaaagaccaccgagctgatggacctggtcggcatcgacgagcgtctgcgcaaggcttatcctcacgagctggacggcggccgccgtcagcgtatcggcatcgcccgtgcgctggctctggaccccaagttcgtcgtctgtgatgagcccgtttccgctctggacgtttccatccaggcacaggtcctcaacctgctgaaaaagctgcagcaggacaaaggcctgacctatatgttcgttacccatgacatgagcgttgtccgccatatctccgacgacatctgcgtcatgtacctgggccaggtggttgagaagtgcccctccaaggagctgttcaaaaacccgctccatccctacacccaggcgcttctgtccgccattccttccacggacatccatcatcccaccaagcgcatgatcctgaagggtgagatcacctcgcccatcaacccgaaacccggctgccggttcgccgcccgctgcccctacgcaacggaagcctgccaccagccgcagaagcaggaggaagtgtccaccggacatttcgtgacctgctgccgcatccacgaactgtaagagcattccccctcccttcgatcagggccgccgccggtgtactgctggcggcggttcctttttttgcaaaactataaaaaagaagagccgctgtaaagcggctcttcgctgtattttggagagaaaaatcagaagaatgcgtccccggcgttgtaggtctcgatgggaccggtccacagcagctggatctcttccacccgctggcgggcgtagctgacatacagcatatccttgggcggccattccagcgcgagtttgaaccgggcggcgtcgtccatggtgcggggggagaagtagatgtaacggctgccggtcagtttgggctcgttgttgttgaaaactttgactcccacgatgcccacctcccggatgtccgaccaggggaccgaacggcgggaaatgcccagaaaggtgagatggacccccttttcatccaccgagaccacggacccgtacaataccgtcacgtaggcaaagatggcaaagatcagggccagaatgggcagggcgatccattcccgcagatacaccatgaccccggccagcaccaggcacaggatgcaggtggccagcgccacaacaaacttgaaggtgtggacaaggtaacggtttttcatggggcggacctcccaaataattcattgatttaataaatagtatatccgcccgccgcatcccctgtcaagggagagtcattcctccaataccagcagccggtcaggacctgtcccgccggtgtggcgcaggggggtaccccggccggtcaggtcggcgcaggcgtccagcacccggcgggtgacccgctctcccggcacgatcaggggcacccccggcggataggcccagaggaactccgcggcgatgcggccctctgcgtcggccagggggcaggggacggcgggcagctccagcgcccgggcgatggtgtataccgcctcaccgggagcgggaggcgcgggatggcctgtcgctttggcgggggcggcaccgggcgcggcatcgtcgatttcccgcaaggcgtcggccagccggtccagggcgtcgtccgcgtcgcaggggctggtcatggccagcaccaggtcgccgcataccatctccagctcaaagccgcggtcccgcagggcgtcggccagcccggcaccggtcaggcccgcgccgctgccgtccatgaggatcttgcccgggtcgtgggcaaagcaggaggggtggccggccaggcggtcggctccatagcaaaagacccgcagccgggaaagccccgccaccgcggtgtcaaagcggccgagtcgctgcgcccaggcggcgaaccactccgccccatgggccgccagcaggccggtgcagccgtccagggacgccatgagggggtaggagggggagctggtctcaaaaatctccagctgacgggcgattttatccgccagcccggggccgtacaccccgcccaggtgcagcagggccgtctgggtcaggctgggcagggtcttgtgggggctctggaccaccacgtccgcccccgccgccagggctccgccctgccagccataggcttccgccatgggcaggtagtgggcgccgtgggcctcgtccaccagcaggggaatgccccgggcatggcagatatccgcaatggcggcaatatcgctcagaacgccctcataggtgggactggtgagaatgacgcaccgggcgtcggggcaggcgtccagggcggcggcaacgtcgtcgggggccacgctgccgtggatgccgaaggcctcgtccggccggggcatgacccaccgggcgtgcaggccccccagttccaaggcgtgaaagaccgatttgtggcagttgcgggcggccaccaccgtgctgcccgcgggggccagtgcccggatgcctgccagcagtccgcaggtggccccgttgatgaggtaaaaggtgcgcgcagtgccccacagggcggcggtgcgggtcatggcgtcggccaggatgccctcggcggcatggaggtcgtcggcgccggggacctcggtaaaatcccagtcggcgggcaggccgggggcgggagcaacccgccgtttgtggcccggcatgtgcaggggatagcgggtcccggccagggcggtgagctgtgtttcaaggatgtgggtgtcctgggacatggtgttcctccctgtgtgccgtcaggcctgggattcggcgtcgggcagcgtgacaaaggtgggctcatggcccagcgcgggcaaaattttgtggagcaggtcgccggtggacagccgcagactggaggtgttctcgcagggatggcagccgaaatacgcccccttgcggacgtcctcgtcgatgagcaggcgcacccggcagtcagggtcgttcatcagggccagcacgctgacgctgccggggtgaacgtccagcagctccgccattttgtcggcgctgccgaaactcagccgggcaatgcccagctggtgggacaggtccttggtgtggaacaccttgttcccggggatcatgagcaggtaaaaggcggtctgctgccggttgcagagaaacaggttcttgcagatggtggcgttgagcacccggtcaatgtcggcacagacctccatggtctcggcggcggggtggtccacccgctcatagggcacgccgaggttgtccagaaaatcgtagcagcgcacttcccgcgcactgcgggcaaggcactcttccgccgtggggcggccggaaacaagctgcatgggaaggttcctcctgataaaatttgtggggcggggaaagggcgggtcagtccagcaccagacgggcggtgctgccagcccgggtcttttccaccaggacctgacgggtcagacggttctgcagggcttccacgtggctgataacgccgatgagtttgtcgttgcccgccagggcggccagggtatccaccgccttttccagggcgtcggcgtccagcgtgccgaagccctcgtcaatgaacagggtgtcgatgcgcacgccgccggcgctctgctggatgatgtcgctgatgcccagggccaggctcaacgcggccataaagctctcgccgcccgaaaggctggccaccgggcggtatttgccggtgtaggcgtcaaagacgtccaggtccagggcggtcttgcccgcgatggcgtcgctctggcggcggcgcagacggtactggccgtcggtcatgcgggaaaaacggcggttggcggcctcgatgacctcgtcaaaatagaaggcctgcacgtactgctcaaagggcagtttgatgcgccctgccacgttgccgttgagggtgcgggacaggctgtccagcacggcatggcgctggtgggcggcgtcggcacgcttctgggcctcagccagctgccgggcggcggtgcggttggcggtcaggcgctggtcggcgcccctgcgggcagcttcggcctgggcgcggagttccttctggtcggcgcagaccttttccaaggtggccagatcgacgttttcgccgccggcatgggccagagctccggtgagggcgcggacccgctcggtgagggcggccttccgggcctcggtctggcggcgggcctgggcggcgtcgtccaaagccttgcgcaaggcggcggcctttatttgcaggtcggcctgtgccttgcgcagggcgtcggcgtccgggtattgcagcgccccggcggcagcctgcaccttggcctcgtcggcggcctgccgggctgccttggcggaagcatcggcctgcaggttggtgagacgccccgccagctgtctgcgccggtccgacagatcggtcagccgggaggacagcttcgccgcacggtctttcagagcgcgaagggcgtccagtttagcggacagctcccgcaagcccttttgcaggctggtgtgctggacattcagggcatcggccagcccgtcgtcgtccagatgggcggcgggagggccgtcgtagcggtttttgcgccggacaaaaaaggcgtcggcgtccttggtaaaggtctcccgggcggcacgggcggctgctgcggcgctgcccgcgtcggcggaagcctgggtggcggctttctggcagcgggccaggaccttggcggcggcgtccacctcggcctcggtgacggcggtgtcggacagccgggccggggcgggatgggtggtggacccgcagacggggcagggggaaccctcgatcaggtcccgggccagcagcccggcccgctgggcgttgagtgcccgcagcagggcggtgtggcggcccgccgcctcgtcggaatttttctgggcgtccagatagcgctcccgggctttgcgggcggtgttgtcggcggcgcgcaggccgggcagggcttggagaaggttcccgcaactttccagaagggattttgccgtgtcagcctgggcttccatccgggccaggtcggcgtcgggggtgccgcactccgccagggctttttcggtgtcggcctggtctttggccaggtcggcgtcctgctgacgggcatcgaccagggccttggcggcggcatcggcttcccggcgggaagtttccgcggccttgcgggcatcggccagggccttatggcgggggagttcctcctccagcgcctgcagggaggcggccagcgtttccagctcggggcggcgggcctcggtgtcggcccagtgtttctgctgctccggcagagcggcctgcagggcggccagggctttttgtgcctcagccagctccgcccgctgcccggccagagagcgggcggcttccaggtcggcggaacttttggcgagttccgcatccagggcttccaccaggtcggcagcctgcttgtatgctgcttcgtcggcggcaatgagcgttttggccagttcggcggcgcggggggcctggtaggggtcctgggcagcctggacttcagccagctcgtcggcgtcggcctggggcagccggggagagggcaccagagcgccgatctgcagcagcaccccgtcgtccgcccggttggcggcagcttccgcctctcttgcccggcgctgggcggcggcccccagctgctggtaggacgctgtgccgaagatctgccgcagaatggcgctgcggtcggcggagggcgcattgagcagccgggtaaagtcgttctgggccagcatggacacctgggcaaactgccgagcgtcgatgcccagcagctcggtgatggccgcggtgacctgccgggtcccggacaccggttcctccggctcccggatcagctcggccttggcggcggcggtggtggtgccttccccccgggccttgcggcgctgctgttccggggcgcggtagacggtataggtgcggccccggtgctcaaaggtcaggcggacgtaggcggtggcggcggggtcggcaaaatcgctgcgcagcatgtcgggagcgcggtaagcgccggtgacctccccgtacagggcgtaggtcacggcgtcaaacagggcggtcttgcccgcgccggtgtcgccggaaatgagaaacagcccgccctgcccgaactgggaaaaatccagctcggttttggcggcataaggaccgaaggcgcacagttccagcatcagcggccgcatgggaacacctcctcccgcagttcggccagggcggcggcttcggccggggtggggtcacggccctgcaccgtcacaaagaaatcggcaaacagttcgtcaaaactgcggcggcggacctcggcggcggtcagggccgcgtcgtcgggaacgccgtttttgggtttgtagtccagcttcatggcgttggggtaggcggcgcgcagccgggccatggcgtcggggatgggcgtgtcgtcggtgagggtcgcccagatgtagtcctccgcgtcgcagacggcgtcgggggcggtgagcttttccagcggcccttccagatggcgcatggcacgccggggatgcagcccgatcagctccacctctgtgtggcctgcgccgtcaatggtgaccagggggacagatttctgtgccccgcactcatccagggagtagcacagcgggctgcccgcataccgcacggtggggctgcccaccgtctgggggcggtggatgtggcccagggcggtgtagcaaaagcccgcaaaccgggcggcatccacctgctccacggtgcccacttccagggcgcagctctcgctgcccgccacctccggcgggcggctggatgccgtcacaaactgatgggctgccagcacccggcgcaccccgtccccggcgggaatgccgctcaaagccgcggccaccgcatcgtcgtagcagcggatggggacgtcgggcaggtgatggcgcacggtggcggcccgcacaaagggcagcagataaaactccacggggccgtcatcgtcggtcagcaccaccgggtccagatgcccggcataccgtccggccagatacacaccctgccgggccagaagctgcccggcgtagtccaggcgctcggcgctgtcgtggttgccggagatggccagcacccggatgtcccggcgggccagctcggtcaaaaaccagtccagcagcagcacggcggaggcgggaggctggggaacgtcgtaaatgtcccctgccgccaccaccgcctgcacgccccgggacgcgcagaggtcgatgatctgttccaggatataccgctggtcctccagcatgtcaaagccgttgacccgcttgcccaggtgcaggtcggcaaggtgcagaaaccgcatgggccgcctcctttttatgggatgggaatgggatgaaacgattggaaaaggaccgggcttaccgccacagcttttcccaggttttcagatccatggacacgccgggcagagcctccaccgtctccaccccggcggggcggaatccccgctttttgcagaaagcctcggcctgcaggtcacgcgcccacactttcatgaacacacgggtgcggccgtcgccctcggccaggcgctgggcgtaggtcagcaccccccgcccgatgccacggccgcgcacatcctcgcacagatacagccgggaaatgcacatggcccccacgggggacaggtccagggcaaaatagcccacctcccggctgcccaggtagatgaggaagtagttgacgccgtcgcggatctcgtcctcggtcaggtcctcgttctggtaggcctcggccaggagcaggccgtttttgccccccagcttgcggtagacacccgggaaaatttcccgggccagctcggccacgcgggcgatgtaacgggctttggtcacctgtttgtagctcggattcatagataaactcctttataatggatggatgaaaaaacgggcgtcgggatgtggtttgcgcttactccaccgtcaccgaaacgtgggcgggcatgcaggcggcccagtctccctcccgggaaaggcggccgaagccctcgcacagatggtcggggcagggactgtccacaaaggcgatggtcccgtcccgaacctggagatggacggtgtagccgttgctgtccaggtcgtagtcggcgtcctgggacagggaaacgcgcatggtctgctggggatcgccgtactggatgacggcggtgcggccgctgccgccccgggtggcaaagtagatcaccgcagccagcagcaccaccacggcgacaaacaacaggtttgtccgccgcgtgccggaaaaaaacttgtgcatcaaaacctcctggaaaaatcccggtccccgttggcggccggaatatggggagaaagctcagtcggggtcatagttcaggtccagagtcttgccgtcaaagccggcttccgcctcggcaaaatactgccgggccgctgcaaggccgggacccgtgtcggtgacggcggcgctgtaatgggtcagccacagcctgcgcaccccggcctgggcggccaggcggccggtctcggcgcaggtggcatggccgtacagctttgccttgtccagatcctcgtccccgggataggtggagtccatgcagagcaggtcggcatcccgggcggcgtcggccagctcgccgcaggggcggctgtcggtgccgtagaccacccgcagcccccggcggggcgggccgagcacctgatggggggcaaagccccccgcctcccgcccggcctgcagctcccgccacagtctgaccgggatgcccagcgccttggcgcggtcggggtcaaagcggcccgcccggggcaggtcgaaggcgtacccgcagcagggcgcccggtggcgcaggggaaaggcggtgacctgtccgcccagcaccggcagcggcccggccttggcggcgtcctccgccaggcgcagctcaaagggcagcggccccgcaacagccaggaaggcctgcaccagccgggaaagccccggcggtccggccatgagcaccggctcggtgcggcccagggcggccatggtctgccacagccccggcaggccgaagatgtgatccccatggtagtgggtcagcaggatggcgtccaccttgtacaggctgacgccccaccgccgcgctgcggtctgggtgccctcgccgcagtcgatgatcaggctgcggccggccgccgtcagcgccaggctggaaagcgcccggtcgggcaggggctgggtgccgccgcagcccagcaatgtggcagtgagcatggggagttcctttcccgcgggatggccggaattctgccgcgctgcaaaatcccggcgggccgccgcgtttttgtatttggataccctgccattataccacccctcccacagggagaaaagtgtgcaatctacttgcaaaatgcggggcgggatgctatggtattggtatccggaatttgtaaaaattcgcgttacaacgtgcgaaaatggacgataaacacaacggagggtagtaactatggcaagacgacacaagatgtgccttttggggcttttggcggcactggttttgatgctgtgcgggtgcagtgcatccgacgtgcatctgccggaacaggtggacctgtttcagggagacagttttcccctggcctcggcagtggagtgggacggggagaccaatgccgcttccgccgccctgctgctgaccgcagcgggggacaacggcatcaccatcacctttgaaagcgccgaccccgccgtggcggtggtggacgagcagggcatcatctacggagctgctgccggcgagaccacggtgacggttacgtgtcctgcctttggttattctgcccaggtggcggtcaacgtgaccgagccgctgggcggtttgtacatggaaagcgccctggatctccagccggggcagaccggcagtctcaataccatgctgcctggcggggatctgtcctcggtgcagtatacggtggacgaccctgccgtggtgtcggtgtccgccgacggcaccgtgaccgccctgtcggagggcattgccaccatcaccgccacggcggcgggcagctcccttaccgcccggtgtgaggtggtcgtggggaccccggtgcagggcgtgcaggtctcccgcccggacgctgtgcttgacgcggggcagaccatggtgctgggcgcccgggtctggccggacaacggggcggaagttacctggcacagcagcgacccggccgtggcggaagtgtctgccgacggcaaagtgaccgccctgacccccggcacggtgcagatcgtggccgaagtgtccggcaagaccgccgcctgcaccctgactgtcaccggcagcgccactccggagagtgcaactgccgaaactgccgccactccggaagccgccacccccgagaccgccacggcggaaaccgcggctaccccggagagcgctacccctgagacggctactgccgagaccgcagcaaccccggaaagtgcgactccggagtctgccgccaccccggagactgccgtcccggaggaaccggtttccaccccggagaacgctgccccggcggagggtgaaactctgccggctacccccgagaccgcggccatgaccccggaaacggcggccactccggagagtgcaaccccggaaagcgccacaccggagacagccaccgccgaaacggcgaccccggaaagcacgacccccgagacctcgtcaccgggggcggaacagacgacaggggaaagctccgacacgtcggaggacagcggcggaggctggctggactggctgggcaatgccctggccagactgttcggacggtgagagcaaaaccggggcaagatttgcggcgattttcataatcgataaaaatagtcgaaaatcttgaaagaatatggtacaatgataaaaaggtgctgccgtcagtaggtcggtgtctcccgctgagactgggcgtactgccggggcgtgatgtgatattccgcccggaaggcccggtaaaagttggcgtaatctccgaagccgcagtactggcagacctcgctgggggccacgccgctgcccagaagctgcttggcgatcatcagccgcttctgcaggatgtaacggtgtaccgtggtgcccacctgccggtcaaacttgcgcagcaggtggtatttgctgatgaaaaaccggtcggccagatcgtccagagtcagggattcgctgtaatgggcgttgatatactccaccaccgcgtccaccacccggtcgcaggtgcaggcggggggctgggccgcggcctcggtgaccgccttgttcaggtccaccagcagcgagatcaggcagcccgtggccagaagatcgctgccgtactcatcctggctgtgcagcgtgcccagtgtttcaaactggcggcggaaatccgcgctgccctggggagaaggccgcagcagattgccgtgccccggctgggaagcgtcaaagcaccgggtcaggctggtcctggcgctggaaagaccttccagataactgcgggccacccacagaacaatgcgctcataaggctcggcgtcggtggagatgcgggcctggtgcagctccagcgggctgatgagcatgatgtcccccggccgcacctgatagatgcggttttccaccgtgtaggagacccggccccgcaaaagcaggtagatctcataaaaatcgtggtgatgcagggcaacttcgttgaggtaggtgctgcggtagcggtatacctcgaagtccggtgcaatcatttcctgccgggaagtgaagtcctgaaatagtgcgcccatcgttgtaacgtcctttctgcggagaaaacccgccgtttccggcctttgccggcggtcggggaaccctcccctatacatatatagcatgacgcggcaatttttacaaggtatcaagcaatccagtcaatttgaattgtaaaaataatggcgtatactgtgcttgcagggcgagaaagaaaaaagcccgtcccgcgtccgccttttggtaaagcaagggcagacagccgtccggatatgccggtgcggccgcccttttgattttgaataaggagagattttgccatgaagatgaatgctgcatccctgcaagacaaagccggctggcaggccgtcaatgtggctctgcctcagtttgaccacgccgccatggtcgccgccaccaaagaacaccccatctgggtccacttcggcgcgggcaatattttccgcggatttatcgctgctctgcagcagaagctgctgaaccagggcctgtccgacaagggcatcatcgcagccgacaccttcgactacgacatcattgacaagatctacactccctttgactgcctgaccatgaacgtcaccctcaatcccgacggcaccaccagccgcgagatcgtgggcagcgtggccgagggcctgcgcgccgacagctccgacgctgccatgatggcccgcttcaaggagatcttcaccgatcccggcctgcagatgatctccttcaccatcaccgagaagggctacgctctctaccgtcccgacggcagcctgatgcccgttgtccaggccgacatcgacgaaggccccgccaaggcacgccatgccatgagcatggtcgccgccctgctgttcgagcgcttcaaggccaacgcagctcctctggctgtggtcagcatggacaactgctcccacaacggtgagaagctgcaggccagcgtgaccaccgtggccaaggcctgggccgaaaagggctatgtgggcgacgacttcatcgcctggctgactgatgagagcaaggtcagcttcccctggtccatgatcgacaagatcaccccgcgcccccacaagatcgtggaggaggccctggctgccgacggcatcgaggacatggctcccatcgttaccggcaagaacaccttcattgccgcctttgtcaacgccgagcgtccccagtacctggtggtcgaggacaagttccccaacggccgtcccgctctggaaaaggccggcgtctacatgaccgaccgcgacaccgtcaacaagaccgagcgcatgaaggtcaccacctgcctgaaccccctgcacaccgccatgagcgtttacggctgcatgctgggttacaccctgatctgcgatgagatgaaggacgccgacatcgtcgccctcatcaagcgcctgggctaccaggaaggcctgcccgtcgtcgtcgatcccaagatcctcgaccccaaggccttcatcgacgaggtcgtggagcagcgcctgcccaaccccttcatgcccgacgctccccagcgtatcgccaccgacacttcccagaaggtcggcatccgtttcggcgagaccatcaagagctacattgccaccggccgcgacctgaacaccctggtgtccattcctctggctctggctggctggctgcgctacctgctggctgtggacgacaagggcgaagcctttgaagtttccgccgatcccctcaaggacgatctgcaggccaagctggccggcatcgaagtcggcaagcccgagacctacaacggccagctgaaggagatcctgtccaacgcttccatcttcggcgtcgatctgaccaccaccccgctggcagagaagatcgagaactacttcgttgcagagctggccggccccggcgccgtccgcaagaccctgcacgacgcactgcagtaatctttcgccttgaaaaaggcgtgacaccaatataaaggaggacaacctatgcctatgcaaatgggatggcgctggtatggtgagggcaacgaccccatcaccctcggcgacatcaaacagattcccggcgtttccaccatcgtctgggcgctgcacgacaaaatgcccggtgagatctgggaagtggacgagatcaagaaggtcgtcgaccagatcgaagctgccggcttcaatgccgacgtggtcgagagcgtcaacgttcatgacgacatcaagatcggcctgcccacccgcgatgccctgatcgagaactacaagcagtgcatccgcaacctgtccaagttcggcgtcaaggtcatctgctacaacttcatgcccatctttgactggacccgtaccgacctgttccaccccgtgggtgacggctccaccgctctgttctaccagaaggacatgatccaggacgactacaaggccatggccgagtacatcctgaacttcaccgagaagtacaacatgaccttccccggctgggagccggagcgcatggccaagctggatgagctgttcaaggcctacgcccctgtcaccaaggaaaagctgtgggacaacctcaagtacttcctggaagccatcatgcccacctgccgtgagtgcgacatcaagatggccatccacatggacgatcccccgtgggacatcttcggcctgccccgcctgatggtggacgaagccagcatcgagaagttcctgaccatggtggacgatccgtacaactgcctgacgctctgctccggcagcctgaacgccaaccccgacaacaatgttgccgagatcgtccgcaagcactgcgaccgcattgcctttgcgcacatccgcaacatccatcacttccccaacggcgacttcagtgaggctgctcaccgcgactgctgcggcgagaccggcatcatcgaaatcctgcgcgcctaccatgactgcggcttcgagggctacatccgccccgaccacggccgtcagctgtgggaggaaggccccggcaactgccgccccggctacggcaagtatgaccgtgccctgggcatccagtacatgctgggcgtctgggatctgctcgaccgtctggacgaggagaaaaagcagaaataagctcccgtggcggtgacccgccacgtctcaaagggggaaacagtcccgcacggcgatgcctgacggggctgtttccccctttggattccccttcgacaaaatttgacatcaaaccgcgcactcggcgcacggcgcctcgcacacaatttgacgccaaatttccctggcggtgtctgcaccgtcggcacatgtccgccggtacagacggattttgaactcttttcaacagaaacactgctgactgttgaaatccaagaccgcccccgctcggtgctttgcgccgcagcgggggcggttttgtcttgacgggaacgcggggcgcggccataatgggaatagaacacattgtcaaaggggagcaaaccgccatgaatgccgagaccaaagcccgtatcgaagcctatgcccaagcctgccgggaggagcagaaggaactgctctgcaccctgggatgcctgcccgcccccacgggggaggaggaccgccgcgcggccttctgccgggactggctcgtggcccagggcgcgggggaggtgttcatcgacgaggccaagaacgtgctttgccccatcggggacgacggcaagggggacctggtggtgtttgccgcccataccgacatcgttttccccgacaaggacccgctgcctttgtccgagcatgacggcaacctttatgcccccggcatcggggacgacaccgccaacctggtcaacctgctgctggcggcccgctatctgatccaacaccccgccccgctgacctgcggcgtgctgatcgcggccaattcctgcgaggaaggactgggcaatctgcgggggaccaaagtgatttttgaacggtacggcacacgcatccgggcgttttactcctttgacctgtatctgcccctctgctgcgacacggcggtggggtcctaccgctaccgggtgacctgcaagacccaggggggacattcctacgcggatttcggccgccctagtgcggtgggcatcctgtgcggtctggtggaggaactctaccgcgtccagccgcccacccgcgcccgcaccacctataatgtgggatgcatcgagggcggtaccaccgtcaactccattgcccagcgggcgtccatgctctatgagttccgctccaccgctcaggactgcctggaggagatggagcagaaattccgcaccgccctctcccactggcaggacaagggcggcacactggaagtagagctgctgggcgtgcgcccgggcagcggcccggtggacccccggaacctggaacacgtgacggcccgcagctgcgacatcatccgcgcttttacgggcagcgagccggtgcggatgcccaattccaccgacagcaacgtgcccctgtctatgggcatcccggccaacaccatcggcaccgtgtggggcggtctggcccatacccgggaagagtggatcgccctggacagcctgcctaccggactggcggtggccctggccctgatgctggaataccgggcccccgccgaacctgccgcagactgagtggccctctccgggcagtacgttgtcctatacagagtctttggaaacagccgggcaggatggctgtttccttttttttgatacatctttgctgaaatttgcctttatgttgggggtaccgaacaagaagggagaggaatgcaagatgaaacgacctgctcaacgccgcagcgctgccctggtgctgcccgccctcatgatggccctgctggtccccgccgccgccctggccgggtgtgtgcctgccggggaggatgccctgcccgccgcgaccgggccggaatctccggaggaaccgccggcagaacccgcgcaggaaacgggggaggtggacagcggcctttccgggaccgcagccccggcgcccaccccgccggagggcgactacgccgacctgtcgggattctcgccctccggggaggtggaaggcctggccgaccgcgcgggcatcagcggatacggctccgacacggggtattacagcttccgcctgcgggaggatgcctccgccagcctgtgctacctggactatgcgtcggggcgggagatcgtcctgtgcagccagcccaactgcgcccatgacagcgacgcctgcccggcctggtatccctttgccaacgggctgcgggcggtgccggtgggggacaggctcatcgttttgcagggcggcagccccaattatgccgacctgctgggggcgcaggccgtccccaaagtggaggtcatggaaccggacggcagtgaccggcaggagacttttgccttcccggccagctgctgggtgagtaccctgccccgtggcggctttgcccgggacgaccggtatctctactttaccgtcaccgaccagagtgccggagccaatgcccggaccctctgtgccgcggacggcgagggcaatgtctttgccctgtgcgctctgcccgaggacgaggaacgcatcgcgggcggggacggcggcgcgctgatcctgacctgtatgcccggttcctccgacctgagcgggcaggactacgtgacacaggtactgcgcctggacctggaacaaatgcagatgaccacgctgttttcctacccggcggaggcgctgggagtctgcgggcagggggcctactatgtgctggacggtcagacattgcagggatacagcctgaccgatggcagcaagctgtcggacgtggcggtggacaaccccggcgtccagaccctgtacggtgtctttgacggcagactgctggcgtcgggttatacccgggagggcgaaccgctctgttatgctctggacgtggagaccggggagcgcactgacctgccctatatcttccgtaaggacagcactgtggcgtttggggagatcctggcccaggcagggggccgctttgtctgtgtggccggcgtgcagagcgacgccgtcacctacccggcccaaagcggggaggaacccatgcggacctcctggctgttccctgcctatgccctggtggaccatgcggatttttgggcgggcagccccatgcaggtcatccctcggccggtggaatgacggccgaaatctattgacggaatatcaaaaagccccggcacatgcaggtgtgtgccggggctttttgtgcctttcccacccggcaaaagggaaaacccaaacgtgtggaatttgcgtaaaacaacttgcgttagccgtgattaacaacaaagaacccgccgcccttcccggcgtgctttggcaggtttgacaaatctctgattagcgcttgacaactgcagttagcgatattaaactacgaattggaaaaagccgggaagacagcccaggcgcggggcgccccggcggcagacgcgccgacagacgaaggaggggcttccatgatgccgctttccatggcaagaccgggtgagacggtcaccatacgcaagatcacgggcaaggacgatgtccgccagcatctggcggagatgggctttgttgtaaataccgatgtcaccgttgtgaacgagctgggcggcagcctgatcttacaggtcaaggacagccgcgtggccctggaccgcacgatggccaaccgcgtgatgatctgacaggagggattgtgatgaaaacactcaaagacgccaaggtgggcgataccgtaacggtggcacgcctgcacggcgaaggcccggtcaagcggcggatcatggacatgggcatcaccaaaggcaccgccatcaaggtgcagaaggtggcgcccctgggcgaccccatggaactgaccgtccggggatatgagctttcggtgcgcaaggccgacgctgaaatgatcgaactggtctgacaccgcagagatcgagggaggaatttgccatgtctatcaaaattgcccttgccggcaaccccaactgcggcaagacgacgctgttcaaccatctgaccggttccaaccagtacgtgggcaactggcccggcgtcacggtggaaaagaaggaaggccgcctcaagggccggaacgatgtcatcatccaggacctgccgggcatctactcgctgtctccctacaccctggaggaagtggtggcccggaactatctggtcaatgaaaaaccggatgtcatcctcaacatcatcgacggcaccaacatcgagcgcaacctctacctgaccacccagctcatcgaactgggcatcccggtggtcatggcggtgaacatgatcgacttggtgcgcaaaaacggcgacaagatcgacctgcacaagctggggaaggctctgggctgtgaggtccgggccatcagcgccctcaaaggcgagggctgtctggaggccgccgacgccgccgtccggctggcgggccagccccgcaccgcggaacttccccacgtgttcaccggcagcgtggagcacgccgtcgcccacatcgaggaatccatctcggacaaggtggacccgggtcttttgcggtggtacgccatcaagctgtttgaacgggacgaaaaggtccaggtcgacctcaagctgtccgccgacctggccgcccatatcgacgcccatatcgccgactgcgagcgggaactggacgacgatgccgagagcatcatcaccaaccagcgctacgcctacatctcctcggtggtggacaaggcagtggtgaaaaagcgggcagcccatgcgctgaccacctccgacaagatcgaccgcatcgtcaccaaccgtatcctggccctgcccatttttgcggccatcatgtttgcggtctacaccatcgccatgggcggcacccccatctccttcggcaccatggccaccgactggaccaacgacgttctgttcggcgagatcgttcccccggcggtggaaggctttttgacctccatcggctgcgccgactggctggtgtccctcatcaatgacggcgtcatcgccggcgtgggcgcggtgctgggcttcgtgccccagatgctggttctgttcctcatgctctccatcctggaggatgtgggttacatggcccgtatcgcctttatcatggaccgtattttccgcaagttcggcctgtcgggcaagagcttcatccccatgctcatcggcaccggctgcggtgtccccggcgtcatggcttcccgtaccatcgagaacgaccgtgaccgcaaaatgaccatcatgaccacctgcttcattccctgcagcgccaaaatgcccatcatcggcctgtttgcaggtgcattgttcggcggcagcggcctggtggctacctccgcctacttcatcggcgtggcggccatcatcgtgtccggcatcatgctgaaaaagacctggatgttcgcgggtgagccttccccctttgtcatggagctgcccgcctaccatgtgcctgcctggggcaacgtgctgcgcgccacctgggagcgcggctggtccttcatcaagcgggccggtaccgtcatctttgcttccagcgtcatcctgtggttcctgcagggcttcggcttcactgacggcgttttcggtatggtggaggacaacaacaccagcctgctggcgtccatcggcggcctggtctccttcgtctttgctcccttgggcttcggcacctggcagtccacggtggccaccgtcaccggcctgatcgccaaggagaacgtggtcaacaccttcggtgtcctgtacggctttgccgaggtcgctgaaaacggcgacgagatctggggcaacattgccgcggacttcaccgccctgagcgcttacagcttcatgctgttcaacctgctgtgcgccccctgctttgccgccatgggtgccatcaagcgggagatgaacaaccccaaatggaccgcctttgccatcgggtatatgtgcgtctttgcctacgcggtatccctgatggtctaccagatcggcggcctgatcaccggcgaggtccccttcggcatcggcaccattgcggcgctgatcgtgctggcgggcatgatctggatgctggtgcgcaaaaatccctacgacggcaaggaggagcagaccctcaaggcttcccgcatggaggctgcccgctgatccttcggcccgtcctgtaaatgtaacaacgcgcctgccccgggtcagacggccccggagggcagcgccccggaaaggagctagtctatggcgaccgtaattgtttctcttgttgtatttggagccgtggcctttgtcattggcagaggcatttacaaccgcgtccaccgcaagggcggcggatgcagctgcggtggaggctgctccggctgtccgggctcctgcctctgccaccccgaaaaataagcccttcccataagttccatacgcataaccggagaaaagccccgggacgtgccgctgtctgcggtgcgcccggggcttttccctgtgtgccgtccgggattgacccggcggggtccggcagagggaggggaaagccctgccgtccctggctgccgcaaacacaaaaggcgcgccgcgggcaagcggtgcgccttttgtgctgctgtatatgctttcatcaggagatgggagctgttgaaatcatgcaaggctctttggagcggagcctttcgatgtatatagtttaacatggctaacccgtgttgtcaatggctaactacatggaaatttgccggtgaaacagactttgtaaattcctacaaaaatgcaagggaaaataccgccggtcccggcgctctgacggcggggcggggaacgggcggaaaaaagcgccgcagaccggaagggcatacagcgccgggcaaatcatgtatgctgccgcacaccttttcaacagccggaagggcatcccctggggcggaaaggtgcgcggcggagcctcagacctggggatcttcgggcatttgggaattctggctgtcggcgtcatgggcgcggacctggggctgatgttccgggtcctccccaaagacggcaggatcgacctgggggtcaagggcctggcgcagttcgtcgatctcctggggcgtcacgtccccggcttggtgggcatggcggtggctccgggctgcgccgagggcttcggtgtgatcctccccgggcagcatgccgggcagcatgtcgccgccctccgggatgctggtccagaaatcgccgcgctcgtcctcggccccgcgggggccaaacagttcatggtacataagatgccttctcctttcgcgaatagccggacctgtttgcggccacactggatgatgtggcagctttttcaggcggtcacttccagtattgggacgaaaggatggtttttatgcgttcgcgcgggggacttttttggcaaagcctgtttttgacgctgttggtgctggtgcccatgtcggcggcggtgctgtacttttcgggacagcgccagcatcaggcagaggtggagcttgccgccgcagccgggcgcggggatgtcggcatcgacgcgggggccaccaacaccttccgcctgctgctggccattcagaccgacaccccggaattcctcctgctgcgggtggatgccccggcgcggaccatcaccttctgcggggttccgggcgggaccctggtggatgcccccgagggccagaccaccctggaggactgctacctggcggcaggcccggcccgggcggcgcagctgctggccgacacggtgggggtggcgccggacgcctactttgccgccacgccggacacctatggggagctcatcggcacagagaccaccgcccgctttgacacggcgtcggtgctggacctggaacgccgcaccgagctgggctacggcgaggaaaacgccgccgaactcacccccggcatgaccgaggattttctcgccaccctgcgggagggcatggacctgaaagcgtcggcgtctttgcgggcggcggtgtggtgcgtgttcctgcgccagaaccccgcccggctgaccttgctggtggaggccgcccgggaggaatctccccgcaccctgaccagcctgaccgcccaggacctgctcaagctggagcagacgctggaatatctgtccggccagaccgccgccaccattgaatacaccgttctcaccggccgccagacgtcggcgggctatgccctggacggggaagggcgggaacaggccgccgaacttctgggataaggctcagcccagccaggcccgggccagagcctgggccgcagcgggaatatcctcgtccgccagggcggcgtagcctgccaccacggtgtcggggggacagcgttccggccgagccaggtagtattcgctcaacccgtggaggagaaccccctctcgcccggcggcctccaccatggcggtctcgccccccgcgccgggcagggtgagcagcagatgcagccccgaatgccggccccggatggtcagttccggccccaaagcctcggatagagcggcggtcaggtgttccatccgctttttgtaggccaggcgcatccgggccaggtgccgggtaaaatagccgccggtcatgaaccggcaaagagtctgctgctcaaaccgactgacggtgttggagtaaagggcgaaatcccggcggtagcggtccagcagggccaggggcagcaccatgcaggcaatgcggatgccgggggccaggcttttggaaaaggtggtcagatagaccacgggaccgtccgggccggccatgccctgcaggctgggcagggggcggatgtcgaaccggaactctgagtcgtagtcgtcctccaggatataccgccccggcacttcccgggcccaggccagcagctgtgcccggcggggggcgggcatggtcacgccggtggggaagtggtggctgggggtgatgtagcacaggttggccccggtggcgatcagcccctccaccgaaagcccgccccggtcaatgtcggcgggcaggcaggggatgccgctgttctgcagcaccgcccgcgcccgggaatagccggggttttccaccgcggcggtgccccctgcaaacagatgggccaggcagcccagcaggtactcgatgcccgcgcccaccaccacctgttccggggtgcagctgacaccacggtaggcagccagatactgggcaatggctgcccgcaggtcggcgtcgccctgggcttcgccgcgctggagcaggccggggctgttgtacaaaaggtcccgctgcagcctgccccagctccgggccgggaacagcgccgtgtccacgcccaccgtggacaggtcgtaccgcggccccgacgccgggatgggggcctgccgggccggacggcgggcaggctcgggccggggcgcgggggcctcggcgtacagcataccgccggtctcctgcacaaagaatccccggcggggacggctctcggccagaccttcggcggccagcatctggtaggcggtgtccaccgtgttgacgctgacccccagccgctccgccatggtgcgccgaccgggcaaaggccgccccggggccagcacaccggagcggatctccccggcaagggcgaggtagagctgttcatataaagggatccggctttcgggatggagttcgatcatggcgtcatgcctccctgtaacgaaactggccccataaaaaatatatatactgggtatttttacagagccagatgtgactataatgggagcataccttccccgcagcggtttgtcaagcggggacagggagttcatggtaaagagaggggaccctgttatggtcgtatccacgcctgttttgtggcttttgttgtttttggtcgtgtttgccgtcgtgctgggggtggcactcagccgcaccgagtttaccacccgcaagatcagcatgatcggcgtcatggcggcattgagctttgtggcctatgagtttttccgcattcccacgcccagcggttcgtcttttcatctgggcaataccttcactgccctgaccgccctgctgctggacggcgtgtccggcggtctggcgggcgccatcggtctggccctggcggacatcgtggccggcgatcccggttatgccatcaccacctttgtcctcaagttcatcatcggcatcgtctgcggcaccgtggcccacaaggtctttcacctgcatgacctggacggggcgggcaagagcaaagcccggtacatgactgccgtggtgtgcagctctttcagcggcttgctggtcaatgtgtttaccgatcccttcctggggtatttccgcaaccggtacctgttcggccagacggtggagctggcgtcggtggtggccaaggtggccagcggcgtcaccctggtcaactcgctgatgtccaccgcctgcgcagtggttttgtacctggcattgtaccccgccctgaaaaaggcccgcctgttgccgggacaaaagagcagccgcctgcacgcccattgacggagagaaacaaaaaaacgctgccgcacgccggattttaagcggaaaagatgaaaaaaacggaaagctctggcgcgaaaggtcaaaatggtgtagaataaataccgtatgattttctgcgatcaacgggcaggagacttcctcccggaaaggatacggtatgtcaaaagggaaaaagaaggggagccaggagaatttctggcagcgcatggatgtgcgcagcagaatgtttttcgtgctggcactgtgcagcggggcgatcctgctgacggtggccgggaccttcctggcggtgcacggcaccctgaaagaagaaactgccggggatgacagctcggtggtcaccgagagcgattacgatcagaacgaaaacgctattgataccgctcagtacgcctccaccattctggaggagagcgaggacgcgggcgaggagtatatcgacgagacgctgtttttgggcgactccaacaccgcccgtatgcgtctgtacgggtatatctcctacgacaactcagtggcgtcggtgggcatggcggcccgcagcatcgaaagctatgcctgcgcaaaatttgaaggatattcctcctacaagaccatgcccgaggccgtggccctgatgcagccccggcgggtgctcatcaccttcggcaccaacgacgtttcctccagcctgacggcggaaaagttcattgagaattatgaatccggcatcaaggccatccaggaagcctaccccagtgtggacatcatcatcaattccatcccgcccatcggcaaggagcacagcaactcggatatctctcagtcccagatcgacgcctacaacaaggccatcgtccagatgtgcgaggacaacggctggaaatacctcaacagcgccgaggtcctgaaaggctccgacggctacgccaagagcggctatgtggattccgacggcattcacctgatgcgatccgcttgtgaggttctgttcgattatatccgtacccacagttatattaccgaggacgatcgtcccgaacttaagccgattccgaagcatttagagcaggataagaatgtcagtgactccacagctaatgcggtgcttggaacccccacccccacccccgcggcttccagctcgtcggaggagcaggaggaggaatcttcttcccagtcgtcttcgtcctcgtcgcagtcctcgtcctcctcccagacctacacctactgggatgaggttattgcccccacctgcacggcacagggctacaccatccatcactgcaacgaggattcgtccagggactacaccgacaattacgtcaatgcactgggccataatgaggtgacgaaggaggacggcagcgtggtctgtgaccgctgcggcaccgtgatctccgccgcaccgacccccacgccggatgactcctcgtcgtcctcttcttcctcctcctcggaatccaccgactccggttccagttccagctccagttccgatggcagcgacagcagccagaccgacagcagcgacaccaacacggagggtgacacacctcaggcttgacatatgctgtgaaaaggtatattctacaaagacttatctttccagcgcacaacagatacagaaaacaagtgaaaaaccacatccgtaccgggcgaccgggacggatgtggttttagtatatacagaaacttgaaatcactttgctttttgaaagagaggcgaccttgtatggaagcacagccttcggcttgctcccgcgcagcagagggaaaacgcgccagcgttattgggatctgctgtaatctcggcctgtttctggccaaattgctggccgggcttttgtccggttctctgtctgtggcggcggatgccttcaacaatatgtccgacgcctccagcagcctgatcagcctgctgggtttcaaactgggggaaaagcctgccgatcccgaacacccctacggtcatggccggtatgaatatctggccgggctgtgtgtgtcggtgctgattctggcggtgggcatcgaactgctcaaaagcagcgcctcccgcatcgtcacgccggagccagtggactttaccctgctgacggcggtgatcttgctgctttccatcgcggtcaaggcgggcatgatgatcttctaccgccgtgtgggccgccgcatcgattcccagaccctcatcgccgccgcggcggacagccgcaacgacgtcctgaccaccgcctgtgttctggcgggagccatcgtctcccgcatcagccagtttgagctggacggctttgtgggcctgggggtggcgctgttcatcctgtacagcggtttcggcctggtgcgggataccctggaccccctgctgggccgcgcccccgcccctgaggaggtggaggacatccggcagaagatcctctcctatcccggcgtcatcggcacccatgacctgctcatccacgactacggccccggccgtcagtttgccagcgtccacgtggaaatgtccgcagcgggggaccccctgcaaagccatgccgtggtggattccatcgagcgggacttcctgcgggaccggcacctgtatcttgtggtgcacatggacccggtggcggacgtggacacggcggcgggacgcttccgggaatggatcgcgggtcaggcccgggccgtggacccggcactgaccatccatgacctctgcctgatccccggcggacgggacaaacgcaccgtgttcagctttgactgtgccgcccccgccgatctggaactctccgacgacgagatccgccgccgtctggaggagcgggtggccacccgctatccccgctgccgctgcgagatcaccgtggaccgcggctatgccgccatgccccgcccggaaccgccccggaactgattccgtcagccctgcaggcgggcgtccagccaggcgtgcatatggtcccgcatttcccccagtgtccgggcagtgtcgggattttcggaggaaaaggccatcagccggtccagccagccctgttccttcacgatgcgcaggctttcgggaaagaccagctcatacaccagggacatatgccccaccacattgtcggcgggccagtgcttgagcgcgcgcagcaccgcgtggtgctcataaaaggcggctgccacctccgggctgatgggggaggcgtgcagctccttggaggaaacgttgtagatctcctccagggggacctccacgttcacccgcagaatatcgatcttgtcggcgtcccgcagaatgttgcagaacagggcggtgcgctcgtccagctcaggcaggcggtagacgctgtgcagggcaacggctttgtgcagcagcttgtcctcggtggcggcatccagataatcccggatgcggccctcctcaaacaggacctgggcaccgcaggccgcatggtcgatggacaccgcgtcgttgaaggtaccgtaccgccgcagctgctcaaagcggcccacgtcgtgcagaagcccgcacagccaggccagctccgtatcctccggggaaaggtccagcgactgcgcaatgcggcggcaaagccccgccacccggtaggtgtggtcgatcttgagccggaccttggggtcacggtcgttgtaccgggccgcataggcggcaaaggcgtccagggctttctggcggtcaaagatcatggggaaaaaactccttttgcatggcatttgcggcccgggaacggacggcagcccccgtatgggtggggcgccctccgcccgggccgttttgtatgcattatatcacatttgacaggcggcaggatctgccgcgctatgggaatattgcgcaaaaaaagagtgatggataacaaaagtgcacaaaaatggtatgaaaaaattaaaaatactatgcaaaacacttgcaaattcttgacttttgcgggcgttgaaactactattatggtaaggtattgtcgccgggtccgtagggggacggtccggcgccgccttcaaacaaagcgccgctttgtgcgggcggcgcggcgaaaggtggatcacgccatgaatgcaaaaggggatgcaaaccgcagcgtgcggatgacaaaacgtcgcttgtgcgacgcactgatcgcattgcttgcccagaaacccgtgcgggagatcacggtacgggaactgaccgcccttgccaaagtaagccggggcaccttctattttcattacaccgatatttatgacctgctggcccagatcgagaaagaacagttcgagggcctggattccctgatgggggtgctgctgccggggctggacagcgatgtcccgccggaggcgctgcgcactctgtttcactatctcaatgacaacgaggccttgtgcactgcgctcatgagccccaacggcgacccggtgttcgtgcaccggatccgtgacatgctggaacgccgctgtatcggacattttgccgagcccgggtgcgagacgccccgccagctgtacctgaccagttttgcggtcaacggctgcgtgggcagcatcgaggcatggctgctcaatggccggaaggaatcccccgaccgcatggccgcaatgctgtgggatgcggtgcgtgccatccggatggcagcctccacccgcgggcaggagacaaagtgacccccgggagatatgacgaaaacgtgaattttttgacgttttgccaggcagaggcttctgcggcattgattttcagtgccggggcaaggtataataggcacagaacagccgcctgcgacgctctgatgtgcgcgcaacgcacggccaacgaataaaggagagaatgacaatgggattttttgacatttttaagaaaaaagaagaacccgcagctcccgcgcccaccggccctgtgatggtggctgctgacgccaagggcaccatcgtcccgatggagtccattcccgatgacgtgtttgcacagggcatcctgggcaagtgctgcggcatcgagcccgccgagggcaaggtttttgctcccatcgacggcgagatcacccaggctcccgacagcctgcatgcgctgggcatccagggcgcaggcggcgttgaggtcctgatccacgtgggcgtggataccgtcgagatgaagggcgacggcttcagctccaacgtcaaggtcggcgacaagatcaagaagggccagatgctgctgaccatggatctggacaagatcaaggctgcaggccatcccgccgttgtcatcactgtcatcaccaacaccgacgaattcgccgatgttgaggtcgttgcttccggtgaggtcgagcccggcgccgacatgatcaaggtcaccaaataagaaaatacctttccgtcaaaataaaagggcgcggcccccgtaccatgcgggggccgcgcccttttgcgcccctccgccgctctgccaggggaacggcggagatgtttgcgatgcaccgttgttttgcaccccgcggggccggggcgacccggggatttgcccgccctgccttgccgggcggtgcgcggtatggtatagtagaaccaaacccgaccggccgcaaggtgcggttacaaggaggcagaagatggaacagaaacaaaaccagactacggaaaacctgtggaaggaccgccggcatatcctgtggttcccctggacctttgatgtataccgcattgccaacggccgcatctatacccagagcggcctgctcagcagcgaagagaacgaatgcatgatctaccgtgtgctggacatttccctcaagcgcacgctgctcaaccgcctgtgcggcacggggaccatcatcctgcgcaccaaggatgcctcggacagcatcctgaccatcaaaaacgtcaagaacagccagcaggtcaaggatctgatcagcgacctggtggagcaggagcgccgggacaagggcctgctgggccgggagatgttcggcgccggcggcggacatatggacggcgcctaccgcgacgccattgacgaggaataagggaggaacaaggatatgagcgtgatcctggccgtatgcggcgagaatttctgcgccatggccagcgacgggcgcatggtggaggaaccggcaaaggcgggcagccccaacattcttaccgaggagctgcccaagctgcgcaaagtcaaccggaatgtctgcgtgggctttgcgggggataccctggctgccgtgcgcatcgtcaatgctctggacgagtacgacgtccagtacctgacctttgaaaagatcctcaagatcctgcgcgaccgcgcccaagaggtggaggccctgcccctgggcgtccgtttcctggtgggcggccggggccgcaagggcggcttccagatggcgacgctgggcagcgataccggctatgagccggacatccgtcccgcccagcctggggcctatctcatcgagggcgccagcgcccataccgagatcggtccgctgctggagcagtacctgcggggcggcgtggaaaactggcgctccctggacgacgtggcggcttccatggatgcctgcatccaggctgccgcagagcgggacgagaccgtcaacaccaagagctaccgccagctgatcctgtaaaatgcaaacacaaaggccctctgccgtatggcagggggccttttggttttggttggaacttcagatggtcacgtcgcccaccatcatgcagccggcggggtcgatggcgtaaacggtgtatttggtcagatccccggtggagtcgggcaggcggatgcccccggactcgggctggacaaagtggaacagcttgtgggcggtggtggcgtgggggcgttcctcctgggccgtccaggcaagcacgccgccgggatgctcatcatcgccgcagaaatcgtcgggcagcagacgggcctcgcccgccagctggatacggtaaatgccgggcaggtccttgcccgcccgccgcagggatacgctgctccgccaagggccgccgtgctcgggggccggtttgcggggacgcatgcacagggccaggttggtccaggctaccaggaaatcatccagcggcatgctggtctcggtctcaaagtcggtctccgccgcccagggatcgttgagcagggcgtggagctcgccgttcaccgtgccgaagccccgcagggcggcgtagcggcgttcgggcattcccttggccagctgggcgggggaactgtccagctccaccaccacgccgaagcccgcccgcagttcggcacgcagggcgcccaggtccgcccagcgcacccaggcggggaagccccagcagcccacggcggcagcgccgaaactcaggttgccgcagccccggccgtcccgcatggcaaggaccagctcctcgggcaggatgtccgcgccccagcggttggtcagccctgtgatggcgcaggccagatcgatctgactgcgcagggcgggggcgcgccgggccaccgcgtagggcggcagatgcagccgggcgttgactggccgtccgcccccgggaatgacgtcaatgcggcggacgcttgcccccagcagcgagacggagggggtgtgtttgtcgtccttggtgtacaggtagatgcgcagctggacatgggtggcgatcttggagtccagggtcagctggtcgccgttcagggccagcgccccccgcgccgtgggcggcgcgctctcccgggggaggaaggggctccatttgccgaaagccgaccacgccgtccagttgccgtccaccatgacccgggcctgggcctccacggcggtacccggcggggtaaaggcgttccagctgggacgcagggcgtcaaagggcggcatggggatggccgggctggtgtagcagccgtaagggacgtatccgccctgcaccacatccagcatgatgtgggagttggcaacggtcacgttgtccagctcgccgcgcatgaactcctcggtctcctgcagcagaaacacggtctttttttccatagggcaagtcacctgcctttgcggttgaaagtaagggacgccgcgctgtcagtcatcgcggccgggtccgaacatggaatcctgttccatggatgccttgagctcctcctcccgacggcggcggatctccttttccaccgagaaggcgctgtccagggcgggataaatgatcatcagcgagatcagccacggcagccagaacccggtcaccagcatgggcagcagggtaaagggcaggaacagcacaaaggccacccagtatacgcactggaccagtgccgcccccagcgtgcggggcaggtagcccaggaagaagaaaacacagtttttgaagaactgcgcgggggtcagctgtaccagaggaatctgggcaaaggcgtaagtaaacagtcccgcggcgatcagaatgcccgcgcccatgcagatcagcaccgagccggggaccactttcatggccggcaggatcagcagcatggatacccagcagccgctcaaaaggcccagcaggaaaccgggcagcaggctttccttccagttctgacgccaggcttttttgtaggtctcccaccagaaaccgggctcgtcccgcaaggcgcgcaggatggtgtccagcaatccgcagaggaagggcgcgcccagcacgccgcccacaacgccgcccagcagcgcaaacaaaatggaattgccgatcaggcccagggccatcagaacaaagccgggcaggcagcccaggcagcacagcaggctggacttgtaaaagggcatcagatcccggcccagcagttcaaaaaagcgggccgcaccctttttgcgttcggcggtggcgtcctgcttgggagcgtcggtgtatttggaacggtcgaaaaacatggtccatgtctccttgcgggggcacagcggccccggtttgatctttcttatataatatccggtttgcctgcgccttgcaagcatggtcggagattctgaaaggcggaggcagcggcagcgcaaaaagtgttgacaaattgtgaaagaaatcgcgccggggtgacttttatatcctgatatgctatgataaaaattcaagaaaacatccgaaaaaagaggtgcgatccatggcctgggtgaccaaaagcagcgaggagcattacgacgctccccaagaacctcagcgtgtctatacccgcagcgaaaaagcgaaaaactggtggcactactacaaatgggtggtgctggtggtggcgtttctcattgtgtgcggagcgtggctggtgcatgatatcctctccaatgaggaggcggactatcaggtaggctgggtggccgggtacagcctgcccgacgagacggccgccgccctgcagaccgccctggcccagtacggcgaggaccgcaacggcgacggtcaggtcacggtgcagatcaatcagtatgttctggacctgagcgacagcggggacagccagaccacggatgcctacaaccgtatggccggcatgacccgcctgagcgcggacctggccgacggggcaaactatgtctatatcctggaagaccccgccagtttccaggctacggcgggggcgctgcagtacctggacggcaccatgccgcaggagggcgcttccgactgggaaaacatggtctatctctgggccgactgcccggtgctggcagggttggacctgggcggatatacgcctcttggcgccacggcggagacctcggcctccagccaggaactgctggcatcggtctacgtgggatgctgcgggacctggaacgacgcccaggcggaaaagttcgccgggggtgaggcgttctggcaggccctgaccgaaggggccaaacctgcggcgggcagcgcgcagtgagccgccgtctgtctgcggttctggcccggcttttgggcaaaaagcgccgggatacgcctgctgcgcccaaaacgccccccctgccggaaaatccctaccgccgcttttataccagtccccgccgtctggaggacctgaccccgcggcccccgaaaaccaaaaaatgaccctgacgcttcgcctgggccgtgctttgtcacgcagcccccggcggagcgttttttgctgctgcggcagccgcattttttgcccggattttacgcccgcggccttgaggaacagaccgttttatggtatattaaatctgtatatctatcggagggaacagccatggaacttttggagcaggcccgcgcggagatcgacgccgtcgacgcgcagatggccgaactgtttgagcggcggatgcgtgccgtggcaatggtggcgcgcagcaaggcggataccggcaagcctatctttgacccggtgcgggagcgtgcggtgattgaaaaaaacaccgcccgcatcggcgacgaaacgctgcgcccttactataaccgctttctgcagcaggcgatggccgtctcccgcgcttaccagcgggaactgctgggccgcggcacggcagcctatcagggggtagagggcgcctgggcccacattgcctcccggcgggtgttcccctttgcccggcagatggcctgcaagacctgggccgacgtgttcgatgccgtcaccgccggcaaggcggagttcggcgtcctgccctttgaaaattccacggcgggggatgtctccacggtgctggacctgttgtatgcccatcccgacctgtcggtctgcggtgtctacgacctgcccatccggcaggatcttctgggcgtgccgggggccacgctggcggggctgcgcacggtggtcagccaccagcaggctctgagccagagcgctcccttcctgaaagcccatgccctggagaccagggtctggggcaataccgccgacgcggcccgctatgtctccgagctgggagacccaacggtgggggcggtggcctccgccgagacggcccggctgtacggcctgcaggtgctggcccagggcatcaacgaggacggggacaacaccacccgctttgtggtcatcacccgcacccgggacgaggacatccccgtgggggagggtcagcgcattgccctgctgttcaccgtggaccacaaacccggcaagctggctcaggtcatcgagcgcatcggcagcctgggcttcaatatggaaagcatcaagagccgtccgctgccgcatgtgcagtttgaatattatttttatgtacagctgatctgcccgcagcaggcggcggggcaaagctgccgcgccctgctgcatgatctggaagcgccctgccgcaccgtgcggcttctgggcgtgttcgaccacgagacactgtgcgatgaggaaggggtaaccgtatgaaactgacgatgcaactgaagaaaaacagctatgatatcatcctcaagcgcggatgtctgaaaaacctccatcagtttgccaacctggtgaaccgcaaggtctttatcctcaccgacgacggtgttcccgccgcctatgcccagaccatcgccgaccagtgcagcgacgccaggatctacgccatcccccagggggaggccagcaaatgcctgaagatctatggccgcgtgctggaggagatgctcgccttcggtatgagccgcagcgacgtggtggtggccgttggcggcggcgttgtgggggacctgggcggtttctgtgccgccacgtatatgcggggcatcgacttcatcaactgccccacctccaccctggcacagatcgactcctccatcggcggcaagacggccatcgacctgggagagaccaagaatatcgtgggcgctttctggcagccccaggtggtgctcatcgaccccgatgtgctggacaccctgcccaggcgccactacgtcaacggcctggccgaggccctgaaagccggtgtcattgccgaccccgaactctttgccctgtttgagaaaaacacccccgaggaggacatcgagcagatcatctaccgcagcctgctggtcaaaaaacacattgtggagcaggacgagcgggaacacggcccccgtgcggctctgaacttcggccacaccatcggccacggcatcgaggcggtcaagggcgtccggggccgccgcaaaaacggcctgtaccacggggagtgcgtcgccctgggcatgctgcccatgatcgaggacaactccctggtcaagcgcacccgcgccgtcatgcgggcgctgggcctgcccacccgggccgtctacgacaagcagaaggtgctggagcagatgcgccacgacaaaaagggccggggcgacagcatcaccgtcatccgggtgccgggactgggctgctggcgggcggacaagctgcccatgtccgagctgccctccctgctgggcattgaggaagaataagccgttttacagcgcaagtgagcgcaggtaaggagccttttgcatgaaaaacacctttggcagcgccgtctccatgaccattttcggtgagagccacggccccgcggtgggggctgtgctggacggactggctgcgggcctgcccgtggacacggcagagatcgccgcctgcatggaccgccgccgcgcccggggagacgggctttccaccgcccgcaccgagccggacgaggtggaaattttgtccggactgctggacggccacaccaccggcacgcccctgacctttgtcatccgcaacaccaatacccgcagcggcgactatgccaagaccgccgccctgctgcgccccggccacgccgactataccgccttcgccaagtacgagggcttccaggacgcccggggcgggggacatttctccggccgcatcacggcggcatcggtggcggcgggttcggtctgccgtcaggtgctggcggggctgggcatccgggtctacacccacattgcccaatgcgccggcatcgacgacgcccccctggactttgacgccctgcccgccgaccctcagcccgggcatttcgccctggcggacctggaacgggaagccgccatgcagcaggccatccgcgccgcgggagccgagggcgacagcgtgggcggcatcctggaaaccgtcgtcaccggcatccccgccggtgtgggggaacctttctttgacagcgtggagagcgaacttgcccacctgatgttctccatcccggcggtcaagggcatcgaattcggcgccgggtttgcctttgcggggctgcggggcagcacggcaaacgacgctttccgcatggatggggaccgggtggtcaccgccaccaaccgcaacggcggtgttaacggcggcatcaccaacggcatgccggtggtgttccgcacggtggtcaagcccacccccagcatttacaaacagcaggacactgtggattatatggcaaaacaagatgccgagctcatcattcacggcaggcacgacccctgcatcgtgccccgtgcggcagtggtgcaggacaccctgacggcgctgggcattctggatctctggacggtgcgctacggtaccgccgcccagaagcacggcctgccccagggcggccgctgacccgcccggcagagggaacaaaattgccgggccgaaaggaggaaccccaagatggaatacggattgatcggagcaaagctgggccacagctattcccgtcagatccacgaggagatcggcggatacaactatgagctgaaggaactgcccacccaggcggacgccgaggcgtttctggaagcaagggatttcaaggcggtcaacgtgaccatcccttacaaaaagctggtcatcccttactgtgacgaggtggagccccgtgcggcggccatcggtgcggtgaacaccctggtcaaccggggtggcaagctctacggctataacaccgactatgacggcgtggaatatctggctcgccgccatggggtgcgcttccggggcaagacggtgctcattctgggcagcggcggcacccgcaacacggtggcggcagtctgccgcgaccgtggcgccgagagggtcatcaccctcagccgcagcggtgcggacgggtgcatcacctacgcccaggccgaggactcgggggagggacagatcatcgtcaacgcctccccggcaggcatgtaccccaataacggcgagtgcctcctggacctgaaaaagttccccgacctggaagcggtgctggacgtggtgtacaaccccttccgcaccgagctgatcctccgggcggaggaactgggcatcccggccttctgcggcatggagatgctggtggcccaggcggtgtttgcctcggcacgttttttggaccgcaaggtggacatttcccatgtggagaagatcaaccgggatatccgccgccaggtgtccaacgtttccctcatcggcatgcccggcagcggcaagagcaccgtgggccgggcgctgtcccgtgccctgggcaagacctatgtggacctggacgacgtcatcgagcaggtggcgaaaatgcccatccccgacatctttgcccagcggggtgaggaagtcttccgcaaatatgaggccgacgccgtgcgggaatgtgccaaacagcacggccaggtcatcgcctgcgggggcggcgtcatcaagacgccgggcaacgcccggctgctgcgccagaacggcccggtattgtggatccgccgcccggtggaaaaactgcccaccaccggccgccccctgtccatgggaggccacagcctgaaaaaaatggaagccgagcgcactcctctttaccgcgccggttccgacgcggcggtggataacttcggccgtctgtccgacacggtgcgagacgccgtggaggcctttgaacagaacttcgatcccggcaactgagcaagccggatgaccctgcccggcgggggaaaggagctttttcttggacgcaaaactctatgtcagccatgtgggcggcagcattgcggcgccgcccagcaaaagcgccgcccaccgggcggtactgagtgcggccctggccaccgggaccagccatatcgacaacattgaatacagcgacgacatccgcgccaccatcgacgcggtgtcccagctgggggcgaagatcacccgggaggaacacagcctgacggtgcagggctgcggcgaaggctttgccaccgtgacccgccccgtcttttgcaaggagagcggcagcaccctgcggttcctcatcccggtgttcagcctgacggcccagaagatccgctttaccggtgcgccccggctgtttgcccgcccccaggagatctaccgcgccctgtttgaaaagcagcatctccgctttgagcaggggccggagggcatcaccattttcgggcggcttctgccgggcatcttcaccctgccgggggatgtgtccagccagttcatcagcggtctgctgtttgccgcgcccctgctggagtcgggcagcaccatccaggtgctgcccccctttgagagcaagagctatgtggggctgaccatcgacgccctgggccgtttcggcgtcagggtggaggagagtgccggacccgagggcaagactcttttcaaggtggctgcgccccagcgttaccgcgcctgcgacctggcggtggagggagattacagccaggcggctttcccggcggtgctgggctccctcaccgggggcgtggccgtcaccggcctgcgtcccgaaagccgccaaggagataaagtgatcctggacatcctgcgccggtgcggggccaagttctcggcggacgccgagggcaccctgcattttgagcgcagcctgctccgtgccgtggagatcgacctggccgactgccccgacctggggccggtgctcattgccatggcctgcttctgcagcggcaagaccgtcatccgcaacgcgggacggctgcgcatcaaggaatccgatcgcatcgaggccatgcgcgccgagctggccaagatgggcggcagggtggaggccgacggcgacaccgtcacggtggaaggctgcgccctgcacgcgccggaagaaccgctggacggccacaacgaccaccgcatcgtcatgagtctggcggtggcggcgctgggggccgggctgccggccactatccgcggcgcacaggcggtggccaagagctggccgggattttttgacgccatacaaaaactgggtgcaaaggtggagttgagcgatggaacgtgacaagaccatcctgatcgtcggcctaggcttgctgggcggcaaatacgcgcaggtgctttcgggcaaaggctaccccgtctggggcatcgaccgcgaccccgaagcagtgcgctgggcgctggaacgggcctacattgcccggggcgccgccgaaaattttgaggaactggtggagggggcacaacgcatcgtttttgctctgtatcccaccgcctttctggaatgggtgaaacagtacgggcatctgatccggcccggcaccctcatcaccgatgtgtccggcgtcaagcggggcgtggtggacccggtgcaggaactgctgcccgaaggtgttgagttcatcgccagccaccccatggccgggcgggagtccagcggcatcacccacagcgccgaggtagactttgcccccgccaacttcatcgtgacccccacggccagaaacaccccggaggccatcgcctggtgccgggacctggcagagaccctgggctttgcccacatcaccaccctgaccgtggccgagcatgaccgcatgatcggctacgtcagccagctctgtcatgccattgccgtcagcctgatgtgtgccagcgacaacagccgcctggccgagtatactggcgactctttccgggacctgacccgcattgcccgcatcaacgaaaaattgtgggcggaactgtttttgtggaatcgggacaacctgatcggagagatcgacatgtttgacgcggcgctgcaaaagctgcgcacctgcctggcagagggcgaccgggaaggactggaggagatgttccgcctgtccaccacccgccgcgccgcctttgacaaaaagcccggtgcaaaacagcccggcaccggccgctgaaccggccgcagcaaggaaaggagggggcgcgatatgtcccgcaaagaagggcagaagctgaaacttctggctttgattgagatcctggcaagggagaccgacgaaaaacatcccctcagtgtgccgcggctggtggaactgctggcccagcgcggcatcgaggccgagcgcaagagcatctatgccgatattgataccctcaacgacctgcccggcggcaagtttgagattttgcagcgccggggccggggtggcggctattacatggccgacaccccctttgagctggcggaactgaaacttttggtggacgcggtgtataccagcaagttcatcaccgcccgcaagagcaaggccctcattgaaaaactggggcagttcaccagccgctggcagcaggaggaactggcccgcacggtcctggtgtcgggccgcatcaagagtcaggacgaaaagattttgtataccgtggacactctgcaccgggccatcacggcgggggtgcaggtgcggttcaaatactgcgactggacgctggaaaaacgcatggcgccccgccatgacggcaagtcctatcaggtcagcccctggacccttgtgtgggaaaacggcaactattacctcatcgcctacaccgagggccagctcaagcatttccgcgtggacaagatggcccgggcggaggaactgcccgacgcccctcgggaaggcgccgacgcctacgcgggctttgacgtcaacacttacacccagcagctgttcggcatgttcaacggcccggccaagcgggtgaccctgcggtgtgaaaaccggctggccggggccatgatagaccgcttcggcaccgagccgacgctggtgccctgccccggcggggaacggttcgacctgaccgtcacggtgcaggtcagcccgcagtttttcggctgggtggcaggctttgccggcggcgtggagatcgtcggcccggcggatgtccgcgccgagatgaaaaaggtgctggacctgttgcaggagcgttaccgctgaccggcggggaaaaggggaagttcagttgaaagataccacaaaacagactttgcgccgcctggcgccctgggcggcgcttttgatattgctggcgggctttgccgcggtgcgggggctggaagattgctttgtcatcgactatgacatcaccaacggcgatttccagaactataacccggtgcggcatctgctggccgggcaggctccctataaggatttcaccgtttacctgggggcgggggaactgtacggcgtggcggccatcctgctggtggtgggcaacacctttgcccgcagcatgtttgccgccgagttcctgacctggttctgctttgaactgctggtgctggccgtctgccgggcggtgttccgcaccgggcgcgccgcccgggccatgaccgccgccctgtgcgcctactgcctgctggtagtgcaggggacaaacctgcccggcatggactggctgcggaacctgctgggctatgcgtcgtccagcggcaacagcgcccgcatgatccgctcgggggcgctgcccatcgcggttttgctgtgcggggtggccctctgcctgtggcgggccttcccgcccaaggccgacgcaaagggcctgcggaaatacctgcccctcggccccactctggcggtgcccttcatcgccggagccatggtcccctggagcaacgacatgggcgcgtccatgtatctggccgtctcgctggcttacgggctgttcctgctgcggcagtacggcacaaaaatcaagaccgtggccctgcgggtgggtcagtatatcgtcgtcagcgtgctgggactgggcatttccgtcaccctcatcagctggggacatcctctgtcctggctgcgccagacccggggggcttcggcttaccagtcctggtactactcctccggccagggggaaaagctctactatctcagcgagctgaacctggactggagtttctgggtcatgctgaccctggccgtggtctttgcggtggccatcttccgcgcccgcagccaggaaaacgccgtgcgtgcggcggggctgtttgccctgtgcctgggtatggcgttctggaacatcctgtactgcctgctgtcctccgcccgcaacggcccggacggcggggcaaaggctctcctggccatactggtccccgtgttcgcggtggccgggttggcatggctggccgggcataaggaacaggtcttcgcccttctgcgccgcggtctgccccctgtggccgccctgtttggctgcggggtgctggcgctggggacctggcagcagatcgacgcccgcatccagggccgggaggaaggctatacccgggtggcagccctgggcggatggctgggagacaaagcagaaaagctggccaccgagcagagcatcctggccgggcgcaccgtctggagcacctatgccagcgccctggaagccatggaaggccagctgcagccctccggcaccgactatatcatccacgttctgggggacggccagcgggccgcctacctgcagcagttccaggccgggggctttgacctggtgcagacccccagctataaggtgacatcctatgaacggtggagccgcaatgcaaactggtggttctaccgggaactctaccggtactgggtgccggtgggcaacacctttgtctgcggcggcatgcacattttctggcagagaaacggcgtggacaacgacatgggcgtggccgctaccgtgaacatcgaccagacggcggaaaacgtggtgaccatcaccgtcaccgccgacgatcccaccttctgcggcgtggcagacctgaccctgcactattcccatagggtggacgccgactttttgctgcggggcggggtgggcagctacctccatgtctcgccggataccgaaaagcgtctgtgcgaggaagcgggccgggacagtctcaactgtgaattcttcatccccacggacaaggatacctattctatccccgtcaccatggaaaacggcgtgggcaccgtgaccctgacatccctgcccggggacgccgcgcatctgaccgtttcctccgccgaggtcacgggcaccttcttcgactgggagtatttttacgagtaaggagacctgccaacgttgaaagagaacacggaatgtggtatccttattctatgtatcggcaggcggcaggtctgccatacggacgttaaggaaaaggagaggccggaatgatcgaaaaaaaccgcaggatcaaagcggtctgcagctgccttgtggatatggtgctgattttcgcatcctacctgctggcaaactatctgcgtttcaattatatccggttcttccaggtaggcggcgcgggtcctgccctggacattgcccaggatgcccgcaccctggctgccggtgcggtgttcgccgtggcggatgccgccgtgctgtggttcctgcgcctgtacgacgatacccggctctatggcctgtggcgcaaaagcaggatcatcgtgctggtcaacctgatcggcattgtgattttccaggcggtcctgtaccagatgcgtgtgaccaacttctcccgcatggtgctggtgctgttctacctgatggccaccctgttcctcatcttcaagcggctggtcatgcggtggttccgccgccgtcgccgggacaaaggggaagggctgcgccatgtgctgctcattggcgggggaaagatcgccgcccagtacctgctggccctggaacacaacccctactatggctttgcggtggacggctacctggccgaccgggaaaacccggaattttcctgcccctatttgggcggatatgaggccctggaccgctgcctggacgatcccgccattgaggaagcggtcattgccctggatgccgaccatatggaccgcctgaccggcgccctggccgcctgcgacaagcacggcacccgggtgaccatggtacctttttataatgactatctgcctgcccgccccaccatcgacgtgctgggcgagtgcaagctcatcaacatccggcagaccccctttgacaatctggccaacgcctttgtcaagcggctgctggacattgtgggcagtttgatcctcattgtgctcaccagcccggtcatgctggcggtggccatcggcgtcaagctgtccagccccggaccggtcctgttccggcaggaacgggtgggcttgaacaaaaagccctttatgatgtacaaattccgctccatgcgggtcaatacccagcaggacaccgcctggagcaccaacgccgatcccagaaagacaaaattcggcagctttatccgcaaattcagcctggacgagctgccccagttcttcaatgtcctgaaaggggacatgagcctggtgggaccccggccggagatccccttccatgtggaacacttcaaggaggagatcccccgttacctggtgcgccagcaggtccgccccggctgcaccggctgggcgcaggtcaacggcctgcggggagacaccgacattgccgagcgcatccgttacgatatctggtatatcgaaaactggacggttgcgctggatatcaagatcattttccgcacggtgttcggcggaaagatggtcaacgacgaaaagctgaactgagcggcagacttgccgccctgacgctgaaaggcagggaccctgtatgcagaacaaaaaaccgaaagtcgccattgtacacgactggctggtggcctatgcgggcgccgaccgggtggtggactgtatgcatcacgtgttccctgacgcggtgatctacacccttgtgtacgacaaggaaaagatgccctcctggttcaagaactacgacatccgcaccacctatatccagaaactgccctttgccaccaaaatttaccgctccctgctgccctggatgcccgctgcctttgaggcgctggatctttcggagtacgacctggtgctttcctccagttcctcctgcagcaagggggtcatcacccgtccggacgcggtgcatatctgctactgccatacccccacccgctatgtgtgggacttctactacacctaccgggacaacgccaactggctggtacgccatgtcatgccccgccagatgcacaagctgcgtgtgtgggacaagtgcgccgccgaccgggtggattatttcattgccaactcccactacatcgccaaccgcatcaaaaaatattaccgccgggacgccgacgtcatttatccctgcgtccatatcaatgagcagcccctttgccccaaggaggatttctacctggtggtgggccgctttacctggtacaagcgcatcgacctggcggtggccgcctgcaccaagctgggcaagcggctggtggtcatcggcggcggcggggaggcatcccgcctgcatgccctggccggaccgaccgtggaattcctgggcggcggcctgagcgacgaggaagtccgcagctactacctgcgggccaaggccttcatcttccccggggaggaggacttcggcatcactccggtggaggcccagagcgccggcacgccggtgctggcctttggccgcggcggcgtctgcgagacggtgctggacggcaagaccggcctgttcttcggagagcagacggtggaatccctggccgagtgcattgagcggtttgagcgggaaggggtcgccttctcgccggaagagatccgggaacacagccgcggcttctcggaggaacggtttgaaaaccagctgcgggactactgcgcccgccgctgcaaggactgggccgacgagctgtacgcctgttcccgccgggacgagcttgccgccaaatcgaacggaggagaaacaaattgaggccaatcgtgatcaacggcacggttttgtgcgataacatcaccggcatcccccgctatgtgtatgaggtggtctcccgcctggacaagctgctggaaggcaccggcctggacgtgcgcctggcctaccgggacgacggccgccccctgcacctgacgggactgaaaaacattcaggtggtgccgctgcactcggtgcggtactgctacaacctgtttgtactgcccaattacctgcgcaaaaaccatgccttttttgtgggcctggccagcgatatgctcatgacccgcaaaagcgctgtggtcctgcacgatatccggccgctggtcatggataccgaccgcggctttttccgtttcaagttctgggtgcactgcctgtccaccaaatggttcgcccgggaagtctacaccgtcagctatgaccagcggaacctgattgcggacaagctgggcatccccctggacaagatcggcgtcacctacaacggctgggaacatatgaacgccgtcacccccgacgagagcgtctttgaaaaactgccggaagtgaaaaaaggggagtatttctacgccctgggcagcctggccaagcacaaaaactacaagtggatccgggaagtggcccgccgcaacccggacaagacctttgtggtggccggcggcgccgacctggcggccttcggcaaggacgaggccgatgcggcccaaaacaccggcaatgtcttttatcccggctatgtcaccgacggggagaacaaggccctgatgcagcactgcaaggcgtttttgcatccggcggtgttcgagggcttcggcatcccgccgctggaggcactgagccagggcgcgcccattctgctgtccaatgccagctgcctgccggaactgtacggcgactgtgcccggtattttgatccccaggactatgatgtggacctggatgccctgctggcggaaccagtatccaaaccggataaacttctggaaaaatacagttgggataaaacggcagccttctggctggagcagatcaaacgttacgccgggaagtaaggagaagatcagactatggataaaattgcggttttgatcccgtgctataacgaggaaaagacggtggaaaaggtggtgcgggatttccgcgccgtcctgccggaggcagtcatctatgtgtatgacaacaactcctccgaccgaactgtggagctggccgaggccgccggtgcggtggtccgccacgagtacagccagggcaagggcaacgtcctgcgccggatgttccgggagatcgacgccgaatgctatatcctggtggacggcgacgacacctatcccgccgactccgcccccgaaatgtgccgcctggtgctggagcatcaggccgacatggtggtgggcgaccgcttgtcctccacctatttcaccgagaacaagcgccccttccacaacttcggcaacagcctggtgcgcctgagcatcaactgcctgttcggcgccaagatccaggacatcatgaccggctaccgggcgttcagctttgagttcgtcaagactttcccggtcttgtccaaaggctttgagatcgagaccgaaatgtccatccacgccgtccagcgcaacatgcaggtggagaacgtggtcatcgagtaccgcgaccgccccgagggcagcgtctccaagctcaatacctactccgacggcgccaaggtgctgggcaccatcctgaaactttacaaaaactatcgccccttcggctttttcaccgccattgcggcggttctggcccttgtcagcctgctgttcatggtgccggtcctcaccgagtactttgtcaccgggctggtgccccgtttccccaccctcatcgtctgcggcttcgtcatggtcgccgcgctgatgctgtttgtggcgggcgttatcctgtccagcctgctgggcaaggacaagcgggactttgagttccacctgcagcaggcggcgcgctggaagcagcaggcccggcagcgctgagcgcccggccgcggccctattttgatcccgtggtctcaccgcggcgccgggccttgccccggtgccgcggcgggaaccttttcttttcatctgctgaatgcagggaggcaaaaacaatgcagtatgattatctcatcgtcggcgccggtctgttcggcgcagtctttgcccacgaagccaaggccgcaggcaagacctgcctggtggtggacaagcgggaccacattgccggcaacatttacaccgaggaagtggagggcatcaacgtccaccgctacggcgcgcacattttccacaccaacaacaaggaagtgtgggactatgtcaaccggttcgcggtgttcaaccggtataccaactcgcccgttgccaactaccacggcgagatctacaacatgcccttcaacatgaacaccttcaacaagatgtggggcgtggtcactcccgccgaggcccatgccaagatcgaggagcagcgggccgctcacttcacgccggagcccaagaacctggaggagcaggccatcaacctggtgggcaccgacatctatgaaaagctggtcaagggctacaccgaaaagcagtggggacgtccctgcaccgagctgcccgccttcatcatccgccgcctgccggtgcgcttcacctacgacaacaactacttcaacgccctgtaccagggcattcccaacggcggctacaccaagatggtggaaaagatgctggacggaatcgaggtccgcctgggcgtcaactacctgaaggacaaggccgaactggacaagctggccggccgggtcatctacacgggccccatcgacgcctactttgattacagcctgggcgcattgcagtaccgcagcgtccgctttgagaccgaggtcctggacacgcccaactaccagggcaacgccgtggtcaactacaccgacgccgagaccccctacacccgcgtcatcgagcacaagcactttgagttcggcgaccaacccaagacggtcatcagccgggagtactccgccgagtggaagcccggcgacgaaccctactaccccgtcaacgacgaggccaacaacaccctgtacgcccgctacaaggccatggccgatgccgagccccatgtggtgttcggcggccgcctgggtgagtacaagtactacgacatggacaaggtcatcgagagtgccctcaactgcttcctggtgcagcaggacaaagtcaaccagtataccgtctgaggaaaggggaagatacccatggccaaaaagcctttgacccggctggagcgcgtccgcgccgaaatggccgcccacggtctgacccagctgatcgtcagcgatcccaccaccatcttttacctgaccggcctgaacatcgaccccggcgagcggatgtactgcctgctcctgtcggcggacggttccgcccggctgtttctcaaccgcctgttcggcacgccggacgtgggcctgcccgtggtgaactttgacgacaccgacgacgcccccgccctcatggcgccctatctggactgccacaaggccctgggcgtggacaaggactggcccgcccggttcctgctgcgtttgcaggaactgcccgtggcccgggagtaccgtgtgggcagcatctgctgcgacatggtccgcgccgtcaaggacgaggccgagcagaaggccatgatcgcctccagcaaggtcaacgacgactgcatggcggagtttgccgccgccgtccgtcccggcgtcaccgagctggaactggcggaaaaaatcaaggaaatttacaaggcccacggctgctccggcgtcagttttgagcccatcgtcgcctttggggacgatgccgccgacccccaccaccagaacagcacccgcgccctgaaagagggggagatggtgctgctggacgtgggcggtgtctacgacaattattgcagcgatatgacccgcactttctttaccgctcagcccaccgaccgccagcgggagatctatgagctggtccgcctggccaacgagacggcggaaaagctggtgcgccccggcgtcaaaatgtgcgagctggatgccgccgcccgggaggtcattgccaaggcgggctacggcgagtatttcaaccaccgtctcggccatttcatcggcctcaacgaccacgagtacggcgatgtctcgtcggcctgccgcatcgaggccaagcccggcatgtgcttttccattgagccgggcatctacctgcccggggagatcggcgtccgcatcgaggacctggtcctcgtcaccgaggacggctgccgggtactgaacagctatccgaaggagatcaccgttctgtgatctgcatttgagggaaaaaaggggaagtatatgattcagttgagtccttccatcctggcggcggattttgccgacctgggacgggaatgccgcaaggtcctggatgccggggccgatatgctgcacattgacgtgatggacggccattttgtgcccaacatcagcctgggcgtgccggtgctggccagcctgcacaaggcgctgcccgacgcctactatgacgtacatctcatgatctcggagccggtgcgctacgccgaggcctttgccaaggcgggggcgtcctgcatcaccttccacatcgagacggtggatgatgccgccgccgcggtgcgcgccatccatgaactgggcgtgggcgcgggcgtcagcctcaagcccgccacccccgtggaggcggtgctgcccatcctggatcaggtggagatggtgctggtcatgagcgtggagccgggcttcggcggacagaaattcatgcctgccgccgcggacaagatcgccgcgctggacgcctaccgccgggaacacggcctgaaggtcaagatctcggtggacgggggcatcaacagccagaccggcgcggtctgcacggcagccggcgccgacatccttgtggcaggcagccaggtctttgccgccgctgaccctgccgccgctgtggccgagcttcgcgccctgtaaacaaaaggagctaccatgccaagacatcccaaaatcgaacgaagcgccaactatacctattacacggacattttgtggtgctgcgtgcctttggtggccatgagctgctactattacggcgcgcgcccggcgctgctggctctggtggccgcggccacggcctatctgtgtgactgtgttctggcgccgctgcacggccacggctatcagccccatgagccgtccagcgagtgtttcgccgtattgctggccatgcttctgccggccagcgtgccgtactatatcattgttgccggagccgtcgtggtggttttcgccaaggagaccttcggcggcgagggacactatcccttccatccgtcggcggtcggtctggccgtggtgggcctgtcctggcccaaccaggtctttttctaccccaccccggggacggctctgcccctgtgggacacggcagataccaccctcactgccggtatgaacgccacactgagcagcggcggcctgcccaccgccagcaccctcaacctgatcaccggcaacgtgtcgggaccttccggcacctgcgccatcctggtcatctgcgcctgcgggctgtttttgctctgccggggccatctcaaactgtccaccttcctgccgtatctggtggtctgcgtggcggtgccctggcttttgcccaacctcaacgacctgccgtcgtacagcttcccctgggagtttgtgcgccagcgcatctaccttgaaaaatatatcgtgctgtccggcactatgctgttcggcggcattttcctggccagcgagccggtcacccagcccaaccgccacagcagccggatcatctacggtctggctctgggcgcatttgccacggccatgcgctatttcagcgactatgagacgggattctgctttgcccttttgctggtcaacgccatccccgaatggctggatatggtggcccgccgcacggaacgcgtccgatttatgaagaaggaggaacggcgtcttgcaaaacacaccagaccggaataaaccccgcagcggcaaggcagccaagggcaagcaaaagcccgagcgctcccagacgctgatcatcccccagatctctcccgaaatgctggaaagcgcccgccgtgccgccatggagggcaagacccagcaggagatcgagcaggctgccatggaggccgaacagcgccgccaggcccagaccggccagaccacccagaacacggtggaaacgcccaagcctgcccccaaaacctccgcgcccaagcgcaagacccgcgccgaggcggaggccgaactggaccagaagatccacgacgatcacctctggctcaacaaccccgtcatgatgcgcggcctgggccttgccccggtcattgcggcagcctataactgggacaatgctgtcatgctgtgcgcggcggccgcgctgctgctcaccgccacccgcgtgctggccgtggccatctgccacctgaccggcaaccgcttccgcccggtgatctacgcctattccgccgccattctgtacatcccggtgtactgcatcctgtatgcgtggttcggcaccgatctgacggtgctgggcatctatctgcccctgctggcggtggagtccgccatcatcaagcgcatggaaagccccgacctggaaccggtgggcgaagccttccgccgcggtatcaacaacaccgtgggcctgtgcatcgcggtgctgctggtgggctttatgcgggaactgctgggcgccggcacagctttcggtcatgtggtcatgaccaccgcgccgctgcccattgtgcagcagcccgcgggcggctttatcctgctgggcctgatcgcggcgctgtggacgggcattgccaacgcgtacacccacttcaagcgcgaggaggtgcgccaccaatatgctgaacgtcgccactgagctcagcgtcatgcaggcggtgctgaaatttttcagctacgccgtcatggctgtctttgcggaaaatatcgtctttacccacggcatgggtgtctcgcgcctgctcaaactggtggaggaccgggacatccgcaccctgcaatactgcatccccatcattctggtgcagctgctctcggcgcccctgggctggatggcccatgactggttcttcccctgggtccgggattacctgcccggttggatcccggtcacggccctgcgccccatcgtttatctgacctgtgccaccgccgctatggccgtggtgtggctgatcctctgcatcggcggcaaacgcagccgcccctaccgggaacagctgccctttgctacctataactgctgtatcctgggcaccatcctgatctgcgccaaccagaacttcaccctgctggaaacggtgggcttcagtctgggcagcggcatcggctatctgtttgccgtggccatcgtggacgaaggccgccgccgtctgcgcagcaaggatgtccccggcgtgttcaagggcctgcccagctcgctgatctacatcggcatcctgtcccttgccatctacggcctggtgggccattccatcacggcctgacgccgaccctgaaaaggagagatgccccatgtccaacaccacctcccaatgctttgcaccggcccgcatcctgctgcccgcaccgggcacgcccctggacccctgggcctgcattgcggtggaccagttcacctcccagccggaatactggcaaaaagccgaggctcttgccaaggacaagcccagcaccctgcacatcgttctgcccgaagcttacctgggcgcagcggatgaggcagaccggctggaatccatccgccgcaccatggcggactaccgccgcagcctgctgacccgggtggtcaacggctttgtctacctggaacgcacccagatggacggcaccgtccgtcagggtctggtgggtgcggtggacctggaagcatacagctttgaccgggatgccacccccgccatccgccccagcgagaacacggtggtggagcgcatcccgccccggctgcgggtgcgccgcggcgccgaactggaaacgcctcatgtcatgctgctggccgatgacgaggactgcaccctcatcgagcccatcggcagagaaaaagcccgcctgcccgttttgtacgacggcgagctcatgctggggggcggccacctgaccggatgggcggtggaggacccggcgctcatcgcgcagatcgagcaggcggtggcagggctgggcgacccggcccgctatgccgcccgctggcccgatgccgccggacagccccccatgacattggcggtgggggacggcaaccactcccttgccacggccaaagcctactgggaggagcgcaagcagaccctgcccccggagcgccgggagacagatcccgcccggtactgcctggtggaagtctgcaacgtgcattccccggccattgagatcgagcctatccaccgggtgctgttcggcgtcagcgaggacaccgttctggcctgcctggaacgctgggcggccgggcgtggcatccgccttgtggaaaagggtgcgcagagctttacactggtcagctccaacggagaacgccgggtaagcctggaaggcgctctggaacccctgaccgtcggcacggcggaagcctttgtgggcattttgctggccgaatgccccggggcatcggtggactacatccacggggaggccgcggtgcgccagctggcccaaaagggcggtgtgggcattttgctgccggaactggaaaaggccgatctcttccgcggggtcgtgctgggcggcgtgctgccgcgcaagaccttcagcatgggacacgcggaggaaaaacgatactataacgagtgccgcagcctggtggattgacgccccggcggcccgcagattgagaggaatggaagatggcaaacaacgaacgacccgaggccgcagcaggcagcgtcagttcttcggcgcgccgccgccgtcgccgccgcagccagcagggcggggcaaagcccgctcagcaggggcagcagccccagcagcaggcggcgcggcagcagggaagcagccacggcaataacggcggcagcgcaccccggcagaacagccagcgccccgccaaaaatgcggcggcaggggaaggcaagcagccctcccgttccggccgcgggcagcagccgcagcagcaaagccgccgccgtgcgcctcagccccagcaggaggctccggcaccccgccagccccagcgccccgcccgcagcgaggaaacccgccgcgcgccgtcgccccgccggggccgtcagcccgccgccgaggaagatcccggcctggtgctcatcagtcgccgtccgcccaagcagaagtacgccaattttgaggagtacattgcggcccacggcggcgtgaccgcccccctgcccggggaggatgcccccgccgaaaacagcgagccgtccggaaagcccgccgaaaagtaaggcttgccccggtaccctgttccggagcccctgaacccaaacgcacaaaataacgccgaagctctgcgcaaaccgcaaagctccggcgttttttgcttatctggatgaaaaaacggacgttcggatgacaggaaacacaaaatcccgcaaagaaggtcactgccccttttttcgcttgtccctggccttggcggcggacagagcgcctggggccaccggcttgtcggcagggtccagcagccttgcccgtaccacggccttgtccccgaaccggctgcgcagttcatcggcggcccggtccagtttttcctgcttgtcgttgcggtgggcatcggtaaacaggtccagctgctcaaactggtcgctgctggtcttttccgccgtaacccccaccagccgcaccggccgggagggccacatctggcggatcagcgcccgggcggtctggtagatggtctcggtggtgttggtggggttggccagcaccgtctggtgggaggtgcggcggaacaggttgtccaccagctgcaccgtcaccacccgggcggtcttgccgtcggcccgcagccgcccggccaccgactcggacagagccagcagggtggcgtcggccttttccgggcgggtcaggtcctcgggcagggtaacgctgttgccgtagctgttgtccttgacgtcgtgcttgcccaggggcgtcccctcgatgccgttggcgtggcggcggaaactgtctccccgtacgccgaaagccccacgcagcatatccgggtctgcgtgggccagttcccccacggtatggatgcccagggcatccagggtgcgcacggcactggggccaaccccgaacagagtgcccaccggcagaggccagagcttttgggggacttcctccggccagagggtgtgggtgcggttgggcttttcaaaatcggaggcggtcttggccagcaggcggttgaccgatacccccacgttcaccgtgaaccccagttcccgcagcactcgctcccgcagggcgtcggcggcctggaccggcggaccgaacagcccctcgctgccggtcatctccacaaaggcctcgtcgatgctgaactgctccaccacgggggagtagtcccgcaaaatggcgatcaggcttttgctgcactggacgtaccagtcaaaatccgggggcgtcacgatcagatcagggcatttctgccgggcggcaaacagggactcccccgtgcgcacgccgtactttttggcgggcaggcttttggccagcaccaccccgtgccgcttttcctcgtttccgcccacggcggaaggcaccgtgcgcaggtcgatgtccccgcccttttgcagcaggcgcagggccgaccaggacaaaaaggcagagttgacgtccacatggaaccataccttctttgcggccattgccacgcctcctttcggcggaaacagaattttaccacagacgcaggatcttgacccccacccgggccagcttgtagacggggccttccagttccttggcggcgtccttcagggcggcgcggatgggcaggtgctggggacaatgggcctcgcacttgccgcagcccacgcactgggaggctcccgtgcctttccggcgcaggccggtggtgcgcagatactcactttttgcgtggcggccctcggtggcggcccggttgtagcaggcaaacaccccggggatatccaccccggcagggcagggctggcagtagccgcagccggtgcagcccacccgcatggccgcctgcaggtcggctttcagcccgtcgatgaaggcgtgttcctccgccgacaggcagccgggcagggcgtcctccgcggcgcggacgttgtcccggatcatttccatgctgttcatgccggacaaaacgcaggtgacgcccggctgatcccacagccagcgcaggccccagcccgcggcggaccgccccgagggatgggcggcaatgcgctctctggcggcagggggcagcccggtgatgagccgcccgccccgcaaaggctccatgatgatgaccgggatgcccttggcggcggcagcttccaggccccgccgcccggcctgggtgtgctcgtccagatagttgtactggatctggcagaagtcccagtcgtaggcgtccaacagctgcaaaaaggccgccgtgtccccatggaaggagaacccgatccgcccgatctttccggcggctttcagttcctccagccagtcccggatgcccatggcgcagagcttttcccaggcggacaggtcggacagcatatgcatcaggtaaaagtcgatgtggtcggtgcccaggcgggacagctgttcctcaaagcatttctgcgcccctgcccgggagcggatgaggtactggggcagcttgtccgccagatagatcttgtcccggcagcccaggcggcgcaaagcctctcccagagcggcctcgctgccctggtagatgtaggcggtgtcaaagtagttgacccccaggcggatggcttcgtcgatctgggcggtgacggcatcctggtcgatgcgtcctcccgccttgggaaaccgcagacagccgtagcccagaatggacagcggcacgccggttttgtcggcccggtactgcatgtgaaaggctcctttccacgggggcggtcggcccgccccatgttccgttttattataccgtactttggacagggatgcaaaaaagcggagcgccggcgccgtggggcgtctgcgctccgcaaagaaacgggcaaagggatcagcgggtgctgcgggccacggcagcgcggtgccgcagcaggtttttccagcaggggggatagaagagcagcagcatggggaaaacttccagccgtccggccagcatgtcgaacatcagcacccatttgctcaacggcgaaaaaacgctgaagttgccggaaggacccaccagttccaggccagggccgatgttgttgaaggtggcggcaatggcggtgaaattggtgaccatgtccagaccgtcgatactgacggccagtaccgacatggcaaagatcagcatgtaggtgacgaaaaagacgttgatgccccgcaggacttcatgctcgatgaccttgccgtccatctcgatcttgcggatgcttttgggatggatgtaggagccgagctccttgatcatggtgcggaacatgacgataatgcgcgaaaccttgatgccgccgccggtactgcccgcacaggcgcccacaaacatcaggatgaccagcacggtgcgtgaggtctgcggccagctgttgaagtcggtggtggcaaaaccggtggtggtgatgatggacgccacctggaaagccgcctggcgcagggtgtccaggaaggacaggcccccgctgtgcagatcccacatcaggatggcgatggccgtcaggatgatgatgaaataggtgcggacttcctccagggagagggcatccttcagacggcggaggagcagcaggtaatagaagctgaaattgacgccgaacagcaccatgaacaccgtcaccacccattgcaggtagggggagtacccggcgatgctgtcgtttttgatgccgaaaccgccggtacctgcggtgccgaagctggtggtcagggcgtcgaacaggggcatgccgccgcacagcagcagaatgacctcggcaacggtcatgacaaagtagatgatgtacaggatgcgggcggtctggcggaccttgggccggaacttgcccaccgagggaccggggctttcggctttcatcaggttcatgtgggagccgcctggcagctggaccaccgccagaaggaacactagcacgcccatgccgcccagccagtgggtgaagctgcgccagaacagcatgcagtgggaaagtttttccacatcggacaggatactggcgccggtggtggtaaagccggataccgtctcaaacatggcgtcggtgaagttggggatctcgccgctgagatagaagggcaggcatccgaaaaagctcagttcgatccagcccagggcggtggccacgcagccttcccgcatataaaagaccgaactgatcgcctttttataggacagggccagccccaaaaccacagccagcagacccacgcccagaaaataccaggcggtatcctcgcggtagatcagcccgacggcaaagggcagcatcatgaaagcgccttccagggcaagcagccagcccagtacccggcggacgatggatgtgttcatgcagcggcctccttacgccagaatgtcggcaagatcgcccagcccggtgtgggtggtgacgatgatgaccgagtctcccggctggatggaatcgtcgccgccggggatcaggatgctgcccttgtggctgatgcaggccaccagcaggtgatcccgggtgtgcagttccctcagggggcgtcccaccacgggggagtcggcgttggccacaaactcgatggcttccacccggttatcaaagaggtggagcaatgtctcaatgttggaggacgccttggacgccgtgcgggagcgcacataggccacgatggcgtcggtgaccagggccttggggtagaccacgctgcccaggttgagacggtcgatggcttccgggaacatgatgcggttgatcttggtgaccaccttggcccgggagaccgcctgggtgtgaagcgtcagcatgatgttttcctcgtcgatgccggtcagggggaccacggcgcccacgtgctcgatgcccgcctcacgcagcagatcggcgtcggtgccgtcgccgttgaggatggtggccttgggcagctgggtgctcagctcctcgcagtgctggcggtcgctctcaatgaggaaaacattcacgcccacccgcagcagctgcttggccagataataccccgtcttgctgccgccgatgataagggcgtcccgcacctggtgggtctccagcccgatgcggcgcaaaaactgcttggaaccccgggtgggcgcgatgaaggagaccacgtcccccgcctgaaggccgaaattgccgtcggggatgtagacttcgccctcgcgttccacggcgcagatcagcacggccccggccagttcctggcccagttcccgcaggcagcggccgtccaggcggttgccctccgggatgcggaagcggatcatctcggccaggccccgggcaaagggggtcacgcccacggcgctgggcaggcagagaatgcgggagatctcccgtgcagattccaggtcggggttgatgatcatggccaggcccagcttgctcttgagataggcggcgtcctggctgtattccggggtgcggacccgggcaatgaccgcgcagtcggtgacgcgctttgccacgatgcagcacaaaaggttcagctcatcggagttggtcaccgcgatgaggatgtcggtgtcatagatgccggcttcctgcagggtggagaagtttgcaccgttgcccacgatgccgttgacgtcaaacaggttggtgatgtcctgcaccttgccggcgtcgcggtcaatgatggtgatgtcgtggttttccttgctgagcttgtccaccagggacaggcccaccttgccgcagccgacgatcacgatgttcaggccctttttgtggcgggaaaatttgtggtccataaaagatttttcctcgattttcaaaggtttgtcgggtcaggggcgaaaagagcgcgtaaaagcaaaaaacagcctttccttccttgaacggggcaagaaaggaaaggcgcgccatccgcggatgaaccggggaacgggttacaatcagacggtaaaatgcacggtgtacaggtcgccctgaccctcgttgccgtcctcatcggtgtactgctccagatagaccagataatagtcgctctggtcgctgggaacctcaaacagcaggtcgtaggtttcctcggcaccgtcggccatataccaggacaggggcatctgggcgttggtgggcatgccgtcggcatcttcctccagcgggtccacagaccaggcataatcctcgtcgccttcgccccactggatctggaagtcgctgtcgtacatgggcagctcttcgccgaaggtgttcttcaccgtgacgctgcacaccaccagcttgttgccgtccgcggcggtgtagccgtcatagtcgctgacgacctcggcggtgttgacggtaaagtcaaagaacatgttggacatggtgtcgcccagctcgccgtcggtgtccttgccggcgttgaacagggtgatgccgctgcatccggtcagcgccgcgcccagggtcagcgcggccagaccggcacagaaataccggtgcggaaaacgcatatgtacctcctcattttccccgtcagggtcggggatttctctttctgttgattctaagatagcggaaaatacagaaaaaagcaatacaagctcccggtaaacttgtatattttgtgataaagcgggggatgtgttcaaaaaaaggtggagaaaaggcacaaaaacgcggcccggcccgccggagatcccgggggccgggccgctgtctgaaagcgggtcacagagagaaagggaggatcaggagagcgcctccaggggcagggtgacggcgttggcagtgtccagcgtgcagcccggcgtgtagtagtagcggaaggagttgatctgctccagttcctcctgggtggcggcgtagtagtcgtagcggatggtcacgatgccggtagcggggtcggcgaaggcgttgaccatgccggtgcggaggatagtggcggtgtcttcctcattgaggccctggacctcctcgctcacggtggagacgtcctcgtcgttgggcatgaccaggtccacaagcataccggaggacataccgtgcacccagccgtagggcaccagggagaagctgatggagctgtccttgacggtgaagtcctgtaccgtgaagccgcccaggtcgctgaaggcgatcttggccccggcgcgcatctcgtcggcggtgacggtgcgctgctcggtctcggcggtcacgtcgtaggacaccggcgtcagggtgatggaggtggcgccgtcggcggggcgggtgagctgatagcagctggtggaactgccggtattgtcggaaatttcataatcggaggctgcggcactcaggtaaagctccttgccggtattgtcggtgatgaggaactggctggtgtccatgcccttgctccaggcgacctcctgctgggtgtcgtcggtgtaggcgtactcgttgcgggtggtgatgctgccgcccagcgggccaaaggcgagattgtccagcagcagcgcgtcgtcgcccaccggatactccccggccttgacctgggtggccccggcgcgcagggcattgccgtccagagagacgctgaaagaccagttgccctcatggttcagcaccgaagtctccgacaggttgaggaccacagtgtccccttcggggatgtcggtgaggatatagtggacccacatcttgagggtgctgccgtccacccggtaatactcccgcaggctgccgctggttatggcaatgggctggccgttgatggtgcagttgcggaagaagggagcgctgaaccacacctggtcggaggaggagtagaagctttcctcatccagggcgtcgtccacgatgttgtcccccgtgatggtaaagaacacgtccatggaggacacatccatggagatgttgtccagcgtgacgctgacgccgccgtcggtgacggtctggcccacctccgcgttgtaggcggtgagctccgcctcggtgccgtcgtgggaaccccggggcgcgtccaggttttcggagacctcgctctggtcgggggcgccggagaagaacccgatgtcgccgcccagcatctgcaccagggaaggccccacggcggccgcggtgccgcacagggcgcagaccacggcggccgcaatgccgaaggtggccgcccggcggcggatgtggcggactttcggtttctggccggaagccgccgcggcgggggcgtcggctgtgtccacacggtccatgacggcccgggtcaggcggtccagctccccggcggaaaggggctgttcgggaatgtccagggcgtccagttcgttcaaaagatcatgatccttacgcatgtgcgtgtactcctttccgttccagttcccggcgcaggcgttcccgcccgcgggacagccgggtgttgacggtgctctcgctcatgtcgagagcacgggcgatctgccgggaagattgcagcagataatacttgcggagaaagatctcccggtcgggctgggacatggctgccaccagcgtgcccaccagatcctccgcgtcgctgggcagggtgtccagcagggccagggcgtcgcccagctcctcgttgaggggcagctcggtcttgcggcgcaggctgcgccagcggctgatgccggtgttgcgggccgtgaccaccagccaggccttgaccggcgtgccggtgttgcacaggcgggaagcgtttttccacagcgcgacgaatacgtcggccatacattcctcaatgtcctgcgggcggccgggcaggatcttcgataaaattcccttgacggcgggggcgtaccgctgcatggcggttttcagccctgtgtcgggatcgttcacgatccacagggcaaggttttcatcctccacatcgtcacctccaaatccttggtttttaaggccttacacccatacagacgcccgggcggggaaaaatcttacacccgcagaaaacaaaaataaaagaccgcccggacagcagtcacactgccgcctgtgcggtcttgccggatcggaaatagaaaggggttacagatagctgggctcttcccggcggtgaccggccagagcggggttgtcaagcaccgcgcctgcacccagcaccacacagtccaggggactttcggccacgtggacctcgatgccggtctcgctctggatcagctggtccaggccccgcagcagagcgccgccgccggacagcatgatgccccggtcgatgatgtcgctggacagctcgggcggagtgcgctccagcgtgtccttgatggcgtccacgatgcgcagaaggctttcgctcatggcttcccggacttcctccgaacggatgacgatgtccttgggcaggccgtccaccaggttgcgacccttgatctccatggtggtctcggggtccatggggctggcggaaccgatctccagcttgatctgctcggcggtgcgttcgcccaccagcaggttgtacttgcgcttgatgaaggcgatgatgctctggtccagcgtgtcgccggcgcagcggatgctgcggctggccacgatgccggacaggctgatgaccgctacctccgccgtgccgccgccgatgtccacgatcatgctgcccaccggctcggtggtgggcaggcccgcgccgatggccgcggccatgggttcctcaatgacggtgacctggcgggctccggccctggcggcggcctgccgcacggcgcggcgctccacctcggtgacgccggagggtacgcagatgaccacccggggacggctgaaaatgcccgacccgcaggcctggcggataaagctctgaagcatggcggcggtgatgtcaaagtccgcgatgacgccgtccttcaaaggacgcaccgctacgatggaacccggcgcccggccgatgacggccttggcctcgtggccgacactgcgcacccgcagctcgtcggtcttggtatccaccgcgacgacgctgggctcgcgcatgatgatgccgcggcccttcatgtagaccagagtgttggcggtgccaaggtcaatgccgatgtctttgctgaacatagtgtgaaatctcctggaaatgaatgcaaaaaaacgtgccagaatccccatttcgttcctcccccggcccggcacgccggaccggggggacagcttattcgtcaaaagcggcgagaagctgtgccgtgcggtggacgggcaggcccatgatgttgtagtagcagccctcgatcccgctgcaccacagcgccgcccgcccctgaatggcgtatgcgcccgccttgtcatagggttcctcggtgtcggcgtaggcctgcagctcggtttcggggatggaggcaaaatgcaccagcgtcgtctccaccgttgcggccatccgcccgtcgcggcagacgcacagcccggtatggaccttgtgcgtccgtccggacagcgcccgcagcatccgcagggcgtcctcccggtcatggggtttgccgaacacctcgcccccgcagtccacgacggtgtcgcagcccaggacggtgcagccggggttcgccgccgatacgtcgcacgccttggcggtggccagcgcgcgggccagctgggcgggagtgtcggcagtgatgcggctttcgtccacggtgctgggacggacgatgaaatcgcgggtgacaagggcgatgagctcacggcgtcgcgggctgcccgaagcaaggatcagggacatggtgatggtgcctctctcaagtaaggattataccggcccccggcgtcgaaaggacggggaaacggacggaaatggaaaattttgccaaacgcaaacttacagcttgccggtggagccaaagccgccggccccgcggtcggtgtcggacaggtcattggcctgcacaaaggcggcctgccacaccggggcgatgcacagctgggcgatgcgctccccgggctggacggtgtagggctcggtgcccaggttgaccatggggacccgcagctcgccgcggtagtcgctgtcgatgacgcccacgccgtttgccatggtcaggccgtgcttgatggaaagcccgctgcgggcatagaccagggccacgcactcggggccgggcagctcaatggccagcccggtggggatgagcgcccgctgcatgggggccagggtcaaaggctcgtccagcagggcgcagaggtcggcagccgccgcaccggcggtggcgtaggcgggagctttggcccgggggtcaagcagcttgtatttgacggttttggtttccatggaactcctccggttttgaaagtgcgggtgacataagaaaaggaaaaccctgcaagaactgcgccgcatggcgaaactgccttacagtcagagttttgcggctctgttttcttatggggccgcgcagaattaatcgtagtcgatggtataggccacagggggcttttcgtcggacggctgctcggtcaggcccagcagcgcggcaatgccagccaacgccagcatgacgcccagaaacaccgccgcggccttttcaatggccagatagatgcggcagagcaggcggggcggatgcagggccagggcgacgacggccgcaccgatgcccaaaagggcaaggccttccttgagggtcttgttcttcatggcgtcctccttgtgggggggtacgcagcgtcgttgtcactgcgccttggtgggatcattatagtatagcccacgggtgaactcggcgtcaaacggtttgccggtttgcagcagcgccaaaatctgggcggcccgctggggcgtctctgtggtaaaggcggccaccgcccagtcggcgggcagctcgctcaggcggtcccccatgtaaagggggaccggattgtacaccgtgcggatgccgttgtccggcaggccgcactggacgaggaaatcccggcccttgcggtcccgcaggcggccctgatggctgcatcccgcgcagctggcgtggtcgggccggtttttcagcgggcaggcccgggtgagcatgagggggatgtgcccatagcacagaaccgccgtgggcagggctttgctctccggcagagaacccaccgtccccatgagggatacgggggtctcgggatggatgagcagccctttggcgcccagctcgctgcagcgcagagcggacaggggattggtgacgttgagacccagcccgccgtagacggggctgtccccggtcaggcggaactgcgccagattgttgaccacaaaacctttgtagccgccctccgcccggagtttctccacacggcggaggaccttctcctcaatgccgtacatggcacggggcagctcaatgagggtcttgtcccgcagcccggcggggacgttctccgcctcccacagggggaagatcagcaggggcaggtcggccgcctgccggggcatctggtccacccgggcaaaccgggcggccagtttcggctgactgccccgggtccgggctgtgaacgcgggcagggagcaggccttcaccggcaggggatggggctggctgcgcttttccagcagggcgtccaggcagcggcggcgcaggtcgttggccacgctgcccggcaaaaaccagggaccgccctcctgctcgatcttgcaggaggcggcgacaaaaggcgtgccgccggttttctgcaggctcttttccagcgccggggcgggatcgttcttggcaggggagagggtggtatccgggtcggtgtaggcggagacccggctgccctcccggtcggcggcggtcagacgggcgccgtcctccgtcaccgtgagggtaaagtccaccggcacgcgggaatactcccggcggaacagctcccgggccttgggcgcggccagacggctgcgctcggcgtcggcctcggtgcggacgccgaacatggcgccgtcgtttttgccggtgaagtagccgtcggtaaagccggagcgggagaaaatatcccgcaccagggcctcgtcgtagggctggccttcccgggcgcagcggcaggccaccaccgaggcggcggtgtattcgggggtgcgcaggcggccctcgatcttgacgctggccacccctgcggccatgatgtcggccatgtgggggatgagatccatgtccttgaggctgagatggcaggcctggcccggcttgccgggacgcaggtcggaagcatcaaagggcaggcggcagggcccggcacaggcgccccggttgccgctgcggccgcccagaaaggcgctcatcatgcactggccgctcatggccatgcacagggcgccatgaacgaagatctccacctcgatggggctttttgccgtgatggcgcggatctctttcagggagagttcccgggccaggatcacgcgggaaaagcccatctccgccagctggcaggcgccctccggcgtgtggatgctcatctgggtgctgccgtgcagagcaaggccgggggcgatctgccgggccagggccgcggtggcaaggtcgtccacgatcagggcatccactccggcctcggcggcacagcggatggcccgggccaggttgtccagctcgttgtcatagaccaggatgttcagggcagcatggacccgcaccccccgggcatggcagaaagccacggctccggccagggtgtcggtgtcgaaatttcctgccgtccggcgcgcgttgaagcccgcaaaccccagataaacagcatcagcgccgctgtaaacagcggcgctaagcatttcggcattgccggcaggggcaaggatctccaacccatggggcgggccggacggatgcagcagggcccccatcagtcgggaatgtcctgccgcgccttgaggcgggcttccaggtcggcgacctttttgcgcagggcgacattgtcccggcgcagctcctcggcggccatcttggcgctggctgcgtcctccaggtaatccttgatctggcggcgcatgttgtcggcgctgccgctggccttttccagctcatcccggtagctcagggcggtcatgaccgccgccgtggtgatggataccgacttggaagagctcatcagctcgttcatatccaggttgagacggtcggccagattctgcatataatcttcgctctcgctggtggcgatgacgtaactggaaccgcagatgttcaggcgtacctttgatgttgccatatttccaactcctttgacgaaaaatgagaaaaccgtgcggatccgggtgcatccgcgcgatggatgactgtcaaaacaccgtcctttgttcacggacgatatacaaacttattataatataaaaccacaaagagaaaaagccccttttgtgtaaattcaaaaaaatagcggattgttcgcaaaatctcttgcaccagtgcggaatatttactataatcgaaaaggtaaacgtctcaaaagacctgttttccagttagtttgagccggtacagggcgctttagtccccccagccgccgctgcggcagatgcctgccggccataagataaggagagaaacatcgtgctcaagtacaccaaaaaagaatttgacaagatgctgcgtgacaagctgaccagcgaatacgccgtcagccttgaggtcgcgtccgccgttcagatctaccgtgcgctggccatgatcacccgtgagatcatgtccgaccgccagaaggtctttcaggccaagacgctgggttccggccacaagcaggtctactacctgtgcatggagtttttgatgggccgcagcctgcgcaccaacctgttcaatctcggcatcaatgaggtggccgagcaggtgctggccgacgccgatatccgtatcgatcagatctatgaccaggagccggacgccggcctgggcaacggcggtctgggccgcctggccgcctgctatctggacggcatggccaccgactgcatccccggcaccggttactccatcctgtatgagtacggcatcttcaagcagaagatcgtggacggctggcagcaggaagctgccgacaactggctgcccggcggccaggtctggatcaagagccatcccgaccaggcccaggagatccgctttgacggccaggccatcgagacctgggacggcggtttccaccacgtcaagtacgagaactacaacagcgtcatggctgttcccaacgacatgtacgtcgcgggctacaactcccagggcgtgtccaagctgcgtctgtggcaggccaaggcccccagctttgatatgagcagcttcaacgccggcaactactccaccgccatcagccagagcgccagcgccgagctgatctccaaggtcctctaccccaacgacaaccacaccgagggcaagatcctccgtctgcgtcagcagtacttcttctccgcggcttccatcgccgatatcctgggcattcacctgagccagtacggcacgctggacaacctgcccgacaaggtggccatccagctcaacgacacccatcccaccctggccatccccgaaatgatgcgcatcctgctggatgagtgcagctatgaatgggatgccgccttcgacatctgccgccgcaccttcgcctacaccaaccacaccgtcatgagcgaggctctggaaaagtggaacgtggacatcttccgctccaccctgccccgtatctggcagatcgtctgcgaaatggaccgccgctgccgcgccgacctggagcgcgccttccccggcgaccagggcaagatcaactacatggccatcctgggcgacaaccaggtccgcatggccaacatctgcgcctacacctgccactccatcaacggcgtttccaagctgcacagcgagatcatcaaggacagcgtcttccacgattatttcctgtacaagcccaaggccttcaccaacgtcaccaacggcatcgcttaccgccgctggctgctggcttccaaccccggcctgaccaacctgctctccgacgtcatcggcgatgacttcaagcaggatgcctccaacctgaagaagctggagaagttcgccggcgattccgccgtgctggagcgcctgggcaaagtcaagcgtgagaacaaggccatctttgccgactacctgcgcaaggccaccggtcaggagatcgaccccgactccatctttgactgccaggtcaagcgtatgcacgagtacaagcgccagcacctcaacgctctgaacatcgcggcgcagtacctgtacctgaagaacaaccccaacgccgacttcgtgcccaagacctacatcttcggcgccaaggcggccccgggctactacatggccaagcagatgatccgcatgatctgcaagctgggccagctcatcgatgcagaccccgttgtgcgtgaaaagctgcgcgtggtctatctgcaggattactgcgtcaccctgtccgagcgcctgatgcccgccagcgaagtgtccgagcagatcagcctggccggcaccgaggcttccggcaccggcaacatgaagttcatgctcaacggtgcggtcaccctgggcaccctggacggcgccaacgtggagatcgccgacgctgccggccgtgagaacgagatcatcttcggcatgctcacgccggaagtcaacgccctcaagggcatgggctaccatcccagcagcttcatctatgacgacgacgttgccatggctgtcctggatctgctggagaagggctggaacggcgagaacttcagcgaggtcaccaacaacctgcgcaactccgacccgtacatggtcatggccgacttcaaggactaccgccgtgctcaggccgacgtccagcgcctgtacagcgaccgtgagacctggaaccgcatgagcctgatgaacatcgccaatgcgggcatcttctccgccgaccgctctgtcatggactacgcccgtggcatctggggcattgcgccggtcaaataatcccattcctgcataaactggaaacaggcaaggcaccgcatggtgtgatacacaacagcttcgcaccgcaggcggacgtccgcgttgggtaactttgtctgaaccttaaaaagcgggccattgtcggcgctttgtgcgcgttgacactggctcgcttttgcgggttttccggccctgccgtgaaccccgctccgcagtctgcctgcgagggcgggatgacagaccaaagtgcgcccggacgtttgttttgccctgtgtggccggccccggccctgccgcgggcggcccatcccacaatgaaggagttctgcacatgcatacctactacaacagcgccgacccggcctgcaaacagcctttcggcgcggtgacggcgggaacggaagtcaccatccggctgactgtgccggaggaacttgggtatgtggacccgcatcttgtgctgacgaaagaccgcgaggacccggtccattaccgcatgaactttgagggccagaccccgcgggtcaaccacttttcggtcaaggtccgtcccaccaccacgggattgtacttctactattttgatctgtacaccgatttccgcaagatctaccgcggcccccacggggagggtgtgctgtcctggacgggcggccgccagtggcagctgactgtctatgagcaggactttgccacgccggagtggatgaagggcggcaccatgtaccagatcttccccgaccgcttccatgagggcagacccggcaagaccatgccctttgccgaccgcatctaccgggaggacaagacgggggaaccctacttctggcccaacgagcaggccgacggttacctcaaccgggactatttcggcggcgacttcgagggcatccgccagaaactgccctacctgcatgacatgggcgtcacctgcatctacctcaatcccatttttgaggcccattccaaccaccggtacaacacggccaactacctcaagcccgacccggtgctgggcaccaccgaggagttcacccgtctgtgtgccgaggccgcccaaaagggcatccgcatcattctggacggcgtgttcagccataccggttccgactccatctatttcaaccgggaaggccgctacggccccggcggcgcctaccgcgaccgcaattctccctaccgttcctggtacgatttcgactcgggctacccctgcggctaccgcagctggtggggcttcgagaccctgcccgaggtggaggaggacgatccctcctacatcgatttcgtctgcggcaagggcggcgtcatcgacacctggctgaacctgggagccagcggcttccgtctggacgtggccgacgagctgcccgacgagttcatcgaaaagatccgtcaggccgtcaaatcccacggggaggacaaactgctcatcggtgaagtgtgggaggacgccaccaccaaggaggctttcggccgccgccggacctacctgcggggacatggtctggacaccaccatgaactatcccttccgcaactgcgccattgattttgtgcggggcgccgatgccgccgacgtggccgaggggctgctggacatctgccagaactaccccaagccggcgctggactgcctgatgaacttcctgtccacccacgacaccgagcgggccatgacggccatctcgggggagcctgccaacggccgggaccgttactggcagagcggccgccgcattcccgccgaccagtatgacgaggccatccaccgcctgctgctggcctacgccatgatcttcaccctgcccggcgtgccctgcatctactacggggacgagatcgctatgcagggctaccgcgaccccttcaaccgggctttctttgactggaacagcaccgaggaacgtctgcggggaccgctgcgcaacctggcagccctgcgcaagagttgcgatgccttccagggcggcagctttgagatcgtccgcgccgagggcgacctgctgcaataccgccgccgcggcaagacccgcaccgccgagatcatcctcaaccgcggccctcacctggtggcggtggaggccttcggcaagacgacggaggtcaatcccgggggattcaccatcctggtggaggaaaacgaacctgcccacgtgggatattttgccatctattaaaaaacaggctccggcctgacaaaagcgccgtcagtgaaaactgacggcgcttttttgcgtgcatctgcacaaatgcggaaaaggaaacctgtgaaaactgcacatcaggacagtgcagcgtacaaaaatgacatttgaattttgtgcatttctcctatttgtgtaaaatttacagcgattttacaattcaaaacggtaaaccgcggccttttgcggcatattttctaccagcgctggccatctgaaacactgaaaccacaatatatagtgtaaaatgggaggcgcggcggaatatattgactttctggggtgattgtgttaaaatattgacaatctggaacggaggaatcttccacacgcagacaggctgttgaccggcactgagcggtgggcgcaaggcccgggggagataccgtagccaagtccggcagaatgcgcagcagcgtacgatgtgaggcaaatccggctccgtctccagtggttacgttttcccacggtttaccccgatagctggaggtgctatatatgggaatggatacactgatatggctggttctgaccatcgtgtttgtggtggccgaagccgccaccaccgcgctgatctccatctggttcgccgtcggagccggtgcggccatggtcgccagcctgtttactgactctgccattgtgcagttcgccgtgttcgcggtggtgtcggccgtgatccttgcggtcatgatccccaccctcgccaagcgccgtgcggccagcaagcctcccgtcaccaacgggtcgcagctggtggtaggcaaacgcggcgtggttctcaaggccgtcgtgcccggcagtatcggccgcgtccgtgtggacgggctggactggcaggcaaaatcccagaccgccctgcccgaaggcgcggcctgtgaggtcaccgccgccgatggcgccgtgctgaccgttgcatccgtacaaaccgccgacgtctgatccctgaaaacgtcggtccggcaaccgaatttttacacattaccaaaaaaggagaatacatatgggacttctgattgcggcgatcctgcttgtgatcgttctggtagttctggtgcgctgcatcgtcatcgtgccccagtccaattctttcgtcgtggagcgcctgggcgtctataaggcgacctgggaagccggcctccacctcaaaatgcctttcatcgagcgggtggcccgccgtgtctccctcaaggaggaagtggcggacttccccccgcagcccgtcatcacccgtgacaacgtcaccatgatgatcgacaccgtggttttcttccaggtgttcgacgccaaggcatatgcctacggtgtcagccgccccatccaggccatcgagaacctgtctgccacctctctgcgtgacatcatcggcagcatgtccctggacgagacgctgaccagccgcgacgccatcaacacccagatcaccgctaccctggacgaggccaccgaccgctggggtatcaaggtcaaccgcatcgagctgaagaacattgagccgccgacggagatccgtcaggccatggaaaagcagatgaaggccgaccgcgaaaagcgcgccagcatcctgctggccgaaggcgaaaagcaggctgccatcacccgcgccgaaggcgagaaggaatccgccatcctgcgtgccgaagctgtcaagcagcagcgcatccgtgaggccgaaggtgaagcccaggctttgctgatggtccagcaggcgaaggcggactccatccgcctgatcaacgaggccgcgcccacccagaacatgctggctctgcgcagcatggaggccatggaaaaggtggccgacggcaaggccaccaagatcatcgtcccgtccgagatgcagaacctggccgctaccgttgcggccatccagggcatcgccggcggtgcgagcactcccgccaagtaatcatcccgccattgcaaaaggtgcctgcccgcaggggcaggcacccttttttgcgccccaaagcaggggaaagcccccgcatggcccggggaccatttgcacgatcccacgccgggacgataaaaaatcctgtttcggggataaaattttacagaaacgttaaataagtatcaataaatgtcttgcgaaatcaaccctttgtgcgtataatagaatcagacccaaaggggcatggtggccccggattttgcaaggtaaaaccgagaggagatttttgctatgggattaggtaaaaagaccatcgacgatcagaattatgcgggcaagcgcgtgctcgttcgctgcgacttcaacgtccccatgaaggacggcgtcatcaccaatgacaaccgcatcaatgcggctctgcccaccatcaaaaagctgatcgcggacggcgccaaggtcatcctgtgcagccacctcggcaagcccaagaacggccccgaggccaagttcagcctggctcccgttgcggtccgcctgtctgagaagctgggccagcccgttgttttcgccgatgatgacgaggtcgtcggtgctaacgccaaggctgctgtcgccgctatgaacaacggcgatgtcgtcctgctccagaacacccgcttccgtaaggaagagaccaagaacatcgacaccttcagcgaggatctggcaagcctggccgacgcttacgtcgacgatgccttcggctcctgccaccgcgctcactgctccaccgagggcgttaccaagtacgtcaaggacaccgctgtcggctacctgatggaaaaagagatcaagtacctgggcaacgcggtcaatgaccccgtccgtcctttcaccgccatcctgggcggcgccaaggtcgcggacaagctcaacgtcatctccaacctgctggagaaggtcgacaccctgatcatcggcggcggcatggcttacaccttcctcaaggccaagggctacgagatcggcaagagcctgtgcgacgacaccaagatcgactactgcaaggaaatgatggccaaggccgaggaaaagggcgtcaagctgctgctgcccgttgacaccgcctgcatcaaggacttccccgatcccatcgacgctcccgtcgagaccaccatcgttcccgttaccggcattcccgccgacatggaaggctgcgacatcggccccgagaccatgaagctgtttgccgacgccgtcaaggcttccaagaccgttgtctggaacggccccatgggcgtgttcgagaaccccactctggcacagggcaccctggctgttgccaaggctatggctgagagcgatgctaccaccgttatcggcggcggcgactccgcagcagctgtgcagcagatgggtctgagcgacaagatgacccacatctccaccggcggcggcgcttccctggagtacctggaaggcaaggagctgcccggcatcgcctgcatcaccaacgcataaggctgacattcctgtgcgcgccgcaggctgtccgctaagctgaagctcagcaaccgcacgcggcgcggcggcctgacgtccccgtcagggccgctgcgccgctttttctgtgcggcaggcaaaacgccgggccgtacacccataatgataaaatgaccggaggtacaatcgtatgaataagcagaagcgcaaggctgttattgccggcaactggaaaatgaacaacacccccaccgaggcgggcctgctgctggaggctctgatccccggtgttcatgacgccgactgcgaggtcgtcgtctgcgttcccttcaccgacctgtgcaacgtcgttgccaagtgcagcggcaccaacgtccacgtgggcgctcagaacgtccactttgagaagtccggcgccttcaccggcgaagtctccgccgacatgctgctggacctgggcgttgagtacgtggtcatcggccacagcgagcgccgtcagtacttcggcgagaccgacgagaccgtcaacaagcgcaccctggctgctctgaacgccggcctgaagcccatcgtctgcgtcggcgagagcctgacccagcgtgagcagggcgtcaccgaggaactggtccgcatgcaggtcaagatcgctctgaaggacgtcaccgaggagcaggtcaagaacgtcatcatcgcctacgagcccatctgggccatcggcaccggccgcaccgctacctctgaccaggctcaggaagtctgcgcagccatccgcaaggtggtcggcgagctgtacggcaacgacatcgccgagggcatgaccgtccagtacggcggcagcatgaaccccgccaacgctgccgagctgctggccaagcccgacgttgacggcggcctgatcggcggtgcgtccctgcacgccggcaagttctgcgagatcgtcgacgctgccaccaagggctgatctgtccggtctgaactgaaacaacccatccgggcgggcgggaaaccgcccgcccccatttgacccaataccaaaggagcaaatacgtttatgtcgaaaaaacctgttcttctctgcatcatggacggctttggctggaccccggaccagaccttcggcaacgccgtggtcgccgccaagactccccgtctggatgagatcttctccaaataccccatgaccaccatcgacgcttccggcatggctgtcggcctgcccgacggccagatgggcaactccgaggtcggccacaccaacatgggcgccggccgcatcgtctaccagcagctgaccctcatcaccaagtccatccgtgacggctccatgaaggagaaccccgtcctggtcaagaacatgaaggctgccatcgacgcgggcaaggccatccacctcatgggtctggtgggcaccggcggcgttcacagccatgccgaccactggtttggcgtgctggacatggccaagcacatgggcgcggacaaggtctacctgcactgcatcatggatggccgtgacaccgacccccattccggcgagggcttcctggccgacctgcaggccaagctggacgagctgggcatcggcaagatcgctaccgtcaccggccgttactacgccatggaccgtgacaagaactgggatcgtgaggaaaaggcctacgctgcctttgtctacggcgagggcgaccacgctgccagcgccaaggaagccatcgagaacagctacaagaacgacgtcaccgacgagttcgtggttccctgcgtcacctgtgagggcggccgcgttcaggagggcgacaccgtcatcttcatgaacttccgccccgaccgtgcccgtcagatgacccgcatcttcgtggacgatgctttcgacggcttcgagcgccgctacggccgcttccccgtcaactacgtctgcatggccgagtacgacgccaccatgcccaacgtggaggttgcctatccccccgttgagctgaacaacgttctgggcgagtacctgtccaagaacggcaagacccagctgcgcatcgccgagaccgagaagtacgcccatgtgaccttcttcttcaacggcggcgtggaggctccctacgagggcgaggaccgcaaggtcatccccagcccgaaggtcgccacctacgacctcaagcccgaaatgagcgcccccgaggtcgccgaggagtgcaaggcccgcatcgagagcggcaagtatgacgtggtcatcctgaactttgccaactgcgacatggtcggccataccggcgtctttgacgctgccgtcaaggccgttgaggctgtggacgctgctgtgggcaaagtggtggatgccaccctcaagatgggcggcgtggtcttcctgaccgccgaccacggcaacgccgagaagatggagaaccccgacggtactcccttcaccgcccacaccaccaacgtggtgcctttcgccgtcatcggcgcgggcgacgtcaagctgcgtgagggcggctgcctggctgatatcgctcccaccatgctgccctacgtgggcctgcctgtcccggcggaaatgaccggcaagagcatcatcgtcgagtgatctcccgctgaccagctgccgggccgctgacccggcaacggcaaacctgccatagcaatgaaaaatccccgctgcggatgcaaaccgcggcggggatttctttgttgtgttttgggatgggaaagggtcgggcttactgcggtgtcaggtagtagatgcggcaccactggttgtccagcagcgcgccctgccactcgaccaccgtcaggccggcagcggtgagctgatcggtcagctcgggggagaggtcctcctccgggtagacgaggaagaggctgccgccctcgtcgggcagggcatcggccaggtcgccgcccgcataggtgtcacagtcggggtagaagaattccagcacccggttgtccacatgctcggtcaccgagtagatgctgtctccgggctgggcgcggtcctccacaaagctgacggtctggacaacggcctcgttgacgtccagaagatcgctcttgtactgcatggcgggctcatacatggcgtacaggatcagggccaccagcagtacccgcaccaccggcaggcgtttggtcagcccggcggcagccaccgccatggccagccacagcagtccgcagacagggaagaaataccgggaaaggtacatgggccgcagcgccacgctggccagataccccagggcgatgacgcccaccgcggacagcagcccggaaagccccagccagcgggaactgcggggaccgcacccgggcaggagatagtaggtgatgacggaagcggtcagcaaaagcagcagagtgtggctggatacccggttgccgatgatcaggtccagcgtttcggacagggcgggcagctcctgcagccagaacccgcccgtggcctggtaaagaatgttgcttaccgccatgaatacccagggcaggtagcagaccaccgacaccgccgcggcgatcagccagccgcgcaggagcttgcggtcaaagcgcagggtatagatgagcaggaacagatagataaagcagacggccagcagggcaaaatagtggagataagccgagcacagcccggtgacggtcaatgtgatccaccagccccgtttgggggactgggcgtcggtgatcttgtaggccgcgaatccgcacagggtgacgaaaaacagcgcccagccgtacatccgtgcctcggtgaaaaagcgcagggaggaaacgttgggggccatcaggcagaggaacgccagcgccgcaaaccgcccgaaggccggccggaacagcaccagtgccatgaggatcgtcagcacatacggcacaaaggaggcgatgcggtagacgatatgggcgttgccgaacaccgtcacaaacagctttaagataaagtagtacagcggcgggtgaacgtcggccgcggtggcggtagggatctcggtccagtccagcttgaccatctcgatggaaaagaactcgtccagccagaagttgccgttggtggtgaactgcgctccgaatacgaccagcacggccgcaaaaatgaccagcagcacatccggcagccagcgccgcaccagagcggcgggggagggggtgtttgacatggggaaaacatcctttcagcaccgggaccgggagggtaacctgccctgcggggcaaaatgccgcgcagcgacgtccgccgccgggacctggtgggaatcatctgtattataccgcgcacggggcggcggcgcaaggcggcgcaggccgccgggctacttgccaaccggcgttaaatggggtatcataaacgcaggtatatccgccgcccaacaggcaacttccgccgcgccgcggcgttgacagaaaaggagacaaaccatgcgttactgcaaaaaatgtaccatgcccgacacccgtcccggcatcacctttgacgccgagggcgtctgcagcgcctgccgtcattacgaacaccgcaagcaggtagactgggatgcccgcttcaaggagttcgaggccctgtgcgacaagtaccgcggctgcaacggccccggcggctatgactgcgccgtggcggtctccggcggcaaggacagccacttccaggtctggatgctcaaggaagtcatgcacatgaaccccatcctgttcagcgtggaggataacttccccatgacccaggcgggcgtgcataacctcaagaacatcagcgaggagttcggctgcactatcatcagctgcaagcccaacatcaaggtccagaagatcctgatgcgcaaattctttgaaaagtacggcaagcccacctggtatgtggaccgcctgatctacaccttccccctgcacatggcggccaagttcaacacccccatgctctgctacggcgagaacgtcagttttgagtacggcggcaatgccgacaaggagacctactccgccatggaccagatcgagaacggcgtggccgtgggcttccccatggaggaactcatcggcgacggcgtcaccgagaaggacctgagcctgaccctggcccccgacgccgaggaactgaagaaactggatcccttctatatgagctactttgtgccctggaacagctacaagaactaccagatcgccaaggcccacggtttccacgacctgacccacgagtgggaccgcacccatcacgctgagaacttcgaccagatcgactcccgcgcctacctggtgcattcctggctgaagtatcccaagttcggccatgcggcggccaccgactacaccgcccgctatatccgctacggcctgatgacccgcgaggaagccatccccatcatcaaggagcgggacggcaagctggaccccctgtgcgtccgggatttctgtgagttctgcggctacaccgagagcgagttctgggccatcatggacaagttctacaaccgtgacctgttcgagaagaacgagtacggcgagtgggaactgaaagaccccatctggaagcagggctgagccggccatgctgatccagaccggtatgcgcaccgatattccggctttttacagccgctggtttctcaaccggctcaaagccgggtatgtgctggtgcgcaatccctatgacccgtcgtcggtgacaaggtacagcctttcccccgacgtggtcgatctgatcggcttctgtaccaaaaatcctgccccaatgctgccccacctggacgctctgcgcgtctttgcggggcagtattggtttgtgaccatcaccccctacggtactgacattgagccaaacgttccgtccaaggaacaggtcctgcgggatttccgcaccctgtcccgggcggtgggggtgtcgtcggtaggttggcggtacgacccgattattgtcaatgacgattatcccgtggagcggcacctggaagaatttgaacggatggccgcggcattggaaggctataccgccacctgtgtcatcagcttccttgacctttaccgcaaggtgcgggtgaattttcccgaggcaagagctgtcacccgagaggagcgcatcctgctggggcgggaaatggcagttgcggcccgtgctcacggcatgaccctcaaggcttgcggcgagggaaacgagctggcgccctacggtgtggactgttccggctgcatgactgtcgaaacttacgagaaagccctggggatggagctgcatgtccccaagcgcaaaaatatccgtacggaatgtgcctgctatctcagcggtgatattggcgcctacgacagctgcggccacctctgccggtattgctatgccaatgccgaccctgccgccgtccgccgcaatctccgcgcccatgacccggactctccgtttctgatcgggggaccgcggccgggggatgtcatccaccaggccaggcaggagagctggttggagtatcagctgcatttctgatagggaggtatcctgtttgttgtacaggaaaacgacgatgcaacggcatccggtaaacctgtgtgccaacgcgctggcgttggctctggtggccgggctgccgctgttcatgcccaatggctatgtgaggctgccggaagagaaattccgctatttgtgggcgtgtgtggcattgggggccgtggtgctggcggcggcttttgtagtgggccgcgaccggcgccgggaacggcggcggtttgagctgtcctggctctggccggtggggctgtgtttgtgctataccgtggcctggctgtttgccgaggaccggtacaccgcattgtggggcatttctcagcggaaaaacggcctgatgctgtatctggcctgcacggcagcctttctgatgattgcggtactgagcggccgggaacttgcggacgctgtggaaaagaccctgctggctacgggctgtgccgtcaccgcgctgagctggatgaacgactggatgctggacccgctggacgcctattatacctttctgccggagaccggtgaccgctttctcggtactatcgggaacatcaacttctttggagcgtttctctgcctgtgcgtgccttttgcggtgtggcggtatctgtacggaccgaagtccggcatggcggggcgctatgccgtggcgctgctgctgtgcagcggactgatcgcggcaggcagcgacgccgcatggctgggctgcgccgcagcggtatttttgatctgccagaacaaaaaaacgaccacccgcaacctgtcccgcctgtttggcctgggcgcaggcctggctctgtgggggctggggaccgggctgctgacaaatttctttcctctgcgcagtgagccgcgcaccctttcagcgcttttgtgcatgcctgctgcggcgctggtgcttgcggtggcttttgccatggcggcatggggactgcaccgtgtgcgggaacgcccggcagctctggcggtgcgcgtcgcgggaggaatcgcggtggctgctgccgcggcggcttttctggcggccaatttgctgccggaatgtcccggttttctgaccgccctgcactttgacgaaggctgggcggccaaccgcggctatgcgtggcatcgcctttgggtcgtctataccgaggacaccacgttgttccaaaagctgtttggcctgggcggggacgccgttgcccagcgcctgaacccggacctggaatccacctattacatgatcctcctcaatggggagacctttgactcggcacacaacgagtttttgcagcacttggtctgcggcggcgtgtttggcctggtttgctggtgcggatttttggcggcggccgtgtggaaggggctgaaaaacaatccgcctttgggggcggccgtggcggcatatgcggtgcagtcttttttcagcatcagcatgccgggtgtgttcccgttggtttttgtgctggcagccctggccggtgagagtagaaaaacttccggctcggtgaaagaattggtgccctgcacggccttgatcgccttctcagcggcctttttgctcaactttttttgacgatttgtactttgttattacaaatggtatttttttgaacaaaaatacaacaaaagactaaaaatgttattgacgaagacaggaaacagaggtagaatcaaaacggttattgattcggcagaaaatcaaggattttctgtttgattgaaagagaaagggtgtatcgtaagtgaaactgaaaaagattatgtccgttgttgcggcggcgactttggcggctgcgctgtgtgtccctgcatttgcagcagaagaagctactcccggcgaagcggcccagggaaaggccagcgaggttgttgaggcgatccagagcggagatactgaggcagtcaagactgccatgaaagaaatgaccgatagactgcaggatgagaaagttaccgtttctccgcagatgcataatgccggcctggcctactatgattacatggagtcgatcggtgcggttacaagaaaagacctgagcgacgaggtctccatccgcaacaccaacggcgatactgttacgctgaacagctgcaccatcgatgctgcagccaacacggttacggtggatatcgatgcgactgttgccgacgtggaggatggctattccgtgaccatcgacctgccttccaatatgaccgctacctatctgaaggtctccatgatcaatgagtcgaccaaccagcccaatgactccgttgcggtggttcgttctgctggcggccagaagtatgtgtctttctgggtcccccacttcaccacctatcagctgaccccgatttccgtggagcagccttcccagggcaacaacaccgtcaaggatgagcatcccgaaatcggcgaggccattgccaacggcacctggggcaaggacgacaatgcaacttccacctccggcacctctgctgtgaccgagaatcccatcaagaagaccggcaccgagatgagcgttgttctgtttaccgtgacggttctggctgccgttgccgtgggcggtgtcagcgttgctgtcaacaagtcccgcaagggtgaataatccgacaaaaacatggatgtgaggaaactttgcaaatgaggaaacagcattccaactttgcagcgtccaagcagaaaaagaccaaggggaagaagctgattcttccccttgtttttgctatggcggcgctggttgttttgatcgcgattctctggtcggtgtcgagttcgtttcgcccggcggcagcggattcgggactgtccgatgaaccggatatccctctgatggccacggcggagccgactccgcaggcgacccaggaaccggaatttgaagagttcaccacctatcccgaagcaggggattacctgggacatctgaccgtaagcggcacggcggtggactgtgacgtgtactacggtgacagcgaaaccgagttccaaaaaggtgcgggtacctacaagggggcgaaaattcccggcgaaggtggtacaatcttaatgggagcgcacaccaatacctatttccgcgactttgaaagcgcggaggtcggtgcggatgtgaccctggtcacttcctacggggagtatcattatgtgatcaccgacatgaaggtggccaccgacacggataccaccgcctatgatctggacgccgatgaggaaaacctgatcatgtatacctgctatccctttggtaccatggaatatacggacgaacgcttctttgtctactgtgactatgtcagcggccctgaaatcgagccgccgcagcaatgaaacggcagcagtccctgctgacggcggtacaggggctggggatcgtctgcggctgtttgctggcgcttctgacggctttgagcctgaccctgttccgggaaggtttttacctgcatgagctggagcagagcggctgcctgcaggtgatttacgacaatgttcagcagggcgcccggaccgttgccgaggcggcagggctgcgcggagatattctggaagaactggtcacgccggagcaggtccgtgttgcggtgatccgccgtgcggatgtatattggaaagggtcctccgaacagccggacagcccttacgccgatgcggtcgcttacctggaagataccatcaccgcggaaaccggggaaatgtgggaccaggatgatgcaaatctgtataaaaacatccagctgatctgcgatgatatgtggcgcaccaatgcggtgccgcccatgtccaatctgctgaacctgctgatgcagtaccggcggatcgcctgggcactgatggccctgatggcggcatcgctgatcgcctgccgccgcatgatggggacactgtgccgcaacccgcaggatctgtgggatgcggtgtgggggcttggttttggcatcgccgtgggctgtgccctgacaatggcagtgatcgctctctctggctggcagggctggatgccggataccgacccggcgtatggattgtatctggaatggatgggcgcgctgggaccggtcattgcggcctgcggtgccggtctggccggcctggtgtggggcaccggactgaaagcctatggcctggcccatggtctgtaccggaaccccaaacgtgtacagtctaaaacgtcccataagggcgcagcacaataagaaagaagggcgtacaacatgcaaaccaaacctgttctgatccgcggcggccgggtccatgacgcggtccatcccgaaccgcaatctgtcgatgtcctgctcaaagacggcaagatcgccgccatgggcgccgacctcgacgtccccgagggctgcgaagtcgtggatgcctccgggctggatgtgttccccggctttgtggatgcccacagccacatcggtctggacggctccggcatcggctacgagggccgggactacaacgagatgaacgatatctggaccccgcacctgcgggccattgacggcatcaacccccgggaccccagctttgcggcggcccgcaatgccggcgtgacctgtgtctgcaccggcccgggcagcgccaacgtgttgggcggcaccttcgttgccctcaaaacggtgggcgagcgggtggacaacatggtggtcaaagaccccgttgccatgaagtgcgcctttggcgagaaccccaagcgggtctacaaggataagtttgattccacccgcatgtccacggcggcctacctgcggggcgccctggcggcggcccgggattacggcgcccgcaagcaggcggccaatggggacgtcaccaagatgcccgcctacaaccagaaactggaagccctgctgccggtgctggacggcaccatccccctgaaagcccacgcccatcaggccaacgacatcttcacggcgctgcgcatcgcccatgagttcggtgtgcgcatcactctggagcacgtcaccgagggccacctcatcgtggacgaactggccaaggagaaggacgtgcccatggcggtgggccccaccctgacccatgccagcaagtttgaactgcagaacaagagctgggccacccccggcgtgctggcaaaggctggctgtcatgtgtccatcatcaccgacaactcggtcatcccccagcagtacctgcccctgtgtgccggtatggccatcaaggcgggcatggaccccttcgcggccctgcaggcagtgaccatccacccggcggagcacatcggcgtggccgaccgcgtgggttccctggaggtgggcaaagatgccgacctggtcctcaccgacggctgccccttcgaggtgctgaccaacgtcaaggctgtctatatcgacggcgtgcaggtgacagagcagcaataaaatattcgtaatgcgatataacgcccgcccgggctttcccttgcagagggaaggttccgggcgggcgttttgtgtctcagtaaagaccattgtactgcggggcagggtagtcgatttcataattgcggcacaagtcaagaaacgacttcatcagcggggtcaggtatttgtccttgtgataggcaatgcagaaatgccgccggaaattcaatccctccacccgcacggtggtcacaagcccccgttccagcgggcccaggaccatgcggtacggcagaacggcaatgccaaggccgcagatcaccccgttgaccagagcggttgtgctcatggcctcccagacgggatggatgctcagcccggcggcttccacaatgcgctcgaactcctcgcgggtaccgctgccgcgctcccgcaggagaaaattctgcccggcaaattcctgcagggacaagacctggttgggacgaaaacttccgtcattgggacagataacggtcagggcatcgctcatgtactcttccgaacggatcaccgaactgcggggatgcccttccatcaaggcaaagtcgatgcggttttccagaagattttcttccagaagctgggatggctgaatgacggcttgtaccgacacaccgggattgagcccgcggaacgttttgacgtagtagggcagaaactgcgccccgatggtgatgctggcgcctacccgcagcagcccgaacttgtcgccgtcccgcagctcccgctccatgtcgtcaaacagggaggagatgtgcagcgcatagtcccggaaccggcggccggtctcggtaaggaccagtctgcgcccgatgcggtcaaacagcaccacgccgtaatgggcctccagctcccggatcgccaggctgaccgccggctgggcaagatgcaggtgctcggccgcatgagtggtattgcagccgcagttgcacacggcaaggaaaatccggatatgtcgtatcgtcatgaaaatgcctcttatataaaaaacaatatgaaattaataaaataatagtatttttaatatgaaaaatcaagccgtatactgagggtgcaaaggaggtatgcgggttgaatcagacaacacataaatatcggacattgtttttatcggctttgcagctgagcacatttacctttggcggtggctttgtcatcattccgctgatgcgcaaaaagtttgtggaaaagctgcactggatcgacgaacaagaaatgatggattacaccgccattgcccagtcgtcaccgggagccattgcggtaaatgcggccattctggtagggtatcgggtggccggtgtggcgggggcgttgatcacggtactggggacagtgctgcctcccctcaccattttgtcggtgatttccttcttctacgcggcgttccgggccaatcccattgtcaacatggccatggcgggcatggcggccggtgtggcggcggtgatctgcgatgtagtcgttaccatgggagccggtgttttgcagcagcacagggtcctgccggtccttgttatgatgggatcatttgcggcgtcctgcttctttggggtgaacgttgtgatcatcattctggtctgcggcaccatcggtgcgctggataccattcgtcttgagcggcgggaacgccggaaggagggggcgtgacatgatatatctgcagcttttgtggagctttttccagatcgggctgttcagcatcggcggcggctatgccaccatgcccctgattcagcatcaggtggtggagctgcacggctggctcaccatgacccagttctcggatatcatcaccatctcccagatgactcccggccctattgcgatcaactccgctactttcgtgggcattcaggtggcgggcatccccggtgcgctggtggctaccctggggtgcgtgattccgtcctgcatcatcgtcaccacgctggcctatgtgtactaccgttacaaaggcctgaccatggtgcagggggttctggccgggttgcggccggctgtggtggcaatgatcgcatcttcgggagtgtccctgattctgctggcgttctacggaaccaacagccttccggctgattttacactcattgactggcgtgcggtgctggtttttgctgcggcgttctttgttttgcgccgctggaaaagtgaccccatctgggtcatggccggatgcggtgtggccggggtcgtgctttacagcattggctgaaagtggaaagaggtgtttgtggatgaattatcagatcaaagcgggcgttctgtacaaagcagaggatcagcgcaagcttgcctggatcaaaccgaatctgtacgggcaggagaaaaaaatctacgctcccgacgatactttgctggtgacagccggagtctgccgtatggatgatacggacccgaacgatgaggatgtgcgcaccaaggagtatgttttgcggggagcggatggcggccggtatgcggtcggccggcctcagtatgcagagggagaggatccctcggaaacagggtggccggtctgccggatgccccgggtcgaccatgcggcactgtggtttgacggcgtcgactatgagctgcggatggataacgagcagaattacagcctggtggatgccggtggccggacctgcgtgcagatcgtgcacaggggactggccggaggctggaaggtatggacatggcggtctatgccggcggcgtttttgtgcggactctttgttttttgtcggtacctggaaaaggaaaacgagttcattgtggtgtgaacggaaacggcgttccggagtacaaactccccttgcaacccgcccaaacctgtgctataatacccgctatacggcaaggacgccgcccgaaagagggaaaaactctcttccgggcggcgttttgtttttgccctgccgggtaagaaacaggaacaaccacagctgccgattgggaggataccgccatggaaaagctgccccgttacgttaccattgattatgccaaatatgccccggatattccggaggaccagctggagacctactacggcttgccccggaaagtgcagttttgcaaggaatgcgtcatgagcaaccagaagcccaactcctgctatgagtttgagcacaccatccactccatcaaaaaaacgatggtcattcaggaggacggcgtctgcgatgcctgccacgcctgccacaacaaggcaaacggcaacatcgactgggccctgcgggagaaggaactgcgggaactgtgcgaccagtaccgcaaaaacgacggcagctacgactgcctggtccccgggtccggcggcaaggacagcttttacgcggcccatctgctcaagtacaagtacggcatgcatcccctcaccgtgacctgggcaccccacatctacaccccctggggctgggaaaatatgcaggcctggatccatgcgggctttgacaactacctctgcacccccaacggcatgactcaccgtctgctcactcgcctggcaacagaaaacctgttccaccccttccagcccttcatcctgggccagaagcagctggcccccaagatggccgccaagttcggcatccctctggtgttctacggcgagaatgaggccgagttcggcaaccccatcgccgacaacaactccgccctgcgggacgagcacttctttgccgtcaacgactatgatcacatctacttgggcggcgtgagcctgcgccagctggaggaggactacaagatcgacaaggccgatctggccatctatctgccttccgagacctctaacctggagaaaaaccacgtccaggtccgctacctgggctactatgagaagtggcatccccagggagcctactattatagcgtggagcacggcggcttccgtccggcccccgagcgcacccagggcacctactccaagtacaactccatcgacgacaagatcgacgatttcttctactacaccacctatatcaagtacggcatcggccgcaccacctacgacgccgcccaggagatccgcaacggcgagatcactctggaggagggcaaggcgctgtgcaagaagttcgacggcgagtaccccgaccgcttcgagaaggaaatcatgcagtacctgtccattgacaagcagcacttcccctgggccagccagctgttcgagcagcccaagatggaccgggagtacttcatgcatctggctgaccgcttccgttcgccccatctgtggaagtacgaggacggcatctggaagctgcgccacaccccctacgagggcgacagcgaggtgctgtggggagaccccaaaggcacccatcacgaaatgtaaggaggcggcagtatgtcgaaaaagatccgcctgatcgcccggttggacgtcaaggacgaaaacctcgtcaagggcattcagctggaaggcctgcgcaagctgggcgaccccaacgcctttgcccgcaaatactacgagcagggcatcgacgagctgctctatattgacattgttgccagcctgtacaaccgcaataatctgtcggacattgtgcgccgcacggtggacgacgtctatatccccgtctgtgtgggcggcggccttcgcagcgtggaggacgtccgggccatcctgtccatgggagcagacaaggtggccatcaacacggcggccatcaagcggccggaactgatctcagaggtggcggcggccttcggcagccagtgcatggtgctgtccatccaggccaagcgcagccgcaactgggccggcggctgggaagcctactacgacaacggccgggcccattccggctatgacgtggtggagtgggccaagcgcggcgtggcgctgggagcgggggagatcctgctgaccagtgtggactgcgagggcctgcagcggggtatggacctggaactgattgaagcggtgacccgcgcggtggacgtgccggtcatctgcggcggcggcgtgggctgctgcgacgacattgtggacgcggtgcatgccggggccgatgccgtggcctgcgcggcggtgctgcattatgacaaggaaacggtgccggaactgaaggaaggcctgcgccaggccggtgtggaggtgcgcgcatgaaagttacagtcgttgattacggcctgtccaatttgctcagcgtgacccatgcctttgagcatttcggcgccgaggtggaagtcaccggtgacccggccgctgtgctggcggcggacgccctggtcctgcccggcgtgggagccttccgggacggaatgaaaggcctggaaaagctggacctggtggggccgctgcgggaaaaagccgcccacggcaccccgattctgggtatctgcctggggatgcagatgctttttgacgagtcggaggaattcggctactggccggggctgggactcatccatggccgtgtggtgcgcatcccctccgccgccatggacggcagcccccagcgggtaccccatatcgggtgggaacccctctacccggcgggcggacggatgaacttccacggcaccccattggaagaggtaacaccggggcaggagtgctactttatccactcctatgaggccctgcccaccgccgatgctgaccgcctggccgacaccgtctacggtgaccgccgcatctgcgcggcagtggcccacggcaatgtgtacggcacccagttccaccccgaaaagtcgggacctgtggggctgtccatcattgaggggtatctggagttgtgccggggcagatactgacgccgccgtacaggttgatacgtgtttttatcaggactggtgcttccgggctgcaaatcagccggaacaccggtcctgttttctgtgcgacggcagaaaatggttacaagtgtttgaacattgtggctaaagttgttcagtacgctccgttgctttttcgatacggaatcggtataataaactcggtatgccattttttttgacaacctttttgaatcaatttcccgcggcagaacagacagtccgcggtggttttgcccgcctgcgcggcgggtcatgcaggaaagtgagtgctgcaagtatggcaaacgatcttctggtgggttccaccggttttgtgggaggcaacctggcggcaaagcatgcctttgccgcggcgcgccactcttccgatatcgggcagagctacggcaccaagccggacctctgcgtttatgcaggtatcccggcggctatgtttctggccaacgccgacccggaggccgatctggacgtcatgcgcgacgcgcgggaaaatattcgcgccatcgcgccgaaacagctggtcctggtatcctccatcgcggtctacccggacagccgcggctgcaccgagtccgatctgcccgatccctttgacgcggatctgcccgcctacggccgcaaccggcgtacgctggaattgtgggtgcgggaggatttccccgacgccctcatcgtccgcctgcccgctttgtacggcatcgggctgaaaaagaatttcctgtttgatctgcacaccatcaccccggccatgctccgcaccgaaaaatatgaggaactggccgccaagagcgacctggtagggcaaagctaccgcccggcggacaacggcttttacaagctggacccggcggcggacgccgcggctctgcgggatttctttgaacacaacgatttcaacgctctggcctttaccgacagccgcagccgctaccagttctatgacctgcggcggctgtggtcggacattgagacggctctggccaacaagctgacccttgtaaacctgacaccgcctcccgtctcggcggcggaagtttacaccgcggtgaccggccgcaccgactggaaaaacgaactgtcccgcccgccctttgactacgacttgcgcagcgagcacgcggcgctgctggggggcgcggagggttacctttgcacccgggccgaggaactggacggcatctgccgttttatgcaggaatggaggcattgaccaatggcggacaccatccggctgagcatcagcaacattgcatgggataaagccgacgacgaggcagtctacaccgaaatgcaggcccacggctttaccgggctggagctggcccccacccgcattttcccggaagcgccctatgagcagctttcctccgccgcgctgttcggcggatacctgaaaaaccgctggggcttttcggtccccagcatccagagcatctggtacgggcagaccggcagcattttcgacgccgcccaggccgatgaactgctggaatacaccgagggcgcctaccagtttgcccacgtgctcaactgccccagcctggtgtttggctgccccaaaaaccgcaccctgccggaaggcaccgaccccgccgcgggggacgccctctttgaccgggcaggcaccctggcggcccgctacggtgtgcgcctggccgtggaggccaatccgcccgtctacaccaactacctgacccgcacggcggatgcctttgcgctggtcaaacggctgtccaatcccgggctggccgtcaatctggacctgtccaccatcctgactaacggcgaacggctgcgggattttgccgctgacctggcctgggtcagccatgtgcacatcagcgagccgggcctggaaccggtccgccgtcgccctgaacacgccgaactggccgccatgctccatgccgtgggctaccgtggctttgtctcggtggagatgcgccgtgcgcctctcgacgatgtgcgccgtgccattgaggacattgcggaggtgtttgcatgaatactgccacagtgaaacacatttccggcgtgccggactatgagatctgcgaacttgcgccccgccgcggggcgtactgcctgctcatccccgtcatcaacgagggtgcccgcatcctgaccgagctgggccgcgcccagcgggcgggcatcgacaaggtctgcgatattgtgatctgcgacggcggctccaccgatggcagcatgaaccccgacaccctggcgctgtacggcgtcaatacgctgctgaccaagaccggccccggcaagcagggagcccagctgcgcatgggcatccactatgccctcaagcgggggtatgaaggcatcctgaccatcgacggcaacaacaaggactccattgaggatgtgcccaagttcatcgccaagctgaaagagggctatgacctggtccagggcagccgctttgtcaaggacggccatgccgtcaatacccccaaatcccgctacttcgcggtgcggctcatccacgcgccggtcatcagcctggcggcccatcagtggttcaccgacaccaccaacgcctaccgggcatacagccgcgcctacctgacccatccccaggtcaagcccctgcgggatgtttttgccgggtatgaactgctggcttacctcagcgtccgcgccacccagctgggcctcaaggcctgcgaggtccccgtgacccgcgcctacccggccaccggcgccacccccaccaaaatcagcggcttcaagggcaacagcgacctgctcaagatcctgtttgccacgctggcgggaaagtacaatccgtaacgcgaatgaggagtggaatatgatagataagttgaggggcaaacttttaccttggcagaaaatggttctggggttttgtgcgattgtcttatgtacatggctttttcacctgtatacaacgccggaagcacgtgcatggcagaatgattctgaagctcttgtgtgggggaaaattcttaggttggaaacgggtgtgcaaaataaagaagagctttttttcttgggggcttattattgtgacggaattttgattgtaaatcaagatgcctttgcaacgggagttgctccggacagcgcaacctacggtgtatataaaaaccaatctggagctcaggctatatttttcttcttttttgcggaaatttttagatggataggaattgacggatatcatataacacgcttgctttggatactgaacaccagtatatttgttttgtgctttttgcagttgtgtagatggattacaagagaatgggggaaattcccggcggtattgattctttcgcttctggcggtatcgtactggctgacattgagcgtgtctaatttgtactgggttacatggacgatgcttttgccaatgacgattacggcttgttggtgttcagaaagtttagatgcgaaatcgacaaagtatttggtgtttttgggagtggcattccttttccgttttatgtgcggatttgaattcgtttcaactgttatgctttgtagtgaagttccggttgcatatagttatattagagatttttctatgccggaaaaacgcagaaagtatttccgtatagcggtggctgtggggacgattgcaatgctgatgtttatatttgcattaggaatttggtttgtgcaattgtgtttttgtgagggctggcattcagctcttgagaaaatatttgaaacaatagctaagcgaactggattttttgaagatcgggcggaaatacaggaggtattcaaagaaagcctagaaatcaatagattccaggtggtggcaatgtactttcagagcgaaaaaatgtgggggatttttggaattaaagaactggttctggcggaagtggtgctaaaagcggtgtgttgcctaaaaaatcgtgcttcactccgttctgttccgcaggaactctttgtgcttcttttttcggctctggcacccatctcgtggttctttttggcatctggacatgcgtatattcacacacatattgatcatttgctttggcttttcccttttgttccgatttgcctggcatatattgggaaaaatgcggtggaaattatgaaaaacttcgaagtaaaacaaagaccttctttagaggggtaaaaatcaatgatttacgataagatcatcctcggcgcgggcctgtacggcctgtatgcggcgctgcagtgcggacgccggggccagcgtgtgctggtctttgagcgggacgctgcaccttttatgcgtgcgacctacatcaatcaggcgcgggtgcacatggggtatcactatccccgcagctactccaccgccatcaagagcgcccattactttgagcgcttctgcaaggattacggtttctgcctgcgcaccgattttgaccagatctacgccaccagcgcccacttttcctggacaaacgccgccgagttccgccgcttctgcaacgctgcgggcatccgctgcgacggtgtggacccggaaaaatacttcaatcccggcatgtgcgacggcgctttcctgaccaccgagtacacctacgacgcccaggtcctgaaagactggttcctgaaggaactgaagcaatgtcccactgtggagatccgctacgaacacccggtggagcgcatcgaaaagggaagcgacacctggcgtatcacggcaggaggcgacgtggccgaggctccctttgtcctcaacgccacctacgcgggggtcaacgacattcacgccatggcgggctttgaacctttcaagatcaagtatgagctgtgcgagatcattctgtgcgaggtggacaagcggctgtacaataccggcatcaccgtcatggacggcccctttttcagcctgatgcccttcgggcagacgggcctgcacagcctgaccagcgtgaccttcaccccccacgagaccagctatgacacggtggcgaccttcccctgccaggcgcgcagcgagggtcattgccgtccgggcagcctgtacaactgcaacgaatgccccgcaaaacccaaaagtgcctggccctacatggggcagctggcccgcaagtacctgcgggaggaatacggctttacctacaaaggcagcctgttcagcatgaaaccgattttgaaagccagcgagatcgacgactcccgccccaccgtggtgcgcaggatgtccgacacgccggtcttttacagcgtgctttccggcaagatcaatacggtatacgatttggatgaggtgctggcgcaatgacaacaaacaaggaaaaaaactttatctccgcggtggtctatctgcacaatgacggcgtgcgcgcggtcaagttcttcaagatgctgaccgagcagctggatgcccactttgagcagtatgagctcattgcggtggacgacgcctgcaccgacgacaccatccctatgctgcgggactgggccaaggacctggacaaacccctgaccttcctgcacatgagcctgttccagcgcctggaaccctgcatgaacgcggggctggacgcttccatcggcgactatgtctatgagttcgacaccaccgacgtgccttacccggcggatatgatctttgccgcctaccagacggccatgaccggcagcgacatcgtctcggtctgccccagccgcaccagcggcaccagccggctgttctacggggtgttcaatgccaattcccactccgcctaccggctgcgcaccgacgccttccgcctggtctcacgccgtgccgtcaaccgggtgcacgcttccagcgagcatctgccttaccgcaaggcggcctatgcagcctccggcctgaaaatgaccgacctgacctttgaagggcgcatcatggaccggggcgcggggcgtctcagccttgcagcggacagccttgccctttacaccgacgcaggcttcaagctcagcgccggggtgacgatggtcatgatggttctggccctggccgagctggtctacaccctggtcatctttgccaccggccaccccatcgagggctggaccaccatgatgtttgtcctgaccctgggctttgccggcgtctttgcggtgctggccatcatcgtcaagtatctgtccctgctggtggaactgattttcaaaaagcagaagtaccttatcgagagcgtggaaaagatccagaaataatggccttaccggccgggaaaggagggcattgcgcccatgggatctaccaacaaaggacggctgcactgcccccgcctgccggaactttccgcccgcggcttctggctgtgcgtggcggccgttgtgctggtcaaatgtgtgctgacctccttccagatggcatatacctgggtggggggcgcgcctctggacgatgaactgatgttccgtgccgccaacgccatctccagtggggagtggctgggagcctacgactacctgactctctccaagagcatgtttttcgcggtatggctggcctttctgaatgttctgcacctgccctatcttgtgtcggggcagtttttgtggtgcgccgcgtcgctgctggcggcgctggccttccggccctggctgcgtcatgccggacggggccgctgggcggagtttgccgcgtttgcggtgctggccttcaacccggcatccaccgccgcctacaccctgcgggtctaccgggataacatcttcccggccctctgcctgatctgcttcgcgggcttctgcggggcattgctgcgggcgattttcacaccggatacccggcgctggccctggctgctggcggcgggggctgggctggtcaccggctatctggaccgggaggacgcagggctgtttcttttgccctttgccgccctggctacagtggccctggtctggctgaccctgcgggaccgccgcccggtccgtctggcggcgctggtgctgccctttgtcatgctgggtgcaggaattctgaccttctgcgggctgaaccagcactactacggcgtctttgccctgtccgacttctccaccggcagctttgccgatgccatgggcgccatggcccgggtggaggcccccgaaggctacacccctctggtggcggtgaccaagggcacccgggaactgctgtatgagaacgtccccgagctggccccactggaatactggctggaggaggacccccagctgcaaaacgacttccgcgacccggacctggacgactatcgggcgggcagtttttactgggccatccgccgcgctgcccagtttgagggcctttatgacaccgcccaggaagcggaggaatactgggcctcggtggcggagcgcatcaatgccctgtgcgacgacggcaccctgccttcctggacaggggagcgcagcagcaccaccccgcccatccgctccgaacacgtgctgcccgttttggcggaaagcgccaagggggcgctctgggcgctgaccttccaggactgccagccctatgaagaactgcgttccatcggcactgaggaggactttgcccagtggtcgtcctacctgaactgccatttcaacggcgcggcggaggccggcaaggacaccccctattacagcccctatcagaagatcgtgttcggctttttgcagggcgtgcgctatgtgtatgccgctctgctgcccctgtgctttctatacgcactgtatttgcaaatcaaaaaaatacccgctgtattcaaatcgaggaaaacagaaaccctgctgccctgggcgctcttgctggtgcttttgggcatggcggcactgcgctgcgccatgatcgcctttgtggaggtctccagctttggcatcggtacctccaccatgtatctggccacggtgcacccgctgctgctgctctacaccgcggcagcgatcctgaccgaaaggaggtccggccatggcaacgcctgatctgctcattgtaggcggcggcgccgccggactcatggccgccggggccgccgcggcgcggggactttccgtcgccgtgctggagcacaaccccaaaggcccgggccagaaactgctcatcaccggcaagggccggtgcaacctgaccaacgactgcgacgtgcaggaatttctgccttttgtccgccgcaatcctaggtttctctattcggcgctgtatgccttcccgcctgcagcggccatggaactgtttgaatccctgggggtccccctcaagaccgagcggggccgccgggtctttccccagagcgaccgcgctgccgacgtgctggaggccctgcgccgctatgctgctgacgcccggatgatccacggctccgcccgccgcctttgcatcgaggacggccgctgcaccggtgtggagacttccgatggccgcatcctgtccgcaaaggctgttttggtggccacggggggcgtcagctacccggtcaccggcagcgacggcagcggttacaagctggcccgccaggcgggccaccgcatcgtcaccccccagcccagcctgtgcagcctggtctccccggacccggcctgccgcaaaatgatggggctgtccctgcgcaacgtccgcctgactctgctggaggacggccgccctgtcttttcggagcagggggaggcactgttcacccatttcggactgtcggggccgctggtgctgtcggcgtccacctggatcaccgactttgcccgccatcgttatgtctgcgagttcgacctcaagccggcgctggatgaaaagaccctctacgaccgcctgacccgggactttgccgccctggggggacacagcgcccagggggctctggaaaagctgctgccccggtccatgcgccccgtggcggtggaaaagtggggcgtggaccctgccgcccgggcggcccagatcaccaaggcccagaaacaggctctggtggagctgtgcaagcactggcaggtaccggtcacccagctgggggacctgcagcacgccgtggtcacggcggggggagtggactgcgcccaggtcaatccccgcaccatggagagcaagctctgttccgggctttactttgccggggaagtgctggacgtggacgcccggacgggcggctacaacctgcagatcgcctgggcaacggcacaggctgcggcccgcgccgccgcaaatgcataacaccgccctgcggtatggaataaaggagtaagaaatatggtttcggttgcgatcgacggcccgtccggagcgggcaaatccagcatggccaggcgtctggccgccgagctgggctatacgtatgtggataccggcgcaatgtaccgcgccgtgggcctgtacgccctgcgtgcgggcaaggaccctgccgacaacgcagcggtggaggcactgctgccccaggttcacctggacatcctgctcaaggacggcacccagcatgtgctgctcaacggggaggacgtctccgctgccatccgcgccgaggaggtgggcatggcggcctccgcggtgggggcaaactctgccgtgcgcgccttcctgctggacacccagcgtgccctggccaagagccgggacgtgctcatggacggccgggacatcggcacggtggtgctgcccgacgcaacggtcaagatcttcctgaccgccagccccgaagcccgggcacagcgccgctttgccgagctgcaggccaagggggagcaggccgactttgagacggtgctggccgacatccgccgccgggacgatcaggatacccatcgtgccgccgcgccgctgcgtcaggcggaagatgccgtgctggtggacaccagcgagctggacattgaacagagctttgccctgctcaagaacaccatcctcgaccgcatcggttgagccgccgcagaaagggaagtataagagaggtacgaacatggtactatattggatcctgctgcccatcgtctgggtgatctggcatgtcctgtggcgcatccgggtggtcggcagcgaaaacctgatccgcggccggggctttgtcatcgcccccaaccacatctccgacctggacccggtctttgtggccatctcggtgtttaccttccatcgcatgtgcatcctcgccaaggaggagctgttccataactggttcatcggctggtttctgcgcaatatgggcgcagtgcccatcgcccggggcaagggcgataccaacacagtggggcaggtgaccgagcaggtcagcgccgggcgcggcctgctgatcttccccgagggcacccgtaccaaggacggcaagatcggcgtcatcaagagcggcgcctttgtggtggcgggccaggccggggtggatatgatcccctgccgcatcatctacgataccaaggacggccgccagcatctgttctgccgggtgcggatctgcttcggtgagcccatccccgctgcggacctgaaaattcaggacccgcgccattccatgtctcagctgcgcaccctgaaaaatcgtctgcgcgactgctgggaagatctgtacgagcaaaataaattctgagtccttccggttttttacccgccgcctgtatgagagggcgggcaaaggaccatactgatcgacgaatgcacggaggtgcaaacagccatggagatccgccttgccaagacggccggtttttgcttcggcgtcaaccgcgcggtcaagctgacctatgaactgctggaccagggccgcaaggtcgccaccctggggccgctgatccataacccccaggtggtggaggacctgcgcagccgcggtgccgtgacctgcgacgatgtggacgacgtccccgacgggtacgaggtggtcatccgcagccacggcgtcggtgaaaacgtttacgagaaaatccgaacacgcggcctggcgtttcatgatgccacttgtccttttgttgcaaaaatccatacgattgctgccgaagcgggcaaaaacggtgcgattttgctcgtggcgggggacagcgaacaccccgaagtacagggaattgtaggccatgcaacggggcctgtggtggtttttgcggggctttccgagctggaagagtgggcgtcgcaaaacgagccacaaaagtccatatatgcggtggctcagaccacttttcgggtggaaagctgggaagcctgcaagtcttttctaaaaaaatggtgtacaaatcccaaaatatttgatacaatatgtagtgcaacgtggacgaggcagcaggaagcggaagacctcagccaaaaatgcgatcatatggtcgtcattggcggtcatcattcttccaatacccaaaagctgttgcaggtcgccgccaggcacaccaatgccgtcagcatcgagacagccgcagagctggaccgcagctggctgcggggtgcaaaggtggtgggcgtgacagccggggcttcaacgccttcgtctataattgaggaggtacttaactgtatgagtgaagaaattcgtgacgacatgagttttgccgagatgctggaggcctctgaggcaaagcccctgtttgctggtaaaatcgtgaaagccaaagtcatcagcgtcagccccaccgagtgcaccgtcagcgttgacggctccaagcacaccggcgttgtcaagctgagcgagatgtccaacgatccttccgcccgcatggaggatctggtcaaggtcgacgacgagctggatctcgttgtcatcaagaccaacgaccaggaaggcgtcgacaccctgtcccgcgtccgttttgaggcgcagaagggcatgaaggacgtttccgaagcctgcgagaacggcaccgtcatggaaggcgacgttgtcgagtccaacaagggcggcgttgtcgttatggtcaagggcgtccgcgtctttgttccccgcagccaggctaccatgcgccgtgacgaggattacaccaagctggtcggccagcatgtccgccttgtcatcaccgagtgcgccggccgcaagatcgtcggcagcatcaacaaggtcactgccgaggagaacaaggtcaagcgcgaggagttctgggccaatgttgaagttggcaagaagtacaccggcgtggtcaagagcctgaccagctacggcgcctttgttgacatcggcggcgtggacggtctgtgccacatcagcgagctgagctggtccaacatcaagcatccctccgaggtcgtcaatgtcggcgataccatcgaggtttacgtcaagagctacgatcctgagaaccagaaggtttccctcggctacaagaaggaagaggacaacccctgggagcagctcaagaccgagtatcccatcggcagcgagtttgttgctccggtcgtttccatcaccaagttcggtgcgttcgtccgcatcctgcccggtgttgacggcctggtccacatcagcgagatcagcaacgagcgcgtcaacaaggtcagcgatgtcctgaaggttggcgacgaggtcaaggtcaagctgatcgacgtcgacttcgaccgtaagcgcatcagcctgtccatgaaggcttgcctcaatgaggaagctgagggcgaggagaccgacgccgagtaatcgagcgctgtccccggactgttcgtaacacagacggagcctgcctggcaaacaggcaggctccgttttctgttgccgtcactttttgagcgccgcacctgccgcggcggggaatccgatctgttatggaaaaaatcaaagccatcattgaaaagtactacgagcagctggcctacctggtattcggcgggctggccaccctgctcaacctggtgatcttcgccgtcaaccagatcgtctttggtgtggattttgccaccggactgggcaacatcatcgacaacatcatctgcatcctgtttgcctactggaccaaccgaaccttcgtgttcaaaagccagaacaagggtgccagctccctgcgggagttcggtgagttcatcttcttccgcctggtgacgctgcttatggaccaggccatcatctggctgggtgtcagcatcgtcggtcccatgatcggctttgccagcgataccgccggtctgtggcccatgggcgtcaagctgttcagccaggtggtcgtcattctctccaactacgtattttccaaggtgttcatcttcaaaaagaaaaactgatcacggacatcgtccgggaaaggagaacattgccatgagaaaagtacggggtaagggcctgcgcatcgcaggtctggtgctgggcatcgtgggcattgtgacgtcggtgacggcggtcattctgtctgcctgcggcatgtaccaggcacgcatgtgcaaaaattgcaagaaaggggctgagttccgttgagtcactattccaaggaagaaattctgtccaaagttgaccacacgctgctcaaaccggaagccacctggccgcagatccagaaactctgcgacgaggccatggaataccacaccgcctcggtgtgcatcaacacctgctacgtccgtcaggccgtggagtatatggcgggccgggtgccggtctgctgcgtggtgggcttccctctgggagccatggacaccaagagcaaggcctttgaagccaagaccgccgtggaaaacggtgcggccgaggtggatatggtcatcaacatcggctggctgaaaaacaagcagtacgacgacgtccgcgcagacattgcggcggtcaaggcagctgtgggggacaagatcctcaaggtcatcatcgagacctgcctgctcaccgacgaggaaaaggaaaagatgtgtgacatcgtggtggaggcgggtgccgacttcatcaagaccagcaccggcttttccaccgccggcgcgaccttccacgacatcgagctgtttgcccgctgtgtcaacggccgctgcaagatcaaggcagcgggcggcatttccaccgttgaggatatggagaccttcctcgacctgggcgccgaccgtctgggcaccagccgcgctgtgaacctgctgaccaaataaaaaagccctgtcatgcccggatgggcaacggacaaggctgtcataaagacaaaacaccgcgccccggtactggttctgaaccgtaccggggcgcggtgttcgtttggcagagagccccttgggaggcggggccggaatactgcccgccggaccgagaaaaccggcgggcgggaaatggcttattcgggcaggtagatgtgatggggcaggccctccacgtaaatgggggtcagctcagcctggatcaggggcagggcataggagatgaactcgggcatcatgccggtatggtcggagttaatccattccagggggactttcttttccaggttggcgacctcgctgatggggtgcagctcggtggtgcactggtagggggcgttggagatgcgcttgagggcgaccatctcgccggtgtggccctcaaaggcggccttgaccgcagcgccgcccacctggtaggcctcggtgatgtcggtgcggctggtcagatgcccggcgcagcgctgcagggtggacagctcgatgcagcgggtcttggtgtccaggcggcgggccaccgtgttggccaggaagcgggcagtgccggtcagggctttgtgaccgaaggcgtccaccgcgtgaacgtcgtccgccagctcgcagacatagcggccgtcctccagcttgacgccctccgacacggcaatgacgatgctgggcttttcggcctgcatgcgctccactttctccacaaagtgatccacgttgaagggaatctcgggcaggcagatcatgtccactccctcgcagtcctcggccttggccagggctgccgcggcggtcagccagccggcgttgcggcccatgatctccacgatggtgacgtacttggtgccgtagacggtggcgtcccggatgatctccttcatgaccacgcctatgtacttggcggcgctgccgtagccgggggtgtggtcggtgaccatcaggtcgttgtcgatggtcttgggaacacccataaagcggatgtcgctgcccacgtgctggccgtagtccgccagctttccgatggtgtccatgctgtcgttgccgccgatgtagaagaaatagccgatgttcagctctttcagaatgtcgaacagcttgacatagacggcctcgccctcgggggtgtgccagtcgggcagcttgtagcggcagctgcccagatagctggacggggtgcgcttgagcagctcaatgtccatggcggtcttgaggtcgtcgtccagcacggtccagcggcgctccagcagcccggccacgccgtgcatcatgccgtagaccttgtccgcgccgcggcgcttggcgctttcaaaaacgcctgcaaggctggcgttgatgaccgaggtggggccgccggactgaccgacgattgcgttctttgccataaattcgtcctcctgcctgatgtttgtctggcgtgcggatgccccgtgccggggcggacgacgggcgccatccgtacgatttatcgttgtattgagtgtaacataccctttcggggttgaccattgcggcggttgccgaccggggcggggaagcacaaaatccgggttccgctgggcggaatcctgcccggaaataccgtgccataacaaggaaccaggttccgacatacggaacctccgtgcgaaagcaccaaaggaaagattgcaaaaattgcgaaaatctgtctgtttgatgcattgtgatagaaaaaacgatcatggcggcaaaggcaaaaaaatcccccggagcgggggaatccggctccgggggaaaggatgcggtaaatcagacgttgtccagatggatgtgacggggcacgccgttgatatagatgggggtcagctccgcctggatgaggggacgggcataacgctcgaagtcctcggtgacctgcatgccgtcgggggtgatccactcttcgggcacgcgcttttccaggttggccacctggttcacgtccaccagctcggtggtgacctgatagggctggttggacaggcggcggatggcgcacatgcggccggtctcgcccttggcagcggcttccacagcggcgccgcccacctggtaggcctcggtcacgtcggtgcggctggccagatggctggcgcagcgctgcagggtggagaactcgatggcgcgggtcttgcagcccaggcggacgcggatcaggtcggccaggtaacggctggtgccggacagaatggccttgtggccgaaggcgtccagctggccggcggtggagaccagatcgcacaggaacacgccgtcctggtttttgacgccctcggacacggcgatggtgacgttgtggcgggtggcggtgagctcgctgacgcgggccaggaaagcggcctcgtcaaagcggcgctcgggcagcaggatgatgtcggggccgtcggagtcggtacccttggccagggaagccgcgccggccagccagccggtgtggcgacccatgatctcagccacggtgacgctgcggatgttgtagacgctggcgtcgcagatgacctccttgaggatggtggcgacgtacttggcggcgctgccgtagccgggggtgtggtcggtcagggccaggtcgttgtcgatggtcttgggcacgccgatgaagcggatggggctgttgatggacgcgccgtagccggacagcttggcgatggtatccatgctgtcgttgccgccgatgtagaacaccgcgccgatggcgtgctgctcaaacagctcgaacagcttgcggtaggggcggtcgtccacgctggcttcgggcagcttgaagcggcagctgcccaggaagctggacggcgtgcgcttgagcagctcgatctgcattttgtcggagaaatactggtccaggtccacgaaatggccctgcagaaggccctcgatgccgtactgcatgccgtagacgtggggagcgcccagactcttggccgactcatacacaccggccagactggagttgatgacggcagtcgggccgcccgactgaccgaccagaacgttggttgtccatgccataaggaaattacacctgcctgtttgtattgtttcgccgcggtgacgcggcgcagcaggcacacagaccggggccggtgtgccggaactcaaaagaatgcgggacgatgggtccggtcaaagacccaggataaagcggtcgatggcctcggccacgccgtcgtggttgttgtcggccacaatggcgtcggcggcctgcttgacctccggttcggcgttgcccatggccacgcccagccctgccatgcgcagcatggccagatcgttgtccgagtcgccgcaggccatgacctgatctttggaaaagcccagggtctcggccagggtcagcagagcctgacccttggtcacgccgggagcgttgagctccaggttgcagcccaggctggaggtcgcctccacccggcagcaggaggtcaccgccttccgggcggcgtcccgggtggcgtagtcggcatacaggatgctgaacttttcaatgccgtgggcatgccggcgcataaagtcgtgcatgtcgtccacacccacgcgactctccttcagatagggcagcagggccgggggacagaacttctccagccgttccagattttcggtggaggtataggtcttgccgtcgatgaaaatgctcatggcacattcaaaggggctgagcacatcatagatgcgcatggcctcctcggcgtcaaaggtcagctccaccagacgccgaccggtggccagctcggtcacggtggcgccgttggatgtcagggcgtagcggacgccctgcatgtgcagaaactgttcgggcacgccgctgaccgggcgtcccgtcgcgggcagaacgatgaccccgcggtcgatggccgcacgcatggcagccagtgtgcgcggcgtgatctccttccggtcgtcaaagacggtgccgtccagatccagccccaggatacgaatatcctgcatattctccctcccctgaatcgttccccgtacctgcggggaagcctaccaagattgtagcctattttccgccatattgcaacaaaatccaggtaaaatccgcccgcggtgcggcgccggacaaggtgctgcgggcaatgcgccttttccccggaaccattccggggaaaaggcggaaacaaggcagccctgccgctttggtacggctcgactttaccccggcggcgtggtatcataaaacggtaagagcgcggggagacaccgcgcccggggaggggaaaaacatggcggaacatacggcaaaacgcatctggcagatcgacgccctgcgggggctggcacttctgaacatgctggtctaccacggcatgtacgactgggtctatgtctttgggcggcccagcggctggtatgacatcggctcggcggggtgccatgtgtggcagcagtatatctgctggagttttatcctgctgtcgggggccagtttctgcctgggacgccgccagctgaaaaacggcctggtgacggcggtctgcgccctggtgctcacggcagtcaccgcgctggccatgccgtcggaactcatcctgttcggggtgctgcacttcaatgcctgcgcggtgctgctgtcctgcctgctgcgtccagtgctggaaaagatccccccggccgcgggccttgcgggcagcgcggtgctgtttgcgctgttcaatcagctgccgtgggggttcctcggctttgagggactgcacctggcccgtgtgccggacagtctgtacaaggccaatctcttttggctgggcctgcctgacctgagccgcttttcctcggcggattacttcccgctgctgccctggctgtttttgttctggtgcgggtatttcggctggaaatgtctggtccggtatcatgcggcccccgcggcatcccaagccccggcggcgctgcgcccgctgtgcgccgtgggcagccggacgctgctggtctatatgcttcaccagccggtcctctacggcgtgctgtttggggtgaacgccctgctgggataaggcggaaggtgcgccgcgtgctgcggccctgctgttgagtgaccccggcggaggaactctattgcgctgtctgccgctgtaccgcccttgtcaggcaatggcaaaggcgctataatatgttaaataagcgaaaaaagcgtcgggcaggaccctgccgcggcgaatccatacagagaggatgggccatatgctgatcagtctggtcgtgccctgttataacgaggaagaggcaatgcctctgttctacaaggaagtctgcaaggttgccgagcagatgcgccagagccacggcgccgagttcgagttcatttttgtggatgacggctccaaggacggcaccctgcgggtggcgcgggagctgcatgaccgtgacccccgggtgcggtatgtttccttcagccgcaatttcggcaaggaggcaggcatctacgcggggcttcaggcctccaagggcgattacgtcgccaccatggacgctgatctgcaggacccgcccgcccttttgccccagatgctggacgctctgctgtccggggactgggactgtgccgccacccgccgcaccacccgcaagggggagccgccggtgcgcagctggtttgcccgcaagttttaccagatcatcaaccgcatgggtgagaccgagatcgtggacggcgcccgggatttccgcctgatgagccgccgcatgaccgacgccgtgctggaaatgtcggagtacaaccgcttctccaaaggcattttcagctgggtgggcttccgcaccaagtggttcgattatgagaacatcgagcgtgtggcaggccagaccaagtggaatttctggggtctgttcaagtattccatcgagggcattgtgggcttttccacggcgcccctggtgtttgccgctctgatgggcgtgatcttctgcatcgcggcctttgtgggcattgtgtttgtggtggtgcgtgcgctgctgttcggcgatcccacctccggttggcccagcatgatctgcatcatgctgctgtgcagcggtgttcagctgttctgcctgggtattgtgggcgagtacctgtccaagacctatctggaggtcaagcaccgccccatctatattgcccgggagaccgaggccgaccgcgataagcgctgaccgtttccgttttttttgtttgccatgccgccccgcagctgtgcggatgcgttgaacaggggagaacttctccgttcccgcagccgtgcgtaagtggggcggatgctttttcatttcagctcccgacaaccgcggcggctgccgggcccaaaaaaggaggcttcctcacatcatgcaacaccatgcatctgccgcgacacagggcggcgcagacctgggcagcggcagcgtcggcggtctgctgttccgtctggccatgccggccattgtggcccagctcatcaacgtactgtacaatatggtggaccgtatgtacatcggccacctgccggagatcggcgagaccgcccttaccggcgtcggcgtctgcttcccgctcatcaccgccatctcggcctttgcggcgctggtggccatgggcggcgcaccccgtgcctccatctttctgggcaagggggacaaggagacggcagagaagatcctgggcaactgtgccaccgctctggtggcggtgggcctgatcctgaccgtcgtgttctatctcttcgggtatcagcttttgcagatgttcggcgcctcgccggagaccatcggctattcctgggagtatttcagaatctacctggtgggcaccatctttgtccagatgtctttgggcctcaacgctttcatcaacgcccagggctatgccatggtgggcatgatgaccgtcatcatcggcgcggtgctcaacatcattctggaccccatctttatgttcgcactggatatgggcgtctcgggcgcggcgctggccaccatcctttcccaggcggtgtcggcctgctttacggtgtggttcttgtgcggcaagcgcagctacctgcgcctgcaggtcaagaacctgcgtcccattccccgcatcctgctgcccagcattgccctaggcctttcgccctttgtcatgcagctcaccgagagcgtcatccagatctgcttcaacacccagctgcagatctacggcggtgacgtggcggtgggcgccatgaccatcctgtccagcatcatgcagttctccctgctgcccattcagggactgacccagggcgcacagcccatttccagcttcaacttcggcgccggcaagatcgaccgcgtggtcaagaccttccgggtattgctgctgtcctgcctgatctacgccacggccctatgggcggtgtgtgagtttgcaccccagctggtcatcggcatctttacgccgccggacggctctctgggcgtctataccaagacggcgctgcgcatctacatggccgccagctgcctgttcggcgcgcaggtggcctgccagcagacttttgtggccctgggcaaggcaggcgtcagcctgtttttggccgtgctgcgcaagatcattctgctggtgccgctgattttcctgctgccccgcgtgctgcccatctctcaggacattgccgtctttgcggccgagccggtggcggataccctggcggtcatcaccacctccattatctttggcatctccttcagccggatcgtccgggactggaaagccaaacagaacaccccggtttgatccccaaacggaaaggagtctgccatgccccgtgacctgctgccgattgccgccgtctggctggccgccatgaaccttgccgcgttctgcatgatggggctggacaagacctttgcccgcagacggatgcggcgcatcccggaggcggttctgttcctgcccgcggtgctgggcggtgccgccgggggatgggcgggaatgtatctgttccgccataagacccgccactggtattttgtggcggggatgcccctgctgctggcctgccatgtggtgctgggcctctggctggcgggaatcctgccggtgtgagacgttccccgcacagatttataggcaacatacaaaagcccccgccgggcgaacccggcgggggctttgctgtgcttgctttttaagaaaaatcaggctttgttggcgctgccgaacagctcgatcttctcgcggaccttctccatgatggcgtcggcgccgggcttgagcaacttgcgggggtcgtagcccttgccctgctgatccttgccggcctcgatgtaggcgcgggtagcctcagcaaagacgagctggcaatcggtgttgacgttgatcttgcagacgcccaggctgatggccttctggaccatctcgtcggggatgccggtgccgccgtgcaggaccagaggaatgttgttggtggccttgtggatgcggtccagagcctcgaagtccaggcccttccagttgtcggggtagatgccgtggatgttgccgatgccggcagccaggaagtcaacgcccagagcggtgatgcgggcgcactcctcgggatcggcgatctcgccggaaccgacaacgccgtcctcgacgccgccgatggaaccgacctcggcctcgatggacaggcccttgtcgtgagcgtactcaaccagttccttggtcttggcaacgttctcgtcgatggggtagtgagaaccgtcgaacatgatggaggtgaagccggcatcgatgcaggccttggcgccctcgtaggtgccgtgatccaggtgcagagccacgggaacggtgatgcccaggctctcatccatggcgcggaccatggcggcgacggtcttgaaaccggtcatatacttgccggcgccctcggaaacacccaggatgaccgggctgttcatggcctgagcctggagcaggatgcacttggtccattccaggttgttgatgttgaactgcccgacgccgtaatggccgtcacgagccttgagcagcatattggttgcgtttaccagcataataaaaacctccctgcgatctttgccggaacatgacacagccggccccgtccgcgcaatgcggccgaaaccgtgccgccgtccggcatttggagccaaacggatcgaaaagcgcgtttgtgcgcttgtctggtctcattatatcccggcattgacaaaaaatcaacagctttgctcaggttcgtggggtaaagtttttccggcggcggataagcccttttttgccgggctttttttgcccttccgggacggcttgggctggcctttgggcaggtgggtgcgggcatattcaaagatgtactgctgggcaatgccctccagtcctctggccgcccggggcatgccccgggggaacagccgcgccatggcgcgcttcatccagacgtccatggggcaggcgtccgcaaagcccagcccgtacagcagcacacagtcggccaccttggggccgacgccttttgtggtcatcagaacggcgcgggcctcctggcttttgagggacgccaggagcccggggtcaaggctgccgtcgcatacccggcgggcggcgtccagcaggtagtcgctgcgccagcctgcccgcagtacggccatggtctcgggggtctgggcggccagggcttccggggtggggaaggctctgccgcccccgtccaccggctccccgcacagcagacacagccgctccacgatgccccggatgcggggaatgttgttgttctggctgatgatgaaggtacagagcacctcaaagaagggctggttcaacacccgcagccccggggcggccgccacacaggcagtcagccgtttgctggcggaaaagcggtcctggatggccgcgtaatcggtgtccagggcaaaataatgccgccagaagccatcctcctcccgggggcagaacaggcagagccgccccgcgtcgtccacccgggcggtgacagggcgcccggcggcaatgccgtgccagccgtcctcctgtttttcccagcgaaaacactgtccgctggacagcgtctgatccaggtccattcctcctgcgctgccgatgctgtgccatacgggtgcggtgcacggttccatctgtcgggcctccctgccgccggggagcgctgcggcccgcccggcaaaaattcctgtccgtattatagcatgttttgacgccccgggaagaggtctgtcacctgctgccgtggccttggcgtgcctgtcgaaacggtgggagtaagggggcaaatgggcggaaaaatcggcagtttgccaacttgacacgaaagcttatccactctgttatgttgaaaagttttccacaatttgtgcaaaacggggctgaaaactttcctgcgagagggcaaaaagccgctttgcgggcgggttatcaaccttttccacagggttttcaacatgtggaaaccgcttttccacgtctacggtttgtataaaccctgtttttgaccctgcgcagcctggggaaagctgtcaaaaaacaccggcaaaagggggatggacggtagcaaaaagtgcggaagtgtgatatactactaccgtgtattttatgatgccggtactgtgcgcctttgcgggcgcggagggtgccggtgtagacctgcctgcctgtccgcgaaccacggacggtgccggggcaaaatagagaggatatgccggttttgtccggcatgcgtcggaggaaagaaatggacagatacgaccgcgaccgccgtgaaccgcgccagaaccgcgaaccccgtgaacccagagaaaaccgggaacccatggacacgctgatctacggcaaaaatcccgtggccgaacttttgaagagcggcaagccggtggataccgttctgctggcggacaccatgccggaggcgtcggtggggtattacaccgccctggcgcgccaggcgggagccgtgaccaagcgggtgcctgcgggcaagctgcgccagatgtgcggcggggccgagcaccagggcgtggcggccagagccgcccagatcgagtatgcctcgttggaggacctgctccaggcggcccgccagaaggacgagccgcctttcctggtcctgtgcgacggcatcgaggacccgcataacctgggagccatcatccggtcggccctgctgtgcggcgcccacggcgtggtcattccccgccggggcggcgtgggcgtcagcggcaccgtcatgaaagccagcgccggggcggcggcacgcctgcctgtggcgcgggtgcccaacatggcccaggcggtgcgcacactgaaagaaaacaacgtttttgtatactgtgccgatatgggcggcgaaccgctcagccgcaccgacctttcgggtgcggtggcgctggtcatgggcagcgaaggcagcggcgtcagcgcgctggtgcgcaagctgtgcgacggcgtcgtcagcctggacatggcggcgcgcagcaccggcgtggacagctacaatgtctctgtggcggcgggcatcctgatgtacgatgtcatgcgccgccggtccaacgggtgacagggatacggacggttacacagtaagagggagagaaacacaccatgccaagcaagcggacgaatgattcggtggagcggatcttgcaggagctcaaccagcagcaggaggccaagggaattcgtgacggcgttaccgaacgcaacgtggacgagatcctgcgcagcatcccgcgctccggtgctcatcctgacgacgccaccgtgcagcttgggccgatcccccagagcgaaatgccgaaagttgaggtcagcgccgatgtagccgacccggaatcgcgtttttccacccaggccatcgacgctttgctggccgatctgcccatcttccgcagtgaggaagtggtgcgccatccgtcgtcggcggtcacggcaaagcccgccccggccagacgcaccgcgcccgcggccccggcggcacagcccaagagcagtgcccgccctgcgcagcagtctgcctaccgggaggaaactccggtccagcgcaccgaacctgcgccccggacggaacagaccgtccgcgcgccggaacccgaaccccggcaggatgccggtcaggaccgggaacagcccgagaacacgctgggcgataccacccgcaccggcattatcaaaaacttcctgcgccagatgagcggggaggataccgaggacctttcccagcgcaagaaccagttccagcgcttctttgaggagagcgtcgccgtggtgcccgatgacaagggcaaactgccttccgagaaaaaacggggcaaaaagcgtggcctgttcgggcgcggggacgataccggtgagatcaccgatgaatttgtacccatcaacgtctccatcatgggacggaacaatacccaggaccagcccgaggaacaaccggaggaggacagcgcgtcccgcagagaagccccccgcaaaaagcggggcctgtttggtctgttcggcggacgggatgaatcggaggagatggagccggaaagcgatctgacggcataccccgaggaagaacccgccctccgccaggagccggaagaatctgcgcccatgccggaaccggagccggacatcccggaggagcaaccggaatatcagccgcagccccagccggagccggaacccggaccccagaaatacgtctatcgttccaaatatgcagggacccggcgggtccatggctccctggccgatacactgtcctccctgggactgtaccataccgatgcttcccgcatccgtgcccaggcggacgccgtgcgtaccgatccgacccctgcggccccggtgcgttcgcagcctgccgtccgggaggagacgcctgtgcaggagcagcccgctccggccgaggccttcccgcaggaggaagccccccgcaaaaagcgggacacggtggagttcatgccgggcaaaaagccccatgaaccgccggcagaggaagcacgcacccagaccttccacgccagtgagccggtgggcgagccggtgatgaccccggcggacacgctggcatcgggctttaccgtggatatgtcggaacgggacgagaaagaagatacccaggacttcctgaaatcggtggagcccgccctgccgcggacgcagcgggcaggggacaccgcccgctcccgcacggcggcccggaccgacccggccatgaccgcggagcagccttccctcgaccacaccatgaccggtcaggtcaagctggatctggcgtcggaggccacccggccggtggaccgcaccatgacgggtcaggtgcgcctggatgctcccgcccagcccagcgatacccgtgatttcgacctggatatcctgggcccccagatcgaggaaaagcccaacaccgaacagtttgtgcgcggcattgcccagaccctgaatgccgggctggataccgcacaggaggagacgacctccgaccgctatgcggaagccgccgcccgcctgacagcacaggagccggacgacgagaccgagcagccccgcaaaaagcgcggccgcatgcggtttgcaggcaatgccgacgatgagcacgagggcggagagtccggcgggccgttcgccgcagccgagcaccgtcacaagctggactacgagaccaccgaggacgcccccaaggtgcggcaggaactggacaaacagaacctgctggctaccgttgtggccatcgtgtccggcgtagcggccctggtcatgctttacctggggaccgcagtcgtgggcagcctgcccatgcccgcgcccctcaaccccgatgtgtcggcggcaccgctgctggtcgtcatgctggtgctgctgcttgtcacctgtgcactgaactggaaaaccctgctggacggctgcatcggtctggtgcgttcgcctacccccgataccatgccgtcgttggcggctttgggagcactgatccagctgctggtgttcctcatccagcccgagtggtacgacccggccaaattttgcctgatgtccggcccggcggcgctgctgctctgcttcaacgccgtgggtaaaatgctggatgcccgcaccgtccgcgccaactttgacctggtcagcgccggggtggaccacgcggtggcctaccgcctgcgggatgccgccgtgctgcgcaccgtcacccgcggcctgggcgagaccaagccctgcctgctggtcagccgtcccactgtcctgctcaaaaactttctggccggcagcggcgcgcaccgcacgtccgacaagagccagcagcagttcagctgggcgctgggcgtctgcggtctgctcagcctggtgttcaccctgctttaccgcggtgacccgggcatggcgttctctgccatggcggcggtgttctgcctgggcacccccctgtccggcaccctgatctcggcactgcctgcccagctcatgcagcgcagtgccgcccgcgtgggtgcggtcattcccggctggaaggatatccgccagctgggccgcaccaacatcatccagatcacggcccgggatctcttcccctccgggtgcgtcacgctgacgggcatccgtcccatcggcaaggagcgcatcgacctggccatccccatcgccgcctcggtcctggccgagggcagcaccaccctgcgggatgtgttcctgggcatgatcggcaacgaccgcaaactgcttttgaaagtggacgacctcaagaccgtctacggcaagggctatgtggcctgggtcaacggcagccgcgtgctggtgggcaaccgtgccctcatggaggaatatgagatccatgtccccagcatggactttgagcgtcgccactcggtgaaccagcggcgggtgatctatctggccgtgtccggcaacctgaccgccatgttccaggtcagctaccagcgcgaccccgacaccgccgccgtgctggaaagcctgcgccgtgccggtatgtccatcatcgtcgactgtgacgacttcaactgcgacgtcaacctggtggagacggtctacggcctgccgggtgattcggtcaaggtgctcaatgccgaggagcgggaggccctggcccccgccaccgcctggctgcccgaaagtgagggcaacatgctgcatctgggcagctttgccagcttcgtaggcggcctggaagccgccgccggtgcagccgaaggcgaacaccgggccagcatcgtgttggccgcgtcggtgctcatcagctgcgtgctggcggtcatcatgtcgctggcgggcggcatcgtctcgctgccgctgcccgccatggtgctgtaccaggcaggctgggcggtgctggcgctggtgttccccatgacccagcgctactgatcccgtttgccgggggccttgcgccctttgataccatgtgaaggagggccttgccgccgtgtaccgtgtcaaagaccgccagatgagcgtttacgattatatcccgccgtatcatggggaattgtcgcacaaaaaccgctgggtgcgcctggcgtccgccatagactgggatgcctttgagcatgagtacagtgctctgtttgcccggggcggcaaggtggccatcccggcgcgggtggccctgggcagcctgatcatccgggaagcctgcggcgtctccgaccgggagacggtggctcttgtgcgggaaagtccctatctgcaatactttctggggctgaaggcctttgccgatgaagcccccttctcggcccggagcatggagatgttccggcgccgcattccccgcgccgtggtgcgggatgccgtgcggcttctgcgcggctttgaacgcgaggaccgcccggactgaaccgtcccggcgtccgaacaattttgatgacatagagggtgtatatggaaattcttttgcattctgtcatccacgcgctggaggacagcgtgcggatgctgccgtttttgtatcttgcctacctgctgatcgagtggctggaacgccaccacggccagcgcatcgagaatgctctggccggcggcgggcgatggggctttgcccccggcgctctgctgggctgcgtgccccagtgcgggttttccgccgtggcatccaacctgtatgccagccgggtcatcacccccggcacgctgctggcggtgtttatcgccacttccgacgaggccattcctctgctggcggcggagcccggccagtgggcgtctttgctggtgctgatggtgctgaaagtcctgttcgccatggtggcgggctttgtgctggatgtgcccctgcgccggttcctgcccaagtcgctgtacggcggctactccggcagcgccgaggagatcgactgccacgaggagcatgagcctcacagcggcatctggctggccgctctgcgccataccctggagatctttgcctttatcctgatcttcagctttgccatcggtctggtgtttgagctggtgggcgaggataccgtggccggcgtctttaccgggctgggcatcttccagcccatggtggccgcgctgctgggcctggtccccaactgtgtatccagcgtgctgctgacccagctgtacgtggagggggtcatctccttcggcagcctgttcggcggtctgtgcgccggtgcgggcatcggcctggccgtgctgtggcgggtcaaccgcagcgttaaacagaatctgttcatgacgggcctgctgtgggctgtgggcgcggtgtgcggcatcgtgctgcagttcttgcctttgtgacccgcctgcaaggaggcatttcttatgctggaagcactgaaacaacaggtctgtgacgccaaccggcagctgcccgccctgggccttgtgacccatacctggggcaatgtttcgggcatcgaccgggaggccggactgtttgtcatcaagccgtcgggcgtggaatacgatgatctgaccccggaaagcatggtggtcctggatatggacggcaaccgggtggaagggaccctcaatccctcctccgacaccaagacccatctggaactgtaccgggctttcccggccatcggggccatcgtgcatactcacagcacctttgccacatcctgggcccaggccgggcgggacattccctgcttcggcaccacccaggcggactacttttacggttcggtcccctgcgcccgggcgctgacccaggcggagctggacctggactatgaaaagagcaccggccttgtcattgccgagctgttccgggaacagggcctggaccctgccgccgtgccgggggcgctctgccgctgccacggcccctttgcctggggcaaggacccggcgcaggccgtctaccatgcctcggtgatggaggagtgtgccaaaatggcgctctacactctccagctggacccggctgcccagccggtcccccagtatctgctggacaaacattacttccgcaagcacgggccgggggcctactacggccagaactgacccgcgctgccatgacaacgaccgaaaatcgccgcaaggtgcccggggcctgatccaggccggccgggagaatagggaagcgggtgtaaagcctgcgcgggaccgccgccgtaagggagcagccccggccaacacagccactgtgcgcggggaacatccctgcgggcgggaaggcgggccgggacgccgatgcccgagccggaagacctgccctgcggtgcatactgccggaaaaccgggcagaaaccgcgccgcggacggacaaaacgcaggcacggcacgcatgttgcggacggggctttctgtgccccgccgccagaccatgtaccccggcccttttccgcaaatccggcggaaaggggccttttttctgcccgctttccctcgatctaacaggaggtttcccaacctatgaaacaggcgcttttgctggtcagcttcggcaccgcggcccccggcgcgcaaaacagcatcacggcggtggaaaacgccctcattgccgcggcccctggccgggcggtgttccgggcctacaccagccctaccatccggcgcatcctcgcccggcggggcgtggagatccccgacctgaccacggcgctggagactctggccgccgaagagtacgaggatgtggccctccagcccacccacgtcatccccggctttgagtacgaccgtatccgggccgaggcggagcgctttgccccaaaatttgctcacctgcggctgggcacgcctcttttgtacgatgtggcggacgtcaccgaactggcggagcatgcggcacagtgctggctgccggaggaaggggctctggtgctcctgggccacggcaccgagcaccgggccgatctgatctatccggccctggccggggcgctgcgctgtgccggggcggacaatgctctggtgggcacggtggagggctggcccggttttgacgccgtgctctccatgctgcgccggggtagctggcagaaggtatgcctgcgccccctgctgctgactgccggggagcacgcccgcaatgacatggcaggggaccaccccgacagctggaagagccgtctggaagccgctggctttgccgtggactgttgcctggagggcatgggcagcgatgaggcggtgcagcaaatgtactgccgccacctgcgggccattctgtgacggattttcaggaaaggaggggccagccccgtgtttgaacattacatccagtccggcgggcggcggctgcgctgcggctacaccaccggcacctgcgcggcgctggcggcctggggggcggccacattgctgctgaccgggcgcgccccggcccaggcgtccctccttacccccaagggcctgcaagttaccgtacccctgctggactgccgcaccgacggccgcaccgcccaatgttccgtggccaaggatgccggggacgacgccgacgtgaccgacggcatgcccatcaccgccacggtggaaaagacggatgcccttggtatctccatcgacggcggaacgggggtcggccgggtaacactgcccggcctggaccaacctgtgggggctgccgccatcaactcggtgccccgcaaaatgatcgcccaggccgccggccgtgccgcacgggatgccgggtatgccggcgggctgaaagtggtcatctcggtggccggaggagagcaggccgcggcaaaaacctttaacccccggctgggcattgtggggggcatctccatcctgggcacctccggcattgtggaacccatgagcgagcaggctcttattgacaccatcgctctggaactgcgccaggccgccgccaaaggggcaaaacgggttattctgacccccggcaactacggcatggactttttgcaggcccggggcatggaccggctggccccggtggtcaagtgttccaactacatcggggacgctctggacgccgccggagccgcgggctttgaggatattttgctggtgggccacgcgggcaaactggtcaagctggcggcgggggtcatgaacacccacagccgggtggccgatgcccgggcagagatcttctgcgcccatgcggccctctgcggcggggacgggaccctctgccgcgccctcatggccgcccccaccagcgatgcctgcctggatctgctggacgccgcccatctgcggcagccggtcatggagagcatcctcacagcgatcgatacaaaactcaccgcccgcctttgtgcaggatgccgggccggggcggtgctgttcaccaatcaacacggacttctgggtcagacccaacaggcaaaggagattttgaaggcatggcaataactggcgttttttacggcgtgggcatcggccccggcgatcccgaactcatcaccgtcaaggcggtgcataccttgcagcgctgcccggtcatcgccgcgccgcgcaccgcaaacggcaatatgctggcgctggatattgcccggcaggccgtgaacctggaggggaaaaccattttgccactggacttcaccatggcccccgacccggctgaccggcagggcgcccaccgcgccgccgccgatgccatcgcccgggagctggcggcggggcgggatgtggccatgctcaacctgggggatgtggctctgttttctaccttcggccacctgaaaaagctgctgaccgcccaaggattcgacaccgtcatggtgcccggggtgcccagcttctgcgccattgccgcccgcctgggggagaccctcaccgacggcgacacccctctccatgtgctcaccgccgccgatgccgacctggacaatgccctgcgcctgcccggcacgaaagttctgatgaagagcggccgcacggcaaaggtccgtcaggcactggaggagcaggggcttctggatcacgcggccctggtcaccaactgcggcctgcccggagaagccgtctgccctggcctggagggcgctcccgaccgggcgggatatttctccaccattgtggtaaaggagtgaggaccatggttcattttgtgggcgccggacccggtgccaccgatctcatcacggtacggggcgcggaactgctgcgcgccgccgacgtggtcatctacgcgggcagcctggtcaacccggccctgctgggactctgccgccccggggcagccctttacaacagcgccgaactgaccctggaacaggtgctggacatcacccaaaaagccgacgccgccggacagcagatcgtccgcctgcataccggcgacccctgcctgtacggagccatccgggagcagatggacgccttgaaaaagcggggcattgactatgacctgacccccggggtgtccagtttctgcggggcggcggcggccgctcaggcggagtacaccctccccggcgtcagccagacggtcatcatcacccgcatggcggggcgtactccggtccccgagcgggagaacattgcttccctggccgcccacggcgccaccatggtgatctttttgtcggcgggactgctggacggattgcaggcggaactcctcaaaggggcctacaccgaacagacccccgcggctctcgtctacaaggccacctggccggaggaaaaggtcctgcgctgccccctgggggagctagccgagaccggccgccgccacggcatcaaaaacacagccctggttctggtgggagattttctggcggcggggtatgaccgcagccgcctgtacgaccccaccttcaccactggcttccgggaggcatcccaatgaccggcctgcggtgcatcgccttcaccgacaagggctttgccctggcccggcgtctggcggccgctctggacggcactgccgtgcgatgcggaggggatgtcaccctggagggctggacggcggaaggctttgcccaggcaaaggcgctggtctttgtgggggcggcgggcatcgccgtgcgagcctgcgcgccttatctgaaaagtaaggacaaagacccggcggtggtggcggtggacgagtgcgcccgctttgccgtgccgttggtgtcggggcatctgggcggtgccaacgacctggcccggcagatcgcggccctgtgcggggcccgggcggtcatcaccaccgccaccgatgccaacggcgtctttgcggtggacagctgggcagtgcggcagggctgcaccgtcagcccggtggggggcatcaagatggtcagcgcaaaactgctggcgggggagcaaatccgcctgcgcagcgactggcccatcacgggcacgcccccggcgggggtcctgcctgtggaggacggcccctgtgatgtccacctcacccttgccgccccggcggaaggggaaaaagcacccttgcgggtcatccccagaattctgctggcgggcatcggctgccgcaaaggtacccccatggcggacatcgaggccgccgtgctgtcggccctggaaaaagcaggagccgaccctctggcggtgcggggggtgacctccatcgaccgcaaggggcaggagcccggcctgttggaactctgccgggtccgcgggtgggagtttaccaccttctccccggaagttctggcggcccagcagggcgattttaccgactccgaatttgtgcgcaaaaccgtcggcaccggcaacgtctgcgagcgcagcgccgtggcggcgggaggcacactgattttacaaaaacaggcgggaaagggcgtcaccgtggcattggcccggctgcccttctcgccggactggcggtggcaatatgagtaaactgtttgtggtgggcctcggccccggggagtcctcccagctgaccggcgcggcccgggcggcgctggaacaggccgacctgctgtgcggctatactacctatattcagctggctcgggcggtctgcccggacacccccaccctctccacccccatgacgaaggagatcgagcgctgccgcatggcgctggatgcggcgtccaaagggcagacggtggccatggtgtgcagcggcgacgcgggagtctacggcatggcagggcccattttgcagctggccccggaatatcccggtgtggacatcgaggtcatccccggcgtgacggcggccctctcgggggcggcggtgctgggggcgccgttggcaaacgatttctgcgtcatctccctctccgacctgctcaccccctggccggtcattgagcgccgcctggacgcggccgcaaaaggagacttttccatctgcctgtataacccggcctcccggcggcgcaccggacatctgcgccgggcctgcgacattctgcttgagacccgccgcccggataccgtctgcggctgggtgaaaaacatcggtcgggagggccagcaaagccgggtcctcaccctggccgagctgcgggaagagaccctggacatgttcactaccgtctttatcggttccgacgcaacgcaaattatcgacggccgcatggtcacccccaggggatacgaggccaaacaatgagactgctgattttcggcggcaccaccgagggccgcgtgctggctcagcggctggcggaggcggggacacaggtcaccgtcagcgtggccacccccatgggggcggaggaactggcgggtattcccaaccttaccgtgctcaccgggcggcgggatgccgctgccatgcaggcccttttgcaggagttcgacctctgcatcgacgccacccacccctatgcagccgaggccagcgccaacatccgcgctgcctgtgccgccgccggggtgcccctgcggcgggcggcccgccccgccttcgccgtcaccgatgccgcctttgccgcggataccacagcggatgcggcggcttttctggccggaacggagggcaacattctgctcaccaccggcgccaaggaactgtccgcctttgccggtatcgacaaggcacgcctgtttgcccgggtgctgcccacccacgagggcatcgccgcctgcgaggcgctgggcatcccccaccgcaacatcatcgccatgcaggggcccttcggcaccgccctcaactgcgcggtgatggaacagtatcagatcgcctggctggtgaccaaagacggcggtcgggcgggaggctttgccgaaaagctggaagccgcccgccgcaccggggcaaaagtggtgctcatacgccgcccagccgacgcgggggaggacccggaacaactgttgcgggaacttctggcccggctggccgaccaaaaccctgagaggaggaacccccaatgaccgtgacccttgccggaatgggcggcggcaccgccgccaccatgacggaggaactgcgccgtgccatggagacggcgcagctcattgtgggggcgcagcgccttctggacgccctgccccagggccttgccgccgccagaatcaccgccgtcgcaccgggggagatcctccgcctgctcaaagcttcggactgcgaggaagtgcttgtgctgtacagcggggacagcgggttttactcggggacgcggggactgctggctcttttggaggaggagcacatccccgcccgggtactgccggggctttccagcgtgcagcttttggccgcaaggctgggccgtccctggcaggactggaccctctgcaccgcccacggggtggactgtgacccggtggccgaggtctgtgccgccggcggccctgtctgcttcctcaccggggggacgggaggaaacgccgccgacctctgccgccgcctgaccgaggcagggctgggggaactgcccgtcacggtgggagagaacctctcctaccccggggaacgcctcaccaccggcactgccgcccagctggcagagggaaaatttgcctccctggccctgctgctgaccgaggcagtgacacgcccccgccgtgcgccgggcatcccggatgaggagttcctccggggcaaaactcccatgaccaagcaggaagtacgctgtgccgtgctgtccaagctggccctgcgccccggggacgtttgctgggatgtgggcgcagggacgggcagtgtctcggtggaaatggctctctttgccaaaaaagtctacgccgtggagcgggacgccgacgcctgcctcctgatcgagcagaaccgggcggccttcggggcgtggaatctgactttggtgcagggttctgcccccgaggtgctgaccggcctgcctgcccccgacgctgtctttgtggggggcagcgggggagagctgggggccatcctgaaggccgccgtggccgccaaccccaaggtacggctgtgcgtgtcggccattgctcttgagacgctggatgccgcccgccatgcctttgaggagctgggcatcgactgggaggttacccagctctcggtggcccggtccaaggccgcgggcaagctccacctcatgatggcccagaacccggtctttctcatttcgggaggtggggcatgaaggcgctgatgctggccgccatgcagagcggcagcggcaagaccgccgcgacctgcgctttgttggcggcggcccggcggcgggggctggaggtccaccccttcaagacagggcccgactacatcgaccccatgttccacacccgggcggcgggacggcccagccgcaacttggatctgttcttgcagggggaggagggcgtccgccgcacattggccacggcgggggctgccgcaggggacggcctggccgtcatcgagggtgccatgggctactacgacggcatggcgggcggcaccgacgccggggcctgggcggtggcggatactctgggcatccccgccgttctggtgctgcgcccggcgggtcagggggtgaccctggcggcccagctctgcggcatgctgaatttccgcaaccccagccacattgccggggtgctgttcagcggctgcaaagcgtccctggcggattatctggcccccatcgtgacaagggagacagggctgccggtgctgggcaccctgcccccctgcgacgccgcaaagtttgacagccgccatctgggcctgcagacccccggggagattgatggcctggacgcccgctttgacacgttggctgaactgtttgaacagaatgccgacctggacaaactgctggccctggccgcggaactgccggtggagcagcccggtcaaacggggagcacaaagcccacctgccgcattgccgtggcccgggatgaggccttctgtttcacctacgccgacaacctggacgccctgcaaggggccggggcggaactctgctttttcagcccgctgcacgacgaggcactgccccgggactgtgacgccctctatctctgcggcggctacccggaactccacgccggggagttggcccaaaacgcccccatgcgtcaggcggtgcggcaggccgtgacctccggtatgcccaccgtggccgagtgcggagggtttctctacctgggacaggcattggaagatgccgatggcaacagtttccccatggcgggggcgctgccgggggagggctaccgcaccgaccggctgcggcggttcggctacctgacattgacggcggacgcggacagtctgcttttccgcaagggtgagacgctgcctgcccacgagttccactactgggaggcacggcagcccggcggcgacctgacggcccacaaacccggccgggacaagagctggcagtgctgttttgcgggaccgaacgtttacgccgggttcccgcacctgcatttcgggggcaacctgcccctggcagaacgctttgtggcggcggccaccgcataccgccaaagaaaggctgaatgaaatgaagtttacatccatctcatccctgttaaaagctatccctgccccggacgaaactgcccgggcggcggccctggctcactgggatgtcctggcaaaaccgctggggagcctgggtacactggaggaggacgtcgcccgcattgccgccgtcaccggtgactccgacgtccgcctgcaaagccgcaccctgctggtactctgtgccgacaacggcgtggtggcccggggggttacccaaaccgacagcagcgtcaccgccgtggtggccaaagcgctggtggagggcaacagcaccgtctgccatatggcccgccaggtaaattgccgggtggtgccggtggatatgggtatgctgccccacgcgcccatccccggccttgtggactgctgtgtccgcccggggaccggcgacattacccaaggtcccgccatgacccgcgcccagtgtgagcaagcggtactggccggggctaatctggccgcccgggcggcggaacagggagcggatattctcgccaccggggagatgggcatcggcaacaccaccacctcggcggcggtggcctgcgccctgctgggccttgccccggaggaggccgtgggccggggggcgggcctttccgacgcaggccttgcccgcaagcggacggctgtgaaagaagcactagcctttaaccaacccgaccctaccgcccccctggatgttctaaccaaggtgggcggactggacattgccgggttgtgcggcgtattcctcggggcggcggcctgccgggtgccggtgcttatcgacggtgtcatcagcgcggtggcggccctgtgcgcggcaaggctctgccccaacgcccgccaggccatgctggccagccatgtctcggcggaaccctgcggccggcggctgctggaagccctggaactccatcccctcatctgcgccggtatgcgcctgggggagggcagcggtgcagtggcggccctgccgctcctggacctggccctggctgtttaccacggcgggcggaccttcggcgctctgggcatggaggcctacacgccccaggaggacaaatcatgatgacgctggtgatcggcggtgcggcctcgggcaagagcgagtttgcggaggcgctggcccggcagtttgccgccccccgggtctatatcgccaccatgcagcccttcggggcggaggccctggcccgcatccagaagcaccgggaccgccgcgcccgcatgggctttgcaacccttgaatgctataccggccttgccgccgcctgcgacaccctgccggagggcgtgtcggtactgctggaatgtctgggcaatctggtggccaacgagcggtacagtcccgacggtagaggggaaggcgctgctctgaccggggtgcttcgcctggccgaccgctgccgggacctggtggtggtgaccaacgaggtcttttccggcgggtcggactacgagggggacactctcggctatctgcgggaactggctgcggccaaccgcgccctggcaacccgggccgaatgggtggtggaactgacggcaggcctgcccaactggctcaagggcgggccgacggactgagcgctgtccccatacggcaaggagaaaaaatgatgcaaaatacttcagcggtgagcgggaaactgaccgtccggttttacgaccgagtgaaggatgcccgtctcaaatttgcagtgatcatttccaagtcggaagggaaatgggtgttctgcaagcataaggagcgggatacctttgaaatccccggcggacaccgggaacgcggggagaccatcgaggccgctgcccggcgggaattgcaggaggaaaccggcgcgctggagttttccctcaccccggtgtgcgtctattcggtcacgggcaaaaaccgggtcaacgccaccggcgaggagacctggggtatgctgtacgcggcggagatcactgccttcgcaggcgagctgcacagcgagatggagaaggtggtccttttggacaagctgccggacgcctggacctatcccctgatccagccgctgctcctttcagagtatgagcgccggtgcccgatgtccggcaaccagtaaaaatccaacacagcgggagagttgcccgtgcaaagcagcgttcccgcaaaaaggagaaaccatgttgaaacaggctctgcgcgcggtggctgccgcgttttccatgttttcggccatccccatgccccaggtggactgggacaagggcgggctcaaatatatgctgtgggcattccctttgatcggggcggtgatgggcggactgtgcaccctgtgggcgctggcggcggatgctctggctctgccctcggtgctgcggggggcggggctttgcctcatccccctggccgtgacgggcggggtgcatctggacggctttgccgacacctgcgactctctggccagctacgccccgccggaaaagcgccgccagattttgaaagaccctcatatgggggcctttgcggccatccggctgtgcgggtggtttgtggcggattttgccctgtgggcggccctgccggagtttccggctgccgctgtgacgctggggttctgcctgtcccgggcgctgtccgggctggcggtggcccgctggccgcttgccagtgatacagggctggtccatacctttgcccaagccagcgaccgcaccgccaccgggcggtttctgaccgttgtcgccctgctgttgactgcggggctggcggcctgcggtgtgcagggcatcgccatggcggtggccgcctacggggtgtggctttactaccggcggatggcccgggtgcagttcggaggcatctcgggggacttggccggatggtttgtgcagacctgtgaggtctggatgctgggggctttgtgcgcggtgcagtatcttgccgccgcatggcattgacagggaggaaaaagtggctatgatgtttgtgacggggccgctgtttgcaggcaagcgggagtatgtctgccgcgccatgggctggacacaggagcaactggctgcccgggcggtatgggacgtgcaggacctggccgccgacgcaccggatgccggggcactggcggaactggccgaccgcctggccgggtacgaagtggtcatcgccaccgaggtgggcggcggtgtggtacccgtggacgctaaagagcgcgctgcccgggaagccgccggacgccttgcctgcctgctggcccagcgcgccgaaaccgttgttcgggtggtctgcggactgccgcagatcctgaaaggagatatttcatgctgatctatctgatccgccatggagagacggaatacaatgccgaaaaacgctaccagggaaaccgggacatccctctgtccgccgacggccgcgccgggctgcacaaggccgatttcacccccgatgccctttatgtctcgcctctgacccgtgcccgccagacggcggaaatcttgttccccggcatcccccagatcccggtgcaagacctgcgggaaatgtgcttcggcagctttgaggggcgcaactacattgagatggagcacgaccccgaataccttgcctgggtagcatccaacagtgagaccgcctgccccgacggcgagcgcaaagcagatttctgtgagcgaacctgcaaggcctttgccggggtcgtggatgaagccctggcaaaagggatagagcgtctggccattgtggcccacggcggcacccagatggcctccctggaacggtttgcccgtcctgcccggggctactacgactggtgtgcgggcaatggcggcggctttgtgctggatgccgcccgctggaaggccgaccgtgtattggacctggtggggaccgtggattacggcagcacttccgccaagggggcaaagtgacggtggtatatgccgcactctgcggctttgtcatcgaccttttgctgggagacccggcctggatgctccatccggtggtgttcatggggcggtgcatctcggcgctggaaaagtccctgcgcagtatcttccccaaaacgcccaaaggggagcttgctgcgggcgccgtgctggcggcggtgctgcccctgggaacattggcttttaccgggctctgcgtgtgggggctggggcttgtccacccggttctcggctttgccttgcaggtgctctggtgctggcaggcgttggccgccaaagggctaaggcaggagagcgaaaacgtccgccgcgctctggacaccggaactctggacgacgcccgcaaggcggtcagccgcattgtggggcgggataccgccgctctcagccgggaggaagtcatccgcgccgcagtggaaacggtggcggaaaacttctccgacggcgtggtggcacccatgttctggatgcttatcggcggggcgcccctggccctggcctacaaggcggtcaacaccatggacagcatggtgggctacaaaaacgaccgctatctttactttggccgggcagcggccaagctggacgatgccgccaattggctgccttcccgtctggcggcgctgctgctggtggcagtggcgcccctcaccggacagaacgccaagcgcgcctttgccctctggcggagagaccgccgcaaacacgccagccccaactccgcccagaccgaatccgccatggcgggggcgctgggggtgcggctggcggggcctgccagttactttggcaaggtccaccaaaagccctggatcggggacgatacccggcccattgagcccgaggacatcacccgggcggggtggatgctctacgcgggcagtgccctggccctggtgcttttctgcggggttcggctgggcatcctggccctgatcctgtaatgccgcaagaaaatcacacaccgaaaggagaccgccatgcagctgacccacggaggagactgggagggctttcgccgggaatacggcgggatgccgctggatttttcggccaacgtcagccccctgggcatgccggaggccgtgcgccaggccgctgcggatgccctggccgacgcctggcgctaccccgaccctctctgccgggaactgagggatgccctggccgtctatcattcggtggatgccgggcagatcgtctgtggggcgggggcggcggacctgattttccgcctggtactggcccggcggccccggcgagctctcgtcaccgcccccacctttgccgagtacgagcaggccctggccctggcgggctgtgcggtggagcgcctgaccttgcgggaagaaaccggctttgtgccggggcaggacctgctggacgccgtgcgccccggtatcgacatggtctttctgtgtgagcccaacaatcccaccggccgcacctcccccaaggcgcttttgcagcaggctttggcccgctgtgccgggtgcggggcgctgctggtggtggatgagtgcttcaacgaattcctgcccgacccggcggggcatactctcctgggagagctgtccgggcaacacggaaaacatctggcggtgctgcgggctttcaccaagaggtttgccatggccgggcttcgtctgggttatgtgctgtgcggggacgccgccctggcggaaagcctttaccactgtggcccgccctgggcggtgtccggacctgcccaggcggcaggcgtggcggctttgcaggctgcccccgactgcctgccaaaacttcgggcagtcatcggggcggagcgccccaaactggctgcggccctggaagcaatgggctgcagggtcatccccggggaggcaaactacctgctctttttccacgccctgcccgacggcaatcccgacggaacactggctgcccgtctgcggacaaaaggcgttttgctgcgggactgctccaattatccgggactcggccccggctggtaccgcacagcggtgcgtggggcggaggaaaataaagaaatgctggggcggataaaggaggttctgtgatggcaaagtgcatcatggtgcagggtaccatgtccggggcgggcaaaagcctgctggtgacagggctttgccgggcctttctccgccggggactgcgggtggcgcctttcaagagccagaacatggccctcaacagctatatcaccaaagacgggctggagatcggccgggcccaggccgctcaggccgaggccgccggggtggagccggatgtgcgcatgaaccccattttgctcaagcccagcagcgataccggcagccagctcatcgtcaacggggaggtccggggagactatcgggccgccgattatttcaagctgaaaaaaacgctgatcccggacattctcgccgcctaccaaagccttgccgctgagaacgacgtcatcgtcatcgagggggcaggcagcccggcggagatcaacctgcgggaaggggacctcgtcaacatgggcctggcggaactggtggacgcccccgtgctgctggccggggacatcgaccggggcggggtgtttgcccagctttacggcacggtggccctgctggctcccgaggaaaaagcccggctcatcggcaccgttatcaacaagttccggggggacgtgtccctgctgcagccgggcctgacccagctggaagccctcaccggcctgccggtgctgggggtagtaccctggctggaggtggacatcgacgatgaggacagcctgtcccagcgcctgacccggcgggaggggagccgtcccgtggatattgcagtcatccgcctgccccgcatctccaactttaccgacttttctcccctggaggagcacccggccctgggagtccggtatgtgggggcggtgaaagacctgggccaccccgacctggtcattctgcccggcaccaagagcaccatggccgaccttgcctggatgcggcagaacgggctggaagccgccgttcgcaagctggcggcctccggcgtgccggtgctgggggtctgcggcggctatcagatgctggggcagtccctggatgaccccgacggcgtggagggcggcggcagcatggcgggcatgggccttttgccctgcgccaccgtttttgcgggcagcaagacccgcacccgggtcaccgccgcagtggaggcaggtccctttgccggggcaaagctggacggctacgagatccacatgggccgcacccgccgcctgacggacgatgccgccccctttgcccgcctggccgacggccgggaggaaggtaccatgtccgagcaggtgttcggcacctacctgcacggcctgtttgacacgggggagctcaccgcagccctggcagactggcttttgggccgcaagggcctggatccggcaaccgtgggaaaacccatcgaccggaacacctaccgccagcagcagtatgaccggctggcggaggcactggaacaacatctggacctgtccgccatctggcgggcaatggaggaacgctgccatggataaaggactcatccatctctacaccggggacggcaagggcaagaccacggccgccatgggcctggctttgcgggccctgggcagcggcctgcgggtgacggtggtgcagtttctgaaggacggccgcagcggggaactggaacccctgcgccagttgggggcgacggtctacaccggccgtccggggaccaaattcgtctttcagatgaacgaagaggaaagggccgaggtccacgccctgcaaaacgcccagttggccgaggcgctggaaactgactgtgacctgctggtgctggatgaagcctgtgccgccctgcggctgggcatggtggaggaggaccttctccgccgtgcggtgctggaccgccccgagggccgggaagtggtcctgaccgggcgggacccggccccctggctgatggaagcagccgactatatcaccgagatgcgctgtgagcgtcacccctaccagaagggcatcccggccagaaagggcgtggaatactgatgacacagcacaaaacccccggtgacatcgagcgcaccagcatgggcattattctggaagaactggccgaacagggcctgaccccgcccccggaacacaaagccgtcgtctgccgggtggtgcacgccacggcggatttcgactatgcccgtaatctggttttcacccccgacgccgtgcaaaagggcatcgaagccctgctggcgggagcacccgtcatcaccgacaccaacatggcaaaggcgggggtcagccgtccctgcctgcaaaagctggggggagaggccctctgtttcatggcggacgccgaagtcgccgccgctgcccggggaaacggcaccacccgggccgtggcggcggtggacaaggccgctgcccagtatcccggcgcggtgctggctttcggcaatgcgcccacgggattgctgcgcctggccgactggatcgagcagggctaccggcccgcccttgtcgttggcgcgccggtgggctttgtcaatgtggtggaaagcaaggagcacgccctggaggtctgccgcaaggcaggggtccccgccatcctggccatgggccggaaaggcggcagcggcgtggcggcggccatctgcaacgcattgctctacaccgcctgcggcaccctggaccccgccgcccggggttggaactgaaccaaaaacaactacaaaatcccccggaacgggccgtatgggacagcctgttccgggggatcgttttgtataggatacggtttcagcgcaggggcgggggcaggtggcgggcacggcggtagaggacgatgcccaccaccgagacaatggcctcggtgacgggaaaggcacaccagacaccggtcagcccaaaagccgccgccagggcaaaggccatgggcaaaatcaccgcaaagccccgcagcagggcgatgacctggccggggaccggctgctcgatggaggcaaaatataccgacaggatgatgttgacccccgcaaaggggcagccgataaaatacagccgcaggcccgcctcggcgatctcttgcagctgggcgttgccctcgctgttgaacagggtggtcaccggtcccgcccagaggaaggtgatgacgtagaccaccgccgcaatgacgatggcagacaccagggcatagcgcaggatagcggtcagttcccggcgctggccggagccgtagcggcggctgagcaagggctggatgccctgggagatgccggtgaagatggcgatgaccaccagggacaggttggcaatgacgccataggccgccacccccacgctgccgcagatggagagcagaatggcgttgaaggcgatgatgaccacgccggaggaaagctcggtgatgagggaaggtacccccgccgagcagatacccgccagcagccgggctttgggcagaacccgccgcagatgaaagcggcagtgcccccggatgcggtgggcggacaagatcagcatgctgacgatgggggccacgccggtggccagcgccgcaccgaagatgcccagcccaaaggggaagatgaacacatagtccagcacaacattagacaggctgcccagcaccatggcggccatggccagctggggcgcgccgtcattgcggacaaagcagagaaacaggttgttgaacaagaacatgggggcgaacagcagaatgacctgcaggtaggtggcagtcatttcaaacacggcgccgtcggcacccagcaggcgggccagagtgccgggcagcagcaggcccgccagaaaaaagaccaccgcaaaccccgcggccagcagtaccgatgcggagaatgcccggtcggcttcctccggctctccctggttctggcggatggaatacttggtgccaccgcccatgcccaccatcaggccgctgccgtggataaagctgtacaccggaatggccagattgagggcggccagaccgtcggcgcccatgcccagggagataaaataggtgtccgccaggatatagcaggacaggccgatcatgcccagcacattgagggacgcatagcgtgcgaactcccgaaaacaggacggttgtttcacaggctgaacctcctttgcatttttgaaaaccagcaaaccaccgcacaaaaaaacgcctcatccctctctcttctaaaggcctacgagagagggaaaaggcgtttgcccggcggcaattgattcaatgccacgattgtaccagcccgggaaagtcctgtcaagcccggaccggtgaaaagctgttacagagaatacaattcggaatattttttagtcaaatactctgtgtaatatttcgggtcgaaggcaccgccgcacaggctttcggtcagccaggcgggttccttcatgcagccgtagcgccacaggcgctgggtgagggcatttttcagcggggaaagatcgcccgccgccagcatggcgtcgaagtcgatctcggcggaaaggctggccatggcctgggctgcgtaagcgctgcccagcgcgtagctggggaagtagccgaattcgccccaggaccagtggatgtcctgcagtacgccgtgggcgtcgtcgggaacgtccacgcccaggtattccttgtacttggcgttccaggcggcgggcagctcggacactgccaattcgccgtggaacagagctttttccagctcgtagcggaccaggacgtgcaggccgtaggtcagctcgtcggcctcggtgcggatgaggctgggctccacacggcaggccgcacggtagaagtcctcctcgctgacgccggacagctgggcggggaacagggtgcgcagggtgggccacaaaagatgcacaaagccacggctgcggccgatcatgttctcaaacaggcggctctggctctcgtgcaggcccatggtggagccgcccgccagcaccgtgtagttcagggccgggtcgatgttcagctcatacagagcatggccgccctcgtgggccaccgagtacaggctggacagcacgtcccggggcatatagtgggtggtgatgcgcacgtccttgctgttgaagccgttggtaaaggggtgctcgctctccgccagggcgcagtgggcagggtccaggccccacagggacatgaccttgtaggccagggcgcgctggccgtccaccggccagtcctgatccagaaaatccgtgcggatgggcgtgccgtggtcggcaatggccttgagcagcggcacgatggcggcacgcagctgggcaaagaaagcgtcgcagcgctcaatggtcaggccgcgctcaaactgatccagcagcacctcgtaggggtcacggtcgggcgcgatctgggatgcctgacggcggcgggccgccaccagacgctccagataaggggcaaagagggaaaagtcattgctgcgcttggccttgccccacaccgacaccgattcctgggtcaggcgggtaaaggcggcaaattcatcggcggggatgggacggatgcgggccaggttgatgcgcagttcccgcacctcggcctgctcctgctcagtgtcggcctcagcggcagcggcgtccagcaaagcgtcggtggaaggctgcaccagcgtgtcaaactgggcgcggctcaaaacctcggcggcttcggcccggccctcggcgctctcggcgggggcggcggtggcctcgtcataggtgatgagacccagggcataattataggcgtagagattgcgctccaaagtgcgcagctcggcaatatgttctttcatgatcgttctcctgtatggccggcaaaaccggcatcgggcggcgcaatgccgcggaaaatagcgaatgacaacagtataccacgttgcctttttcagagcaatgcggtatgatagaaaacaagaaagagaagccgtctgccgggaaccggaacgagcgtcggggcgtgtcctgatgggagctctgcgcgagaaatcccggcaattttcggggaggaggagcccaatggcacagccccttgtcagcgtgatcgtgccgatctataacgccaaaaatcatattgcgcgctgcgtcgagagcatccgcaagcagagctatcccaacctggagatcctgctggtgaacgacggctccaaggacgtcagcctgcaggtgtgcgagatgtacgccaaggtggacccgcggatcctgctggtggacaaacccaacagcggcgtggcggccacccgcaacctgggactgcgcctggcatcgggcaagtacctgcagtttgtggatgccgacgacaccctgcagcccgacgccacccgtctgatggtggaaaaggcggaggaacaccaggccgacctggtcattgcccactacaaccgggtcacgcccccgccggaaaagcccaatctgcccaaggccatgcgggacaccgcctttgcggaaaagtttgacgagacctttgagcggctgatgccctccgacgaccgggtcaagaccttcggttttctgcatgagggctttatgaccaaggcggagtttgccaagggcctgatgcaggaaccggcatccttttactacggcgtcatgtggaacaagctctaccgtgcggacatcgtgcgggagcatgaggacgtggtttgcagcgaggaactgaactggagcgaggacctttacttcaacctcagcttcatccgctatgcggagcggttctacgctttggcggtgccggtgtacaactacctgcaaaacaaggagagcatctgccacacggcgctcaatcccatcaacgtggtgaccacccgggcgtcgctgttcaagtattacaaggaactgtacgagtccatgggcctgtatgaacagtacaagccccagatctacaaatatctcgtatccattgcggaaagctgaccgcataccgtaaaaaatgcccgccccggcagcctggaaacaggatctgccggggcgggttttattgtgatttttggtcgaccggtcagcgggcgatgggcgcggtcttggcggccagccagctgcgttcctcgtcggtcagacggggggacagcacgtcgtagacggtcttgtgataggcgttgatccagtcgatctcgctgcgggtcagctcatccaccacgacgggggacagatcgatgggaacaaaggtcatgggctcaaagcccagccagtgaccgtactggttctcgcccttgtctacacagaccagctcgttctcaatgcggatgcccacttcgtcggtctcgtagacgccgggctcgtcggtgatggtcatgccggggcggaacaccacggggttattgggacgcaggctctgggggccttcgtgcacgctggacataaagcccacgctgtggccggtgccgcagcggtagttgatcttgtgcttccacaggggaccgcgggcaaagctgtccagggcaaagccggtgcagtagtccagccagatcgcctgggccacgccgatgtggctctgcagcgtccaggtgtagtacaggcgctcgttttcggtcagggggcccatgggataggtgcgggtgatgtcggtggtgccgcagtcatactggccgccgcagtccaccagcaaaaagcccttgggctcgatggcgctgtcggcgccgggcttggcctggtagtgcatcatggccgcgttggggccgtaggcggcaatggtctcaaagctctcctcgtcaaagccgggctgctcggcacggcggcggtggagcatggtgtcgatgtcgcactcccgcagggttttgccctctgccagagccttttccagatccatctcaaagcggaccatggcaacgccgtcgcggacatggcactcccgcaggttggccagctccacctcgttcttgacgcccttgagggcggtgatgggatcgacaccgggcaggacggtgagggcagggttggcggtcagtgcggcatacaggtcgtagttggtggcttccggcgcgatgagcaccgtctccttgccggtcaggccgcggacaaagtccagaagcgcgtcataggggcgaatctccacaccctcggcggccagaacggcctcgtcgtcggcgcacaggcggccgggagccaaaaacagggtgcagtgctccatggtcacaaaggcgtaggcgatggccaggggcgtgcagggcaggtcatgggctcgcagattgagcagccagcccacgcagtccagctgggtcaccgccagggcggtggcgccggctttctgcaattcggcgcgcacggcgttgagcttttcggcgggggtggcgccggtctgctcccggctcagcaaaaagcagggcgtgtccggcagggcggggcggtcatcggcccacagcgggctgaccacgtcggcgctcttgagggtggcgccgcaggcggccagggcgtcgcggtactgctcaaacaccttggtgggcatgcaggaaccgtcggtcaggtaggtctggccctctccggcgttggctttcaggtaggcttccaccgtggggacgcccgccgcaccggcgtgcatggactggatctcggtgccggccagctgtttgtcggcctggacgtaaaaacggccgtccacccacagggcgctgccgctgccggtgaccaccagggtggcgttctcaccggtaaagccggagaagtgggtcaggctgcaataatgggcgggcagatactccccggaatggggatcgctggtcatgaggatgacgccgtcggcacccgcggcctttgcggcggcgcgcagtgcggcgatcttttcgttggtcgtcaagggaaacccttcctttctgaaaaacgggccggggcggctcacaggtccgccggatggcccgcagtgatttttctgtctgtattgtagcacgttttgccaaaacgtcaaatggcgggcctgcttggacacaggcccgccatgggggatgggacggggaaaatcaacgcttgacgatgctgtaatatttgcgggaggtcagggcgtagacggccacataacacagggcaaagcctgccagtgtgatgaggcagcagaggaagaacagctggctgttggtcacgccgaacaccgagaccatccgcatcagcatgggggaggcagcggccaggtgcaccgccgccatgaccaggggcaggaaaaagaccatgagcacctgcacccggatggtgctgcgcacttcatcggcgctcatgcccacctgctgaaggatgacaaagcgggtgcggtcctcgtacccttcgctgagctgcttgtagtagatgatgagcacggtggccatggtgaacatgaccgccaggaaaatgcccagaaagacaaagctgccgttcatgttgtacagttccatccgcatgccctcccgggtgttgacgtaggtgcgggaggtcagatactcgggagcggggtcggggttggccgcggcctgcatggtgttggcgcaggcgtccatggtgtcgacgtccagtttgtcggtgttgatgttgagatagcgccggacggtggggacgtacttgctgacctgaagaagcatctcccgcagggtgaccagcgtgtcggtatccggcaccacaagataaatggtataggggctgtatccgccgttgacggcagggaattcctccgcctggcccacaatgcggtataccgtatcgccgatggtcagcgtgtcggcgggatctttctgccctagggccagtacctccccctcggccagggtgacggcctgtccggtcacgcggctgtaatccgcggcggtcatgagggtgagggtgggggagtccgtggtctgggaatcggcgcccagggcgggcgtgtagacgttgccgggggcggccgttgccccgaagtcaaagagatagaaactctgcagttcctcgtcggagagcccgtattcggcagccacttcccggatgggagcctcccaggcctgggcgttttcctcggacagaccgccgtcactgaaactcaccgacagagtcacgtcgttggggtacatccggtccacggtgccctcggtgccggcgtagagacatacggtggtggccacgctgaccagtaccgtggtggccaggatgcagatgtttgccaggccccgggcgttctggttcatgcggtagatcaggccggagatggccgtgaaattgcggggccggtagtacagggccttgtttttgcgcagtgccttgagcaccaccacgctgcccgcgccgaacaggcagtgggtgcccacaatgaccagggccaccgctgcaaagaacagcagaagaacatacaggaaattggtggtgaaaaaggagatggcatagccggcgcccagggtcaccaggccgaacagggccagcagccagcggcttttgggttcccgctcgcccatggagtcggaatggagcagctcaatggggctggacttgcgcacctggcgcaggttgcgcaggtacatgagcagaaacagcaccgcaaaagcaacaaacgtttccgccgcgcccgtggtgcagaaagaaaagcccagggtcacctcaaaccggatcagccgcaaaagcagcagcaaaaccaatttggagaccagtgcgccgcccagcacgcctgccgccgttcctgccaggcagagaaacagcgtctcaaagcccagcacggcggcaatgttgcctttttccatgcccagaatgccgtacagcgccagctcctttgtccggcgccggatgacaaagccgttggcgtaggccatgatccagaccaccaggaacaccatgatgatgctgcccagggccagcatgagctgtacataggcggcgccgcgcatggtggagaccagtttgttgtaattcagaaaccgcatgatatagcacatggcggcgcatccggcggtggtcaggaaaaagggaccgtaatactgccggtttttgaaaaggttgcgggccgccagacgcaggtagagggccagcttactcatcctgctcacctcccgaaagggcggtcagcgtgtcggaaatgcgggcgaacatggactcggtgctcatgccggaacggtagagctggtggtagacctggccgtcccgcagaaacagcacccggcccgcgtggctggcggcgcggacgctgtgggtgaccatgacgatggtctgcccgccctcgttgatcttgccgaacagatggagcaggctgtcggaggagcgggagtccagcgcgccggtaggctcgtcggccaggatcagttccggccgggtgatgagcgcccgggccacggcggctcgctgtttctggccgccggagacctcatacgggtatttgtccagcagttcggcaatgcccagctggcgggcgatggggcccagccgcagggacatctcccggtagggggtgcccgccaggaccaggggcaggaagatgttgtccttcagggagaaggtgtccagcaggttgaagtcctgaaagacaaagcccaggtgatcccggcggaaagcggacagctcccggtcgctgatcttggtgatgtcccggccgttcagacagacggaaccgccggtaggccggtccagagcggccaggatattcaaaagggtggtcttgcccgcgccggactcgcccatgatggccaggtattctccctgctccaccgtgaagctgacgtcggacaaggcctctactttcacgccgccgaagcgggtcgagtaggttttttgcagatggctgatctccagcaatgacatggtacatgctccttttgcaaaggccccgcgggaaacgaaacaaagcggggcggtttctcttacatggcggagggaggggaccctgttcctccatcctgccactagtgtaccgcccggcggggatctgccgccatggatgtaccttacaaaaggcagggcgtacctaacagttttgtcacattgcctgtcacggaccgtccgggccggtcattcgtacaggggcggttcgggcgggaagagcagctccacccgggtgccttcccccggcgtactggccgcatggatggtgcagcccagctttttggccgcctgggcgcagagatacagccccagccctgaggaggaagcctccgcccggccgttgcagccggtgtagcctttctcaaagatgcggggcaggtcctccggccggatgcccaccccggtgtcggatacggccagccggcggtcgtccgccgtcacggtgacgcagccccccgacggggtgtacttgaccgcgttggagagcagctgctccagaatgaaccccacccacttgccgtcggtgacggggcgggcgctggtgccttcgtagcggaaggacagctttttcaaaatgaacatccgggcaaagcgccgcgcccccgcccggatcaccgggtccagggccgtgggggagagcaccaggtcattgctgtcgctgcccaggcgcagataccccagcaccatgcccacatagcgctcggtctggaacagctccccctccagctccgaccggggcggaaggtcctccccctgcaaaagcaggcgcatggcggccaggggcgtcttgacctggtgggcccacatggtaaagtagtccagcatatcgtcccgctgatcccgggcggtgcggtgggcttcgtcgcaggcggaagtcagcgcctgcaggctctgctggtaggcaccctccaaccccgcgggaccgccctcaggcgaggcaaggtcggggaaagcaccggggtcctcggcggcaagctcggcatcccggcagcgccgggcataggagggatagcccgtccccagcaaaagcagccccgccgcgccggacaatactgccgcgtacccgaagggctcaaggggcaggcggtacagataggtgatcatgatcagcagcgccgccgtcaccgcccagagaaaaaacacccggcgctgggtgtacaggtaagcaaaaaaacggctcattggatgcagtacccctcgcctttttttgtatggatcagccccggaagcccggcggcttccagctttttgcgcagccgccccacattgacggtcagcgtgttctcgtccacaaaacagtcggtggcccacagcgccgtcatcagggtgtcccgggagacggtgcggccccgccgtgccagcagcgtctgcaaaatgcgcagctcgttcttggtcagctccaccgttgtctcgccgtttttcaccacgccggcgcccaggtccagcaccgccccgccgccgcagtccaccaggtcggcgggttttgcgtaggcgtaggcccgccgcagaatggcctgcaccttggcggccaatacttccaggtcaaagggcttgggaatgtaatcgtccgcccccaggtccatggccgtgacaatgttcagattgtccgccgccgaggacaaaaacacgatgggaatgtcggtgacctcccgcaggcggcggcaccagtgatagccgttatggtagggcagggacaggtccagcagcaccagctggggagcaaaggcggtgaattcgggcagaatatcctgcagatgctccgcacaggcggtctcgtaccccaacgccgtcagatggcgggtcacgccccgggcaatgacggggtcatcctccacaacaaaaatgcgatacaaaccggtcggctcctttccgtcgtgcctgctccggggcagccggatacagatcagggagtaagatacaatcagtatatcatctgatacgcatgggctgcgtcaaattttgcaaaaagttcaaaaatgcccccgaaaaacagccccgaaaccccttgacgactttgttataatagagttagcagttaaatactgagattgctaaacgacataaatcctttcatattcagaaatagaggtagagacaccatggcagaaaacaagacaaagatcgatatattctccggctttctgggcgccggcaagacgaccctcatcaaaaagctgattcaggaagccttcggcggcgaaaagctggtcctcatcgagaacgaattcggtgagatcggcatcgacggcggcttcatgcgggaggctggcatccaggtcaatgagctgaactccggctgcatctgctgctccctggtgggcgacttccgggaagccctgaaaaaggtggtggagacctaccaccccgaccgcatcctcatcgagccctccggcgtcggcaagctgtccgacgtcacccgcgccgtggagggcgtggccgagacgctgcccgtggagctcaacagcttcgtcaccgtggcggacgtcaacaaggtcaaactgtatatgaagaacttcggcgagttctacaacgatcaggtcagccatgcttcctgcctgatcctcagccgcaccggcaaagcatcccaggaaaagatcgacgctgctgtcaagatgctgcaggaaaagaaccccaccgccaccatcgtcaccaccgactggatgaccctcaacggcaagcagatcgtctcggtcatggacggcaagcgtgacctggtggccgagctgctggccgaggctgctgcctccaaccaggcccatgccggcgaggaggaacaccaccatcatctccatcacgaccatgacggcgacgagtgctgctgccaccacgatcatgaccatgaggatcatgacgagcacgaccacgaccattgccaccacgatcatgacgaccatgatcatgagtgctgccatcacgatcatgaggagcatgaccattgccaccatgaccatgaggagcatgagcaccatcacgagcatcattatgatgagcacggcgtctgtagctgcggtcaccatcaccacgaccacgatgccgatgaagtgttcaccagctggggccgtgagacggcccgccgctttgccagggaggacctggagaaagccctcacggcgctggacagcggcgagtacggccagatcctgcgcgccaagggcattgtggacggcggcagcacctggtacgagttcgacatggtccccggcgagtacgagatccgcgaggcgaccccggatgtcaccggcaagctgtgcgtcatcggctctgatctgaaagaacacgccgtggccgagctgttcggcgtctgatccggcacaacacaaactgttacaggaggctgctatggcggcaaaacaaatcccggtatacctgtttgtaggtatgctggaaagcggcaagacccgctttatccaggaaaccatggaagacccccagtttgactcgggggataagacgctgctccttgtctgcgaggaaggcgaggaggagtacgattccgacaagttcggctttggcggcgtgaccgttgccacgctggaggacaagagcgaactcaaccgcaagaatctggaagaactggcgaccaaaagcggctgcggccgtgtggtcatcgagtataacggcatgtggctgatccaggatctggtggatgccatgccggataactggctgatctaccagtgccttgccacggcggacggtaccaccatcaagacctacgccggcgacaacgccatgcgcggcctgctgctggataagttgcgggtcagcgaactgctggtggtcaaccgtgccgagcaggtcaatgacgacgagagccgccagctcatccacaagctggtgcgccaggccagccgccgctgcgatattgcctatgagttcgccaacggttcggtggcctacgacgatatccccgacccgctgccctttgacgtcaatgccccggtcattgagatcccggaggagtttttcggcgtctggtatatggactgcatggacgatatggagaaatatgacggcaagacggtcaaatttctggctcaggtctgccagacctcccgcgcaggcaaggacagctttgtccccggccgctttgccatgacctgctgcgtgcaggatatccagttcgtgggcttcccctgccggtacgacgcctataaggcgctgaaacagcgggactggatcaccatcaccgccaaggtgaatgtcaagttccaccccatctacaagggccagacccccgatgctaccggtcccgtgctgacggcgctctctgtggaaccggccaccgcccccgcgcaggacgtggtcatgttcagctgaacacgataaacatcacgttttatcacgaaaaatcaaggccgcctgctgccccctcaaaaggggcggcaggcggctctttggttgcgaaaactgagtgattgtggtataatgaaaaagaatttttttgataaaaataacgaatgtgcgtcaatagatgcgctggaacagttggcgcccctggacctgggaattttgaggtgcagacaatgggaggaaggcaaatgcccaaaatcgggatcgtgatctcaaactataacggctggcaggataccctcaagtgcctggacagcctcaaagagcagacattccaggattttgaggtcgttttgctggacgatgcttccaccaacgattcggtgcagcagcttgcatcccatctggcagagaacgtggtctttttgccgcagaaaaccaactgcggttttgcagcggcgaacaatatcgggatccgccgcgcgctggaggatggcgcccagtgggtgctgctgctcaataacgataccgtctgcgcaccggatatgctggagcgcctgatgcaggacacgccggaaggggcggtgtcctgccccaaaatgctgtttttagcccagccggatgagatctggtttgcgggcggcacgctggaccgcagtaccggaaaggtggagcacctgggcggccactgtaaggacggcccggaattttcccagaaaaagcaggtgaatttcattactttctgctgcgtgctgctgccgcggcaggtcattgaacaggtgggcctgctggacgaggaactcttcatgtactgtgaggacgtggattactgcatgcgcttggacgatgcaggagttcccatgtggtatctgcccgatgccaaactgtggcataaggcgggcggaacggcgggcggcatgctgtcggtgtactatatcacccgcaatacgctgtatctgaaatgccgcggccggtcggaaagttaccgccgcttgcaggcggcaaaggcagtggtgcgcggcgcggtgagctgctttgccgctgcattgcttggacataaaaaggggcgcagctatggctattattgcggcgccaaagactttgccaagaaacggaccggccgtatggacagccggtacctggcctgatgtgaggaagcagcaagatgaatgatctgatttcggtggttgtaccggtatataacgcggcaaactatctggatgcctgcctggaaagcctgtgcgcccaggactacccaaattgggaggccattcttgtggacgatggcagcaccgatgacagcccccggctgtgtgatgcctgggcggcaaaggaaccgcgcatccgggtactgcaccgcgaaaacggcggggtatcggcagcccgaaacgcgggaattgccgaggcaaagggagaatttctggcgtttctggattcggacgaccggatcgagccgacgttcttgtccacactgcgccacattatgggagatacagaccttgccatttgcagcgtggaggacggcggacaatccgcaacaccggcagccgaaagcggcctgacgctggatacgctgcgccggaccccgtcccggtatgcggatttgacgtatatcaattattccatcaataaattgtatcgggtttccattatccggcagtatcgcctgggattcccggtaggcgtccgccgcagcgaggacgtcaatttcgtgcaggattacctgatgcattgcaagaccatggcggtcacgtccgatcagctgtatcactatgatcagcatgacggctccgccatgcaccggttttataccggtgtctgtgacgacgagatcccgctgatgaagcggcagtatgacctgttccacccggacggtcccgacagcctgaagccggaggaagagatcgccttccagaaatggcagttcggcaaggttctgggcattctgcgctatatcaacgcatatgctccggatatggccgcaaagcgcagctacgcccggcagcttttgcaggaaccccacgcccggcaaagtatcctgcagcccccgcccggtaccggccgcaaagcgaaactggcggccttttttgtgaaaacgaatgcttatgggccgctgatgaagctgatggaaagtatgtaaatttataaaaaatgcccctgctgctctttcgaaacagcaggggcatttttgtgcatgatgttactttccgagaatatgtttgatcttgcctttgaccctgcgggcaagcgcccgaggcagggaaggctccggaggaagatcgatcagctcgtcacaggagtgaccggtgtatttttttaggatatattcaaatccttcagcaaaatagtctgcccagaaatcatcataagtctccggtttttcggtaggcgttcgcaagttttgctgcaggcactcaccctttgctagcaagacagaatgggttagtgctttcttttctatttgttgaaaagctgcccggcctttttcggtattgaggagaacgagagatattccttcgcccggattgagcgatggattgtttttttcaatgccccaggcatcacccacggtcaaatcaccggggcggtcaagattggtaaagcggcagtcatagcaactggttgccagactattatttgaatagaacagatctgaccagcattttgatgtttttcgctgtttgttgaaataaagaatcgacgattcttcgacggttctgtcacgaaagataaggcgggtgaccggttggcctacctgtgtggataccgcatggagatattcccggtagtggcgggggctgggcgtcccgtggcagatcaaatccacggtcataaggttttctgtattggcaccggcttgcttcagatagcgaagcaagccgtctacgtggcaaggtgtgccgctgaacaggacggatcttccgttggacaggtcggctcggacttgcagataagtgttgccgatatcagcctgtacatatttggaacgctggagccggtaaagttcgctctttcgttcgatgcgcagatattttacgttgagattgccatcgaacccgacaccgtacacaatgcttttttgccgtaacgcctgctcagccagcagggcaaacgccccgccggactggcttttttcccgcgcataagagtctttgcggcgcaaagcaaaagcgatgggaagattccgggcaatgtcaggagttcgcgttgtgggacaaaccttctgacataaaccgcagtcaatgcagagcgaagcatccaaccggggaacgtagaatccctgccggttctgctccatagtcagtgcggagcgggggcagacggaaacacaggcagaacagccgcagcatatggaagtcaatttcatggagatatcacctcttcagcaaagagcagtgtccagaaaatccagtgatgactgccgcaggctgcggagcttttcgtgacaggatggatagtcgattacggtatccaggtcgatctgttccgtggaaaagatatgccggtcagagagatccaggctttgcaaaatgctctccttgcgggcgtcattttcaaaaacactgtaaaaaggcttttgatacaggatagaaaacaccgttccgtggaaggaattggtcacaacaaactccgcattgcggatatgattcagaaaatcctccggcccaaaatctgcccgctggttgtgtccccgcagaccatactgtttgtaaaaatgcatttcaagtaagggaaggtcgagcttttgtgcgatggcagtggcacatttggataccatgtcgttttccattaaaaagtaggcaaacacatatttttgctttgcaggcgcagaggagcagagcaaattatagtcagcggcatccaacagcatagaaggatccagtaccgtggttacaggcttgtgcagaaggtttgaaagttctgctgcaaggctggcttcccggaccgaaacggcatcaaaccgggagagcgtttcccggaaataatccacttcggcgggtggaatctgtttggtaaagatactggctccgtaagaaattttgcgggcctttgtgggaaagtccagaaaatagaccgggtccagaccaccggtcaaaaagtcggtccaaatctgatcgctgccgcagatgtagcagtccaggtccagagcggctacttcctgcaaagaaagaggggggaggtcgttttccagcaggacctttcccagaaaagcatcgaatttgacccattggcgccgccacgaagcataagagtatgcccattgacggatggcgcgcagatcgtttttccagcgggaacgatgaaagacatcccgtttggacacaggaaagggcagccgcgcagggtaacttgccgtgatcgcggggttttggtagttgataatatgaacatcatgtcccttacgccgcagaacggtccgcagggcgtacgcctgcaaaacagcgccgtaattgtgggcgttgtggaaagtcagtataccaattttcataaagtttgatgatatttgtcggccagctgttccagccggcggaaaaagagagcttttgaagttttctccacaggttggccgtgtttcagcagacgcttgacggcacctttcactttttggccaacggtgggagggggaacattttcagccggggcgggagtgcgctcgcgaacagtcagatggcttccgccgtattctttgagtgggagaaaccagtcatcagaaaggtggacttcaaacaaatcaggctggtaccgataggccatcaagagcagttgctggtcatcgtcaatggcacctaacatgaccagagactccatggcccgaagtgtcagtttccacagtgcttcgcaagcatggcttggggcgataacgggcgctcccataagaatctccgggaagagttgcaggctgacaaggggagaagcaatatcacaggactgtaaactgaacaactgaactttgggagaaaagtcaaaacaccattcatagtcgaattcttccggattcgggaagaaaactcctccatgattaaagccgaaatcgatccaggcgacctgactgccggtcattccgcgggaggctgcatccgccatacaccagtatttgagcagcatgatatagtcatagtcggcccggttggacatggcgttgggatacagccggaatttacggaaatcctcatcctgagcaattttctgcattcgtgtatagagctccggctcgatagcaaaaggatcctccacagggataactgtcgtctgtttttcaaggccaaaaccagcacggatggctcggacacgatcggcaaattcgggggcagtatagacaaccagagggttgcgcatccgggcccaaaatgcgaaatagtcaaaatactgatcgttggaacgtgtatagtctgtgttttcaaaatgttcacggccgatatcaaaaaaggcagtgaccagtgtgataggggtcatgggatctcctccgtcctgaaaacgttcaaaaaggcctgatacatttttgcagaagaaaattcctctgcccgcttgcgcgcagccagggacatccggctgcgcaaatcagtgtcggtggtcagggtttccatggcgtgggccaggtctgtgacaaggccgagtccgcgatctgccagtaacgcgcaggaagtgtccacatattccaccagaccgcctgagcgtgttgcaataatgggcagaccggaggccatgccttcgatggcaacgagaccggcagcttcttcacataaagagggaactacttgaaaatctgatgactgataatatcggtaaagatcgcagttatccacataaccggtcatacggatacggccgccggagcgggccgcgagttgttccagccgggcggcgtaatcggatgttgcggcagttttgaagtttggcgttccgatgatccataaccgcagtgaaggatggttgagcaactgaaaagcctgcaccagttccagagcgcccttgacggggatcagacgcccgcagaatactgctacggtatcctgctctgaaaaaccgtattcctgccggagctgccgccgttcttcggtagagattctacgctggaacatgctcaaatcaatggcgttgtgcactacatgcgcgctgccggaggatgaggtgtcgttggacaaccaggcgcggcgaaggaattcgctgacacagatcacgtgggaaaagatatgattcaggttgggaagatcggtacaatcgtgatgcagatgtaaatacacccggtccgggccgaactcttcaataaaagtggaaaaaaagggatagtctccaccttcggcgatgatgtagtcgcagcccaaagacttggcaagacgaaatgcccgccagtaataggggccaatagccaattcactgtggcaaacaagctggctcaagtggtctgcaatgctgtatcgcagtgcgttcagactgactttctggcgaaggggctgtggttcaatatagataaagtgcgtgtaccggaaactctgcgcctgcttttttgcctggacatcagggcgggaaggaacataaaaaacaaactgttgctgacgctcgttttcctgagcaagcagtgtaatcagagtttcaatcgcaccaccttgcactgctggaacaggaaggaccggtggaggcaacagcatgatctttagtggtcgattattcatcgtggagcacctgtatcgtgggaagtttgacatggcccatccatttgtggatccagtcatggaacaaaaagtccgtctggtcttccggatcgggagaaacagtcatgctgaacgcgtattgtacattatccaggttgacgcggttgccgttttcatctgcgttgaaaagaagcagatccacatggtatttaccgggcgccagattgttgacggggaactcaaacgcatcctctcgatcttccccgggatgtgcatcgcagattggggtactgtaagtcagtcctacaatgtcatcgctctgatattttacgataaagcgcaaacggacctgtgcggccgcttttttgcaagaccagtgcagtcggaaacgaagcggatgggatgcactgatctgggagctgtccagatgaatgtccagcattttcaggtcataggttgcgccgccgtgccgcttgatatccgcaaggcgtgtgctgccgccgctgccctcgctctgcatataacggttgatggattcttccacatctccgctgtaaatgattcgcccttgatctaaaaccatacaacgatcgcagagcgttcggacggtggccatgttgtggctgacgtacaaaatagtacggccttgattggcaatctcacgcattttggcaatgcatttgttttggaaattcatatcgccaacagccagaacttcgtccatgatcatgatctcgctgtccaggtgtgccgcgacgctgaacgccagcttgacatacatgccgctggaatagcgtttgaccggtgtatcgatgaaatcccgaacctcggaaaattcgatgatgtcgtccattttggcatcgatctcttctttggtcatgcccaggatcgcgccgttgagatagacgttttcccgtccggtcatttccgggtggaagccggtaccgacctccagcatactggccacgcggccgtacagatcgatggttccctcggtaggggcggtgacgtgggtcagcagcttgagcagcgtgctttttcccgcgccgttggacccgataatgccgacagcctcaccctttttgaccgtaaaactgacgccgttcaacgccatgaatttctgcccgatcaggcgctggtcggtgccgatcttggtattgggatcctccttgccgcgcttgcgggcccaccagctctgcagatcgccccgcagggtgccgccgccgatctggcccaggcgatattgctttttcaatccgtcgacgcggatcatgatgtcactgttctgttccatgctccacctctctgaatcaaacggtatctacaaatgttttttcgactttgctgaacaggctggcaccaatgaacagcaatgccaatgtcataacagcggcaattacccatccaatcaccgaaacctctccggttccgaacaaaattgcccggaaactttccatcggtgcagtcatggggttgagcattagagccaggcgaagaggcttgcttgtaatcatcgagagaggataaaccacgggggtggcgtacatccagagctgtacgccgaaggtgacgaccaccgcgagatcgcggtagcgggtggtcaggctggacacaatgacaccacaggcaagacccaacagaccgacctggagcagtaccggaatcagcaacggcagacaggcccagttggggtgtacttcacctcggataaggtaaaatgccatgatgaaggcaaacagcacgaactgtacgcagaaattgatggcggccgacagcatggtcgagatgggcattgtcaggcggggaaaatacaccttgctgaaaataccggagtttgccgtaaatgtattggatacccggttgacgctggtggaaaagaaggtccacagcgcggtgcctgccatgtaaaaaggcagttgaggaacaccgtcggtggacagactggcgatggtgccgaacatgacggtatacatcagcgttgtcagcagcggattgatgagaatccaggcgggtccgaggatcgtttgtttgtaaagtacggtgaagtcccgtttcacaaacagccagatcaggtctttatatcgccagagttccttgaaatcgatctgggaaaagcccttggcaggggcataatgaacatgataatttggtttcaattgttccattgcgtcagaaaactcctcacttggcttggctggttttacgatggcgtttccattgggaatactgggcatacaatcccggcagagtatacttgaatgcgcctccgcgcttttggtcggcgggcagccggggaaatgatgcccggaaagcctgcctgccgattttatggatctgccgcagagcggttttgtctcctgcgcagagagcttcagcccgttcgatcattccggtcagcgtgctgtaatcagtcacggtataatccggcagtttttcccggacgaaagccgctctctgacccagggcttccagtccgtccagcaggcttttggtgctctccgtggccatgatgctgtccggccggcgatagtaggcatacagcgggagctttacccaggcgattggctgagcctgatagatcaggcggtaggtgacaaactcatcctcatggatacggcccacgggataacgtaccccgttccaaagttcctgacggtagagcttgttccaagccacgatgaactggacgtttttctgatcgtcataaaaagtgtcccacagttcccggccctccagataccgaactgtgtcggggccggtcgtgaccggcggaggggtcggacggggaaagtccgaggtatgataaaactcgcacatggcaagccggcagccggggcgggccgccgctgcccggtacagcagctctgccatctgaggatggatggtatcgtcgctgtccacaaacagaacccaatctccccggcaggtatccagccccgcattgcgcgcgctggaaaggcccccattctctttatggatcacccggatgcggctgtcctttttcgcccactcgtcgcacatgacgccgcagcggtcggggctgccgtcgtccacaagcaggatctccagctcgcgccaggtctggtccacgatgctctggacgcaggcgtccagatacgcctcgaccttgtagaccgggacgatgactgaaatcaggtcgggcatggggcgtgctcctttccgttacacttcgccgcgctgcatggcgctttcataggcggcgcagacctcggcggaggggccgtccccccgcacgacgccgtggtccagccagatggcccggcggcagagttcctgtacctgctgggaattgtgggagacaaacaacaaagtggtgtcgcccgccagcatgtccgccagacgcttctggcatttctgctggaacatgaagtctcccacggccaggacttcgtccaccaccagcaggtcggccttgacctcggtggccacggcaaagcccagccgggccagcataccggaggagtagttcttcaccggcacgtccacaaaatccttgagctccgcaaagtcgatgatggactcaaaatgctcctgcatataggcccggtcatggcccagcaccgcgccgttcaggaaaatgttctcccgggcggtcagttctaggtcgaagccggcgcccagctcgatcatgggagcaatctcgccgttgacgcggacgctgccctggctgggatacataacgccggcaatcaccttgagcatggtgctcttgccgctgccgttgcggccgatcagggccaccgactcgccacgctccacctgaaagcttacgtccttgagggcgtagaactcgttgaacatcagctggccgcgtagcagcttgacggcgtattccttcaaagtttcggtcttttcctgtgccagattgaagcgcatcgacacatggtcgacgttgatgatattcgccatgtccgtgcctcctcagatatacaggatgaaattccgctgcaatttgcggaacacccaaagacccaggcccagcatgaccacgctgctgacgatgcaggcgatccaggtattggggccggggatgttgccgtaaatgaccaggttgcggaacagattgatatagtgatacatgggattgaacttcatcaggtcctgggcaaagggcggcagctgctcgatggggtagaagatgggggtggcgtacatccaggccatggtcaggatgccgaacaggtactgaatgtcccggaaatagaccgccagcgccgagagcagcagcgccatgccggagcagaacagaaattcaaagatcagcggcacccagaacaacagcagggtggggtacagggtggcgcgggtgaacagcatgaccagcaaaaccgccgccaggctgaacaccatggtcacaaaactggaagtgacacggctcaaagggaagatgtatttgggaatatagacctttttgatcagcgacgagttgcccagcaccgaagccatacccatgttggcgctctcgttgaagaaggtgaagagcgtgttgccgcagatcaggtacagcggatagttggggatgttgctgctgaacatatagctgaaaatgacggtctgcaatgccatcatcaaaagcgggttgaggatgctccagacatagccgagaaagctgcggcggtatttgaccttgagatcgcgggtcacaagttcccggatcaggggttcgtacttgcgaaaccgtgcgaagctctgccgccgagcactttgctgcgagtcctgcatgatggaaaacctccaggcgttttttcgtccggggagaccccggtgcagacaaattcatattattatagcacataccgctgcgtttggcgacaccaaaacgcaaaaattacagcacggcggcaaaaaagccttgtccccggcccggacagggagggagcaggcggttttgccccgccgctgtacaagccgccgccccatgcgctataatagcaggtacgatcaaacgggcagacagggaaggaacaggactatgaaaaggctggtcatcgggatattggcccacgtggactcgggcaagacaacgctgagcgaggcgatgctctaccacgcgggggcgctgcgcaagctgggacgggtggaccaccgggatgcctttctggacaccgatgccctggaacgggccagaggcatcaccatttttgccaagcaggcggtgctgcgcctgccggataccgagatcaccctgctggacacccccggccacgtggacttttccgccgaggccgagcgcgccctgcaggtcatggattacgcggtgctggtcatcagcggcaccgacggcgtccagagccataccgagacgctctggcggctgctggagcgctaccgggtgccggtgttcgtctttgtgaacaagatggatctggcgggggctgaccgcgccctgcgcctggccgagctgcggcggcggttcggggacggctgcgtcgatctcaccgaccccgcctgcgccgacgacctggccctttgcaatgaggaactgctggagaccgtcaccgagggcaaaacgcccaccaaagaccagctggctgcggccattgcccggcgggaggtctttccctgctatttcggcgcggccctgcgcctggacggggtggacaccctcaccgatgccctggataccctcacccggcagccggaggccccggcggaattcggtgcccgcatcttcaaggtcacccgggacgacagcggcacccgcctgacctggctgaaggtgacgggcggggaactcaacgtcaaggacgagctgtcctcccgccccgacgcccgcaccccctggcagggcaaggccgaccagctgcggctctactcgggggcgaagttccagcccatcagcaaggcgctgccgggggcggtctgcgccgtgacggggctgaccgacacctaccccggggaaggcctgggctttgagcccgacgctgtcgcccccgccctggaaccggttttgcgctaccatgtgcagctgccggagacctgcgacgtccacaccgccctgcgccagctgcgggaactggaacaggaggaccccctgctccacgtggtatgggatgagcggctgggggaggtccatttgcagctcatgggtgaggtgcagatggagatcctgcaaagcctgctgaaacgccgcttcgggctggaagtgacctttgacgagggcggcatcctgtataaagagaccatccgcacccgggtggagggcgtgggccattacgagcccctgcgccactatgccgaggtgcatctgctgctggaacccggcgagccgggcagcggcatccggctggattcctcctgccgggaggacgccctggccgtcaactggcagcggctgatcctgacccacctggcggaaaagacccatctcggccctctgaccggcgcgcccctcaccgatgtccatatcaccctggcatccggccgggcgcaccccaaacacaccgagggtggagactttcgccaggctacctaccgggcggtacggcagggcctgcgcaccgcccaggcggcggagggctgcgtgctgctggaaccctggtacgagttcaagctccgcctgccccaggaaaacgtaggccgcgccctggcggatatgccccgcctctgcgccgagtttgaagcccctctgtccgagggggagacggcagtcctttccggcaaagcccctgtctcggaactgcggggctatgcccgggaggtagcagcctacacccggggccggggccagctgacctgcctgccctgcggttacgccccctgccataacgccgaggaggtcatcgccgccgcaggctacgacgccgacgccgataccgacaacaccgcagactcggtgttctgctcccacggggcggggtacaacgtccgttgggacgaggtccccagccatatgcacctgcccagcgtgctggaccgggatacccgcatggcccagagccgggcgcaggagggcgaccgcagcgcccgcgccgcccgggcggcggcctaccgggggaccctggccgaggacaaggagctcatggccatttttgagcgcacctacggtcccatccgccgggatgcccgcaaggccatgcgcccggtgaaaaagcagccgcccgccccgacagcaccccagacccccgccgcgccccggcccgaaggcccagagcatcttctggtggacggctacaatgtgattttcgcctgggacgacctgaaagccctggctgccgacaatctggacgcagcccggcgcaggctcatggacatcctctgcaactatgcaggctaccgcaagtgcgtgcccattctggtgttcgacgcctacaaggtcaagggcggcagccgggaagtggaaaaataccacaacctctacgtcgtctacaccaaggaagccgagaccgccgacatgtatatcgagaaagccacccacgagatcgccaagcagtaccgtacccgtgtggtcacctccgacggggcggaacagctcattatcctgggcaacggcgccctgcgggtgtcctccggggcgtttctggaggaagtccgcgccgtggaggccgagatccgggaattcctgacccagtaaataccacaaagcaaaacaaaccgcagagccgggcaggctctgcggtttgttttttggggagaaacggattatttgcctttatggatgcggaccaccagcccggacagggccagcagaccgatgaggttggggatgaccatcaggccgttgaagaagtcggagagcttccagaccagatcgaccttgagggcggagcccaccagcacaaagatgaccacgatggtgctgtacaccggcagcagctttttgccgaacagggccttgaagttgacctcgccgaagaagtaccagccgatgatggtggagaaagcgaagaacagcatgcagatggcgatgaacacatcaccaaaggcgccgaaggactggttgaaggcgccctgggtcagggcggtgccctccaggccggtggggatgagacccgaggtgatgaccaccagggcggtcagggtcaggatgacgaaggtgtcgaagaaaacgccgatcatggcaatgatgccctgatcctggggcttgtctaccttggcaagagcatgggcatggggggtagagcccataccggcttcgttggagaagaggccgcgggccacgccgtagcgcatggcctcccgcacggtcacgccggcaacgccgcccgcaatggcctggggctcaaaggccagcacaaagatctgggcaaaggcgtcggggatcaggttccagcgcatgaccagaatgatcaggcagccgatgatgtaaaacaccgccatgacggggaccagcttttcggtgacggaagccagacgcttgacgccgcccaggaagatgaaggccgcgatgatggcgacgaccacgcccacagccagcttgttgacgccgaaggcattgtggaaggcatcgctgatggagttggactggaccatgttgcccatgaagcccagggccagcacgatggctaccgagaagaacccggccaggaacttgccgaacttgcccttgaatgcggcccggatgtagtaggcggggccgccggtgacctggccgtctacggtggtcttgaaggtctgggcaagaatggcttcggcatagatggtggccatgccgaagaaggcggacatccacatccagaagatggcgccggggccgccgcccgccagagcggtggcgcagccggtgatgttgccggtgcctacctgggccgctacggcggtggtcagtgcctggaaggaactcatgccgtccttgccggctgctttaccgtggagattgaacccgctgaacatgtcccgcagaccgtgaccgaacttgaagatctgcacaaagcccagacggatggtgaagtagatgccggtgccgcacagcaaaaacaacaggatgttgttccacaaaaagtcgctggccgtgctgaccagttgagtaaatgcttccatgtttcccactcactttctaatttgctggccgttcccgtaccgcagggggaaacggctccccgccgctcaaatgcctttcagatgcggcgcgttgaaacctagggtatcatgtttcttttgtaaagtcaagtgtacgtgtatggcatacagttcgcttgcaaaggtgcaggggatgtggtatcatcagagaaaaacagcggaatctgtggaaaaagtacagggaggcgtggaattatgaaaagcatcaaacccggacgcggccattccgccatggagggcgtcgccggtattttcgttgtgatttttggaatcatctggacagtgctggccttttccatcacccaatcggcgggcatcattggggtgatcttcccgttgttcggcgtggcctttgtggctctgggcgtggtgcgcacggtctactccctgcgcaatgccttcggggagaatcgccattcggagtacgacatcaccgaggacggggaagaaccggacccctttgacccccgcaacgccgaccgggaggacatgtaccgcggcactgcccctcattcccagaccccaccgccttcggagggcgggttctgcccctactgcggcgcgccggtccaggccgactacgagttctgccgccgctgcggcaaacggctgtcctgacaggacggcatccatcctgacaaaaacacagcgccccgccgggaaacaaagcccggcggggcgctgtttgtcatatgggaaaaagaatgcgtgggacggtgtcatcccgcgctggcgtcctcgaactgggcgcggtagagggcgcagtaagcgccgcctttggccagcagctcggcgtgggtgccctgctcggccacgcagccgttctgtaaaagcaaaatctggtcggcgttctggatggtggacagccggtgggcaatgacaaagcaggtgcggccctgcatcagggtcagcatggctttctggatgcgctgctcggtggcggtgtccacgttggaggtggcctcgtccaggatgagcatgggagcatccagcagcatggcccgggcaatggtcaacagctggcgctgacccttggaaatgttcgcgccgccgtcctgcaataccgtgtcgtagccgttgggcagggacaggataaagcggtggatgtgggcggcccgggcagcgtccatgacctcctgccgggtgacgcccggcttgccgtaggccaggttttcgtaaatggtaccggtgaacagccaggtatcctgcaataccatggagtaagcccgccgcaggctggcccttgtcagggtgcggatgccgtgaccgtccaccgtgatggtgccgccgttgggatcatagaaccgcatgagcaggttgatgatggtggttttgcctgcgccggtggggccgaccacagcgatggtctggccgggccgggcggtcaagttcagcccgtgcagcaccggccggtcgggggtatagccgaagtccaccccggtgagggtgacttctccccggacggcggcagggtcaaggacgctggcgtcgggcgcgtcaggggcttcctccggttcgtccagcagggtaaagacacgctccgccgcggccagcgtggactggagctcgctgaacagattggcgaactcgttgataggccccgagaacttgcgggagtacagaacaaaggaggacacgctgcccagggagatccaacccgccatgtacagcaccgcgcccagcgtgctgaccagtgccagcgacaggttgttgatgaaccccaccgagggtcccgtcatgctggcaaagcagtcggcgcggtagttggcggtgcaggcccggacattcttttcgtcaaaacggtcgagaaagaccttgccccggccataggcccggatggtctccaggccgccggtcatctcttcggcgtagccgttcagctcgcccagagcggcagagcggtcccggtagaggggacgcactttccgcgcccggtagcgggtgaacaggatggacgccgggatggtgatgagaaagggcagaaacagcaccggagagatggacagcatcatgaaaaaggaacccaccaccgtcaaaaggttggtcatcatctggatcaggtcggtggacagcatggtgctgatggtgtcgatgtcgtaggacagcacgctcagagcgtcgccgatggcgtggctgtcgtaaaaacgcacgggcaggcgcatcaggtgctcaaatacatcccggcgcagccggtagaccacgtcccgggcaatgcgcaccatgagagcggccagcaggtaactcaatgccgccgacacaagataggcaatgagcatccacttggcgtagtacagcaccgcgtcaaaatccacctggcccgtgccggggcgcagggcatccacggcatagccgctgagtttggggcctaccagggccagcagattactggcgacgctgatcaggatggccagcagcaccagccaccgggaccttgccagatacttccacagccgtttcagaatcacggcggcattctgtttggggcgttcaaaggattttccgccgccaccggcgggaccgcccagacctttgctttctctcatgtcattccacctcccccatctgtgcctcggcaatggtgcggtaggccgggcagctctgcatcagttcctcatgccgcccctgaccgatgacgcagccttcgtccagcataaggatgcagtcggcatggcggatggcgctgacccgctgggccacgatgaccttggtcacgccggcaaattcgtgagccagcgcccggcgcagggcggcgtcggtcttgtaatccaaggccgaggaactgtcgtccagaatcaaaatctccgggctgcccgccatggcccgggacagcaatacccgctgcttctggccgccggaaaggtcggaaccccgggcggcaatgcggccgtccagaccgccggggcgggtctcgataaactctgcctgggcgttctgcgccgctttttgcagggcatcccggcccagatcccggccgaaatcaatgttgtccgccagggtcccgccaaagagaaagtcgttctggaataccacgccgaacattttgtgcagttcctgggcggggatgctgcgcaggtcccggccgtggatcaggatgcgcccggcgtccgggtcataggcccgcagcagcaggcggagcagggtggattttccgcagcccgtggggccgatgatgcccagggtctgccccggctgaagggagaaacttacattgtacagatctttttccgccttgccgtaggaaaagctgaccccctcaaaggtgatgtgggcgtcgtccggggcgcgggggatgggcaggacttccatatcggaaggagcctgaaggacctcggccacccggcggccgctggcaatgcccttggacagcatgacaaaaatgcgggagaccatcatcagagcgttgaggatcatggtgaagtagctcagaaaggcgatgatggcgccgggctggctggaccccgcgttgacccgcagggcgcccaccacgatgacgccggtcagccccgcgttgaggatggcgttgatgagcgggttggtggcgttcatcaaaagaccggcgcgatattcccggtcggcggtctcccggttggcgcggtcgaagcgctcgctctcatagctgaccttggacagagcctggatgacccggatgcccgccatgctctcctgggcgcggcggaccatgccgtccacggcggtctgggtcgcggtatacaggcggatgccctggcgggacagcgcccacacgccggccaccataaagggcagaggcaataccagcacacaggccagcaccgggtccaaaaacagagtcatggccacgccgcccagcagcatgatgggggcacgtaccgccatgcgctgcatgcggtcgatcatttcatggacgtggtaggtgtccgacgtcaggcgggagatcagcgacggcgtggtgaagccgtccacctgtgcgctggaaagccccagtacccggcggaacagatcaaaccggatgcgctgggtgacctggcgggagatacccgtggacatgcggttggcgataatgttgaacacaagccccgccgcggcgcacagaaccatcccgccgccccacagcagaatggcgtccatctgctttgcaggcacgaactcgtccagaatgacctgaagcatccagggcagcatcagctcggccagggtgccaaggactttgatgaccatttccaggacgatggcagcccggaagggcatcaaataggagaaaatgcgtttcatgaaattcctcccctcaaaatgacagcgggcaaaggtcccgcattggtcagacgatctcttcggcccggtcggccaggcgggccagcagtttgtccagggcctcccgctcggtgtcgctcatgccctccagcagcagggtgcgccaggtctgccgtgctttgcgcacaagaggcaaaacctccagggctttgtcggtggggtagacctggatggcccgccggtccccggtgcagcgctgccgggtgatgaaccccgcgtcctccagggcggtcatctgccgggtgacgctgctgcggttgacgtgcagctcccgggcgatctggtcctgagtgatgccgggcttgcggcatataatggggatgtaagcgctctgataggaactaagccctacgctctgcaaagcctcgtcctggtggaggttggcgcagcgggcaatggtattgatgtaacgcatggtatggtattccatgacagtgcctcccatgagaattgttgcaacttgaattgttgcgtctgcaataattatgcgcgcaacaatccgatctgtcaagatgcacccatggtttcgggcgggaatccccggtatcattgccgccgtacactcccccttgacaagaggggcggcagatggtacactagcgttgttagctaaggctaacgacgcgatgaacaaaacagacacggtgcttctgcccgcggccatgacccggcggtcctgcacgcagacagagcagccgcgttattttttacccgaatgttagcttttgctaaccacaagccgacctgccgcccgggctgttctgaacggcggcggggatgcaagctgatccaaaggaggtttccatgctggaagaatatcttgtcgcccactgcgcgcccaccctggcaaacatcaagacggccagcctgttccgctgcccctgccccggacccggggagctggaagcctggcggcagacgctggcggccaagggggtggaactgacggtgctgcggtgcgacggcacccatgtgctggtctatgtctatcgtccgtcccggctgcgggccgacctctgccgtccggaggcagaacgcctgctgcggccctatggctataccgccaccgacgaggaatcggctctgcagcgcctgcgggaacgcctgtccgcaggcggggactttccccatgaaatcggggcctttctgggctatccgctggaggacgtggcgggctacatccataaccgggggcagaactgccgctgtatgggctgctggaaagtctactgcaatgaatgtgaagctcggcgcacctttgccaagctgaaaaaatgcagcgaggtctacggtcggctgtggcggcagggacggacggtgccggaactgaccgttgcggcctgaacagctctgaatatttgaatatggtccatccgtgggcggtgcgtctgtggggaaaaactccccgcaggcgtgccgtcttttgtttttgggcgaaaagccggacaccggatacaaatcggacgaatttggccgtataataaaagtagaatagaaagacggagaagatcccggtgttttcacccggggcagtaaaggagcgcaaggccatgaaacctatcctcattgtggatgacgaggaagccatcgtcagtctgatcaaacggacgctgacaggggcgggatacccctgcgtcgccgtgaccagcggcatggaggcggcggacctgctggaagaaaagcattttgaccttgtggtgctggacgtcatgatgccggaagtggacggctacgatctgctgcgctatatcctgcccaccggcactccaaccatctttctgacggcaaaaggcaccctgtctgatcgggtgcggggcttgcagatgggggcggacgactatatcgtcaagccttttgagcctgccgaactggtcgcccgggtggagagcgttctgcgccgggcggggcgcggcacggtgagcttttccgcctgggacgtgaaggtggataccgccgcctgccgggtgaccaaagggggcgagccggtggccctgacccccaaggaatacgatctgctcatgctgctgctgcgcaaccggggcagtgtgctctaccgggattatctgtacgagacagtctggggggaggaggaaatgctggacaacacccgaaccctggacacccacatccagcgcctgcgcaaaaagctgggctgggagaacaggatcaccaccgtccaccgcgttggctaccgattggaggcggaagaaggatgaaacggtttgccatgcccaagctggccctgcccgtggccctgctgtttgccctgtgcgcctgcacagccgcgggctccgggagtgctccggcacagacggacacgccctcctccgccgcgggacctgtgaccggggaggacgcggcccaggcatcctccggggaacaggaggttccggtaggctctctgcacatggtctgggctggcagcgatgtccccagtgccgccggcggacagctgtacgagacggcttccacctatctctatgacccccggtgcctcaccgccgtggacctggagaccggagtgcagcagatgctgtgcaccaagaccggctgcacccatgacaaccctgactgtgaagcctggatctgtgaggcggggttgagcctggcccagtgcggtgcttttgcggaggacggcaaactgtaccgcgtctatgccaccgacccgcaccacggcatgggcggggcgctgctctccggtgtggaggtcagcagtctggacggcagcaacagtaccctgctgtgtgaggattttgtccccaacggcagctgcatcgacatcacctggctggcggatgacgggtatctgtatgcctgtatccagtccaatcccgcggtgaacgaggagggggagaccagaaatcagttcacggtagagcgtatccccaaaacgcccggaagcacggcggaactgctctaccagtggcagagcacccgcgccgacaacatggccgagagcctgcaggcggcgggcgtcagccacgggcagctgctggtgatgctgaccgagcctcccgccgaacacaccggaagtctggccggagactatgccgccagtaccacgaccctgcgcgtcctggacctggaaaaccgcaccctgggggaaaccctggactgctggaccggggacagcggggacctttccctgcggcagatatacaacggtctgctgtggaccatcgacgaggaaggcgcgctcaccgccacagaccccattaccggggatacggtggaaaactgtcccggactctggctggaggaaatggagccccggggcattttcgggctgtacggccgccgcctggtggtggacggctatgaccgggcaaacgacctggaacaccggtacgtctttgacctggataccggcacgatgcagcgggaactgcccgccacctggtacaaggaggccaaccagccccgcctgccctcccttatggccgacgacggggaacacctgatgctcaaggtggaggaacgacccgtcacccgcaccacggtgggacaggacggcgtggtgatggagtatccctccagcgactcggtctatgcggtcatcccggcggaggactacctggacggcagcgaggactggaccacctgcaccctgctgcctgacgaggaaaactgacgccaaaacgatacattccagtgacaatgcggacgaatttccaccgcagtgccgacacatccgcccggtaagatagcatcaaaggagggaacccgcatgaaaagacgacctttgtacatgctccgcgccctgggggccgcggcgttggccgggggattctgcctgacggcgctggcaggctgcgcccctggggcacagcagtccccgccgcctgctagttctgaaactgccgggacagggggcgaatcccagcccacccccgcggccgaaacaggagaggtgcgcatcctggcgggcggcgtcctccacgccggcgggggagaggatggcttttatctgccccaggtcatgggggacggtgtgttcggcacggtggtggataccgggaccggccggcagcgggtcctgtgctctttgcccggctgtgaccataccggtcccgactgcgagggctggatgtgcagcgcggaacccttgggagagcaggccgccgacagctgcgccctcctgtgcgacggcgacatcctgctctggctggtctttgacgacccggtgaccgaaaagcagagctatgccgacgtcagcgccccggacggcaccggccgcacccggctggccgataccctggaaggaaactgcccggcctggtccaactggcccaacggattttttaccgacgggtcggactactacttcctcacctcccgggacggctcggacgcggttttgagccgactggaccccgagagcggcgagaccaccctgacggaacttcccggcggcagccccggcacccttatcggcaccgacggcgaggccgtcctgttctggcagcaggaggatgatctgggccgcctgcttgccctggacctggctgcggcccgggtgacccaacgggacagctggctcaaccaaacgcccggcgttttgggggcggcagccgccgacggaacgctgtacgcggcgacggagcaggaggaaaaaacggtgctgctggagggcccggcggaaggttcccccacagcgctgtccgagctgcccgcctcccccgatggcgcccaggccgtggccgccgctctgaaaggaccctttgacggctgtctgatgatcgatctgtattaccccaacatggccgacggggcatccgctcccgcccagcgctgcggggtggagctggataccgggaactgccatccgctggaaaacacctggcagaccgacgcatcccccgaaccggcactgcttcttgccgccggggaggacaccctgtggctggccatgacccacagcccggcgggcagcgtcacggtggacgaccagggccggccctcccgcaatgagggcagtaccgcacagacggtgctggccgacgccggggaatacctgtccggcggtactgagacccgccccgtcaccacgctgacggagacgtttaccgctcacatcccccactgaccccaacctgcaggaaaggagtgccagggcatgaagttttccaccaagctgagcctgagctttgcggcgctgctggctgccgccctgtgtgcggtgggccttgccatggtgggccgcagctttgccgacagccttgcctcggcggagcggactttcagcacccagcagtacaccgaaaaatataccattgagagcaccatcctgacccagacggggacctccggcacggcggtctacaccacttccgccatgagcggggcggtacagagctttgccgaacagacccccggcagccgcatggccctgtatctggacgggcgcaacagcgtctattccaacctgccccggggcatctcccgcacccgccagctggacgccctggaagccggcaccggggaaagcaccctggtacatgccgacggggcggactggttgcttctgaccgtgccgctcaatatccccggggtggatgcggtgcttctcagcgcttacgatgtgaccagtgtctttgccagccgggacgcccagcttgccgcctggttcgtggcggcggtgctggtattggctgcgggcaccgctgcggcgggggcggtcagccggtcgctgacccgtccgctgacccggctgcaaagcgccagcagccgcattgcggcgggggactacacccagcgcacccaagtggagaccgatgacgagatcggcgccctcagccatagctttgacgagatggccggggcggtggaaagccgcgtggctgctttggaccaaaacgtccgccagcagaaggactttatcgcggcctttacccacgagatcaagacccccatgaccagcatgctgggctatgccgacctgatgcgcgcccgcccccagagtgccgagacccagcgggaggccgccggttatatcttccgggagacccaccggctggaggaactcagccgcaaactgctggccctgatggggctggaaaatctctccgacggggagaaaagcgccattgaaaagaccccggtctccgaccgggccctctttgcccggctggaacggggcctggcctcggcgcagcagccggaagtcccggtcagctggcagccgggagactgcaccgtgctggccgatgccgccctgctggacgaccttctgcgcaatctcatcctcaacgcccggcgggcctgtgcgggcaaagccgacggccgggtgacggtgtcctgccgggcggagggagataccgccgtgtttgccgtgcaggacaacggctgcggaatcccggcggaggacctgccccgggtgaccgaacctttttacatggtggacaagtcccgcgcccgggccgggggcggcagcggcattggcctgacgctctgccgccgcattgccgaactccacggcagccgcctggaatttgagagcgcggtggggcaggggaccacggtgtccctgcgcctgcccctggctcccacaccccgagaggaggacgaccatgaatctgcgtgatctgaaaccggtccgccggtttatggcgctgggggcaaggacccgccgcacggtcctggtatgtgccgcggtggtggcgatctgcctggtgctgccctttggcgtgtttgccgcatgggacgcccttttgctgggcggaagccgcgcccggccccagtcggaagaggtacagcccctgtccgatgccgggcggcagaacgacaccgcctgcatcctgtataactgtgcgcaccttttgggcatcgacccggcccgggccgatgtgtatgagggctggaccgaacagcccctggatgccgccggtcttgcccaggcaaagagccgctgccgcacggtggtggactgggcggaggaactgggccttgtgcccgggtggcaggcggaacagatcggccggcttttggacgaccccgactgcgccctgaccgccgttaccgcaccgggcgggctgaccaactattctctggcgtacaacgatgagccggtctccacaccggagaccgccgctacgcccgagactgccgccaccccggaaaccgctgctaccccggagactgctgtaacgtccgggtattgctggctttccgtaacgctgacggcggacggcacgccgctggcgttccaatggcaggacagcagcctgccctggaacgtggagactccggcggaggcgctggaggaagcgctgaccctgatggggacggagaactttgacgactggcagcgcctggactggtccgaccgcctgcccgacgcggggcagtgtgcctactcgccccaggcacagctgtatgtcagcgtcaacttcagcggcgggctgaacatcaccgccgccagcatgacacagcaggaatttgacggcatttacggggaggaggattcccaatgaaacgacaaacccacgggattttgtgcgcagttctggcggcggcgctgctggcaggctgcggcgggccggatattgacgcgaccccggcagcacccgagaccgaccccaccggcacgacggaaactgccccgtctgacgcatcttctcaaagtgtaaccccggcgcagcaaaagccagacctgcggcctttgacccagggggcgggcaatgcctattacaccttcggcagtggccaggcggaggacgggatgcacctgatcctgtacgccattgactatgacaaacagcaggctgtccccgtatgcggcaaggcaggatgcagccacgataccccggactgtgacgcctggctgcccgaccagaactaccgcaccatcggctccaacgggcaggaggtgttcaccctgtgcaccgtggtggggagtgacgatgcttatctggagctcatttcccccgcagagagtgacagcggccagaccatggcccggctgcctgtcctggacgggcaggtctttgactggacgctggccgcggcggatgacgagaccgtctttctgggggcggtacattatgatgcacagatcggctccggcaagcccatggtccccgccgttgcggcagtctcccgggcggacggcagcgtgcagctgtacgacgtccccgacgaggcagcggccgcccgcctcgacgacaacacggtcagcaccgtctttgccggggcacagggtcgcagcctgtattttctggtttcactgcatgacaaaaacagcagcacccagtccggctgtgagctgtgggcctttgacgcggacactgttcaatggaaccaggtgaccggctttgagggcaaaatcaccaacgcggggatggaatactacgaagttccccagtcgtcccgggcggcagatccgggaagggtcgtccatgtggacaagggggagggcagcctccgtgcggtagacctgaccaccggggaggagaccacgatttgcaccggcctgcccgccgcccccggggagtacgacagctatgacgttacccgcctggaaaactggtacgccgtgacggtcagccagcgggatgccgccaccgggcaaagtcagctccagtggtttctggtcccggcccagggcggcgacccggtctccatggaactgtaccagtacagcgatgcccggggcagccagccggtccgtctggtcgacgaatacggcgggatgttctattgccagtacgatatgaccaacgagccttataccggtgtgggcaaggacggtgtggcagggacctttgacaattaccacattctttacggcctgatcggtgtggaggacgctctggcctcccgtccggaatatgtacaggtttttgtggaatgacgtcctgacggtcaccggttctgtttttgcggcaaagttcgataaagcgacaaaaatgagctttatttgacacaatgcacaaaaaatgatccattaaatttacaaaaaacctttacactcctgagacaaaacggatacatcctcgcgttattctgggtatacagaaagcgacggaaagacctgccgccgattgcgcggcacaccccggaccggaaccggtcaaggggcgtgccggtgtccggcggcatcttttttccgccaggggaagtttatcggtgagggaggaaggttacggatggatcagcacacaggacaacaccgccagagaagaaacgtctatcgcgggacccaacccgggcgccgggatacccggcctgtgcgaacttcgccgcctccgcccgcgcagtttgagacccgcgggagacatgactcctcctaccgaaaatatgcagcccgcaaacgcaagacccgggcgctacgccgtcttttgtacttggcggcgggggccatgatcctggcggcaggtgtgctggtggtgatccagatggacattttccccgtttgttcgggggaagagccggacattcccacggccgccatggtggagaccaggaccatggaagccgcgccggggttcatcgtggcggtggacccgggacacggcggcggggatatcggcgccgagggcgtctattttgacgagtgggaaatgacctggaaaaccgccgattacctgatggacctgttggaagcggacgaccggttttctccctttatgaccaccgacggcaccgagtatgaaaaggccagccagcgagcagccaacgcggtggcaggcggggcgcagctgctcatttccatccacggcaattcgggggatgaccccagctatgcgggatttgagtgctaccccgttcctccgggacgcacctataacgccgagagcctggcctttgcccagctcattgccgacggcttcggcgcggccaacgccaacctccgcggccagaacggcgtgcggtacatatattacgacgcaaacaacgaaaaacagatctatgaggtgtcggacaccagcgtccacaccgaccccacctttacgctgctggaagaatgcggctgccccgccgtgctggcggaacagtgcttcatcaccagcccccaggacgtggacgcctttggtgacgacgacggctgtcatactgccgcccagatctattacgatgccatctgtgcctggtacgaaacctacggccaggcttcctgaacctccccctttgcttctgcaagcgatatacaaacaccgcgccccgccggaaacatcctcccggcggggcgcggtgtttatgggtatgaaaacggcttactccggctgttcgggagccgtcgtctgttccaggaaatagggctcaaagtggtgcagatcgtcgatgcgggcggtggcggcgtagtaaacgccgtcggggcggtattcctctgtcagcacgttgccccggctgcgcagaatgtcggccagcgccagcttgtcgtagggcagaagcacctcgatgcgccgcacccgggcgctgagaatgtcgtccagctttgccaccagatcgtccagaccccggccggtgcgggcactggtcagcagaacggaggggtcaaaaggcaccgcaccgctcttgtcacacttgttgtagacggtcaggcggggaatatccccgcagcccagctcgtccagtacctcgtcggtcacggccagctgttcggcagcggccgggtcgctggcgtcggccacccgtaccagcacgtcggcaaaggcggcttcctccagagtactcttgaaagcgtccaccaggtggtggggcaggcggctgacaaaaccgaccgtgtccaccaagaccacgttcagcccgctgggcagtgtcaggcggcgggcggtggggtccagggtggcaaacagcatgtcggcctcaaaaatttcggccccgcacaaggcgttcatcaggctgctcttgcccacgttggtgtagcccaccagggccaccaccggcactccgctcttgcggcgggcgcggcgggtctcgccccggcgcttttccatctcttccagacggttttccagcgtctcgatgcggcggcggatatggcggcggtccagttccagcttggtctcaccggcaccgcggcgggcgccggctccaccgccgccaccgccgccctggcggctcagcgcctcgccgatgccctgcaaacggggcaggcggtagcgcaaaagggccagctcggtctggagcttgccctcgttggtggtggcacgggaacggaagatctccaaaatcagcatggtgcggtcgatgacctccacctgcagggcggcgctcaggttgcgcagctggctgccagtgagctccccgtcaaaaatggcggcctgtgcccctgcgttcaggcagaccagccgggcctcggctactttgccttcgcccagcatggtggcggcctccggggtactgcgcttctgggtcacggtggcaacggcctgcatgccgttggcctccgccagagcggccagctcgtccaggctgcgctcggcgtcaaacttgccctggtccagggcaagcaggaccacgggaacgggaccttcctccccgggattgacggggaaaagggaggtttcctcctcgggcagatcaggggtcatctcatccgaaagacggatcagttcactcattcgtttgttcctttcagcaatgcataaaaacggcaggggacttcggtgccgtcgaaccggcggctgatgccggtgtgatggtagcggaaccccgccttttccatcacggcgccggacgccacattgtcgttggcgtggcagcaggtcagccactgtccgccaaccttgtcaaaccagtaatcccgcacagcgcacagggcctcggtggcgtagcctttggaccaccatttgcggcccaggcagtacccggattcccaggcttccccaagggcggtaaaggcggcgggccaggcggggtcgggctcggcccgcatcaggctgatggagccgatcaccaccccggacgcccggacctggatggcccagtcgtaaaaatcggggcggtcgtattgtttggtgacttcgtgcaggtattcggcggtctccacccaggagcggtgggcgtcccaccgcagccagcgggtgacttccgggtcggatgcccagttgccgaacatgacctcggcgtcatcgatggtgaaacggcgcagcaaaaggcgcccggtctgaatgggctgtgtaccctgatggtccatggcgggaccctcctttccgggtgagatcggggaaaatcagatcaggtctgggggcggaacttgcgcaggatgcccatggccagctgccacattttgcgcagctgggggcgatagagggtgcagtagacgaaaaggatggcgcccacagacacgaatttcagaataaagtggtcgtacagaatgacaccggccacggtggcggccagcgccagcagaaaaccggagatggtccgcccgtagttggggatggtgcggtaatagtattgcccggtgacggtgcggtacaaaaacatggcggcattggcggcggccacggccacggccgcgccggtgacgttgtacagcggcaccagccaggcgcacatgccaaagttgaccgctacgcccagggccacgccgatggtgtcatggtgggggcggcgggcgatggcattgccgtagacagtgccttcaatgaggatggcaaacaccgaggacagcatcatgatggggaaaaagcgcagacaggcgctcttggccgggaagatcaggaagatgatgtcctcaaacataatgaggcagcagaaaaagccgaacaccaggaaattgagcaggtcatggatgcgcccgatgcgctcctgttcggtgcggtagtgggcgtagacgtaaggcccccagtaggtggaaaagcccgcctgcacggtggtgaccagctgggccagagtataggcaaactcaaacaggccctgggccgccgcacccgaagccgttgccaggaaagacaggcagagggagcggtaaaggggtgtcaggatggcggccggagccagggcgatgccgtagggcaggaaggtgcggtagatgcccgcatcggcggccaggccgcgggggacgggtctgctgtctgttcccggggcggtgtcggacccggcggcggggtcatcttccgagggggcgggctccgccttggccaggcgcagcgcccggaaccagaaggcgatggccaccccgccgaagcccgccagcgctgccgcgataaaagcccaggtgttggaggtgaaaaatccgggcagcaggtagatcaggttgaggcaggcgttcatccagagagtctggacagtgtaggcgcggacgtcgttttccagacgaagcaagacgttgatatagcgcaccagcatgtagagggcggcgttcaggaagaggaacggcaccagggcggtgccgccctgtcccaggccgaaggcaacggccaggggcggggcaaaaaagacgctggccaccgccccggccagcaccatgaccagcaccgacagcttgacgcaggccagaaacatctggcggccgctcacgccccgggcgggctcatggtaaaagcgcagcagggcctggtcaagacccagcatacccaggttcatcagggacatggtataggccatgaaggtggcggggacgccgtaggcgtcggggggcagaatgcccttgatgatgagcgccgcgccgctgatgagaaagcccagataggtggcgacggaatacttcatcacattgccgacaaagctctcctgcttggccggacgcttggtttccttggacacggttacctccttgcggcgccgggccgcaaacggcggggcagctcagccccggacaaagggacggatgcgggcggtcatgcgctccacatcctccggcgagacccaggccttgtccacgtagccgtagatgcgctgggcaaagtttgccaggggcgggcagaaggcaaagacctttttcggctcccacttgtgccggtaaaggaaatgcacccccgccagagcacagaatttgagcaggttgaaatgcggggtaaaaccctctcccatggggtgatcccggggcgggtttttgtagacgtcctccagcaggtcggccatccgcagataagccgggcggctgccggggtcaaagtaaccctcgatgacctcccgggcaatggggaagggcggctcggggtcctgcatggcggcggcaaactcgtcgtagcttgtcacataatgggcgtccttgtagatgacggggtcgtactcgtgctcaatgggcatgggccgcaggatatggcagctcttgtgagccatgtagacctcggccacggcggtgctcatccagatggagatgctgtccgccgccacgatccactgcttcacgctgtccgcaaagatgacgtggaagttgggccgctttttggccagttcctccagggcggggctgttccattcgctgggatggcggcggtagaccagctccacctcgggatgttcggccagatagcggtcgaaccaggccagcgtttccgccatggaaagccggttggtgcgggcaaagccggaaaaatcggtgcctgccattttggaaagctcggccacctcgtcgtcggacatgctggcatagccgaagctggaaatatacaggtgcaggtgcttgtccgggtccaggccgaactccctgcacagagcggccttgtccttgaaatagccattgaattcgggccgcaggaagtccatcatgacggcgccggtgacgggtgtgtttttctcctccatgccgtgggcctgcaggcgcttggccgtgcggctgccccagcaggtctggacgcagcgcttggcgttgccgttcatgttgaaccagtcgccttcctcctgggtgtcggaaagcatctgctcccagtgcaggttgacgatcttgtcacacttgccgatgttgttgtagacatggctgttgatggcctcgttgtcatacatgcagctggaaaccagcacttccggcttgtccttgccgaacagccgcaggtacttggggtccagcagctgccggatctccaccttgtagccccggcgctccagctccagcttgagcagcaggtcgctctcatattcccgcacggtatgctcgtacaggatcaaaaaatccaatgccaaaaatatgcctccttctgcgcctttgccgcgggacgcggcagagatggcagcccggtcatttcagccgggaaaacagttcgtccacccataccggcaggccgtacacctcgtccaggtggaagccgtcgtaaaactgggtgtcgtcgtcaaaatcgggacggtcggtccattcgtagtccagcagggtaaagccgtattcctcgctccaggcctgcagctggggcaggacctcctccgtcatggcgtcgtcaatgccgaaaggctcgcagacctcggtgagcacgatgtcggccatggggggcagcaccaccgtcagggtgacgccctcctcctgacagcgggcggccagccgggcgatgcgatcaaactggtcggacagcgaccagtctttgcagcgggggatcaggctctggggataggtgtagagcttgtagtgcaggggcaaagtctcgccgttgtcccccacataatccgcggggccccagtctcccgactcgatggtgtcgggagtgccccgcagagtgtccagaaagacggtcagggcattgacgttgtattccagattgaagcagtaggccaggggattgttcagcgtctcctccagcgaggcaaaccggtcggtgttgtagttctggttcagggtgtagaaggacacgctgagaagcagctcgtccacctcattgccggaatccagaatgtagtcggccaggtccagcgtctccttgagggatgctccgccaaaggccaggttctgccactctttgcccgaggcttcggcggcctgatccaggtcgatgtgggccagacggctgtctcctaaaataagattggtgccggggtcggcctggtactcccgcacccgggccaccggctgggtggacgaggcggtggatttcagaccgaaatagttgttgggctcaaaggcgatgaaaaacgccagccagaccacgaccgggataaaaagcggcgcggttttgcgcaggatatgtttcacagggcggcggcgcctcctttcggtttggtcacgggtcagaacccggcgtacatgctgaagttgctgccgccgaagccgccgctctgcacgatgagcccggccaggatcaggacgatcagcaggtaatagatgacccggcggcggggcatggcggccagggcctgctccgacggacggtttttgcaggaaaatgcccggtaggcgtccaggcggaaggccagcacaaggccggccagcaccatggcgtagtaggcggccaccatcagggcatgggggtagaagccgttatacacggcagagtacagctccgacgcaaagcggacgggagaaagccccgacacacacccggccagatagccgaagcagtcggaaaggcccagcccggtggtgtccgacccgacgcggaagaacaccatgctgaaggtccacagcacaaagactacggcccgcttgccccacagctgggcggcgggggcgcgctttttgggcttgcccagacgctggtggaggatctcctccccgatgcggtaggcagcctgcagaatgccccacaccacaaagggcagggtgttgccgtgccagaaccccgacacaaaaaagacgcagaacaggcagacccagacgggcaagcgttcccggcggccccgggtcaggggagagatgtccgcccaggccaggggcatgaagaggtaatcctgcagccaggaagaaaagctgatgtgccaccggttccagaacccggagaagttggtggcgaagaaaggcgtcttgaagttttccggaacttcgatgcccagcagcagagcggaggcccgggccgcgtcggagtaaccggcaaagtcaaagtaaagctggaaggtgtaggccaccgccgccaggatcagcatgccgccgccgtaggagcggtagttggggaacacctcgttgaccagcagggccagcacgtcggcaatggccaccttcttaaaggtgcccagggcgaacaggcgcagggcggcaatggtgcggccctcgtcaaagcggtgttctgccgccagctggggcatgaggcttcccgcccggcagatggggcccgagatgacggtgggaaagaagttcatgaacagggcgtggatgatgaaattgtgctccaccgggcagtcgccccgggcggcatcgatcaggtaggagatggccgcaaaggtgtagaagctgatgcccaggggcatggcaatcttgggcaggggcaggccccagtccagccggagcaggtcgccgtatttgaagaatgccagaatggcaaggagcaccaccacgcccaggtgcagccaccgccgctgccggggcgtttccagcgcccgggcaaagagatagctcaaaaccgtgatgcccagcgttaccccgaacagctggggcgcggccagcaggtaaaacacccagcttgccgccagaagaaagcccggctgccaccggtggggcagatgcaggtaaactgccgccgccacgggcagaaaggcgaaatatccaagactttgcaggcccaagcccgcacctccctacgatgctcccgcacagggcagggcatataaaaatatacagacactatattatagcacaaggcaaagctgatgtcgaatgaaaaaacggcgtccccacgcgtacaccgctgccggaaatcgcgccgcctgacaagaaaatcacttgacaacgctacatatcctgagtataatataaaaactagtgcggcccgcttgggccgcacaacttttactgttaaggagaaaaccggctatggcaaaagaagttgttgtcacccatgagggcttgaaaaagctggaagaagaactcaataccctgcgcaccgtcaagcgtaaggaagttgcagataaaatcaaggtcgcccgcggttacggcgacctttccgagaacgcggagtacgacgccgccaaggaagagcaggccatggtcgaggcccgcatcgccgatctggaagcgaccctgaaagtcgcccgcgtcatcgacgataatgctctgtcccatgacaccgtctccatcggcatgcatgtgcgcatcctggccgagggcgacgatgaggacgaagccgaagaatacgacatcaccggctccaccgaggccgatgtggatatgggccgtatcagcgacgagagccccgtgggcgctgcgctgatcggcaaaaaggtcggcgagaccgccgacgtcacgctgcccaacggcagtgtcatcacctacaaggtgctgggtgtcagccgcagccgctaaggtctgccgcaccccaattttcaggacaggagaaatgccgaatggaacagaataacgccaaccgtccgcagcaggatgccgacgtcagccagcaggctgccgtccgccgtcagaaactggcggacctgcgtgccgcaggtcaggacccgtttaccatcacccgctatcctcaggatgctttttccgctgatctgaaagcggagtttgccgaccttcccgccgaggcggagaccggcaagatcgtctgcctggccggacgcatgatgtccaagcgcgtgatgggcaaggcgagctttgcccacctgcgggacgccaagggcgacatccagatctttgtgcggcgtgacgtgatgggcgacgaagcctatgcggcattcaaaaagctggacatcggcgatgtcatcggctgcaagggcgaagtgttccgcaccaagatgggcgagctgagcgtccgcgtgaccgagctcaccctgctggccaagagccttctgcccatgcccgaaaagttccacggtctgaccgaccgcgaagcccgctaccgtcagcgctatgtggacctgatcgtcaaccccgacgtcaaggagacctttgtcaagcgcagcgccatcctgcgggaactgcgcagctacctggacggcaagggctttttggaggtggagactcccatcctcaccccctttgagatcggcgcatcggcacggcctttcctgacccaccacaacaccctggacatggacatggtcctgcgcatcgagaccgagctctacctcaagcgcctgatcgtgggcggcatggaccgcgtctacgaggtgggccgtatcttccgcaacgagggcatggaccccaagcataaccccgagttcaccaccatcgagctctaccaggcctacaccgactaccacggcatgatggacctggtggaagagatgatgaagaccgttgcccagaaggtctgcggcaccctgaccgtgccttaccagggcaaggagatcgacctgtcccactgggagcgcatgaccatggtggaggccgtcaagaagtattccggtgtggactttgacaccgtcacttccgacgagcaggccatcgccctggccaaggagcaccacgtggaactgcccgagatccccaccaagggcgccatcctggccgagttcttcgacgccttcgtggaggagaacctgatccagcccacctttatctatgattaccccgtggaggtcagcccccttgccaagcgcaagcccaatgaccccatgttcaccgagcggtttgagtacttcatcaacgccaccgagttcggcaatgccttcagcgagctgaacgatcccatcgaccagaagggccgttttgagcgccaggtggccgagcgcaagcagctggacccctccagcaaggcgcaggtggactacgactacgtcactgctctggagtacggcctgccccccacgggcggtctgggcttcggcgtggaccgtctggtcatgctgctcaccgactcggcttccatccgcgacgtcctgctgttccccaccatgaagccgctggacaagaaggaagagaccgagaccaagagcgagcccgctgctgcccctgccgacgccccggttgccggaaacggcactccccgcgccgagatgggccccatcgacttctccaaggtggagatcgagcctctgtttgcggactttgtggacttcgatacctttgccaagtcggatttccgcgcagtgaaggtcaaggaatgcactgccgttcccaagtccaagaaactgctcaagtttgtgctggatgacggcaccggcaccgaccgcgtcatcctcagcggcatccacgatacctatgagccggaggaactggtgggcaagacgctcatcgccatcaccaacctgcccccgcgcaagatgatgggcattgattcctgcggcatgatcatttccgccgtccaccatgaggaaggcgtcgaaaagctgcattgcctgatggtcgacccgcacattcctgcgggcgccaagctttactgatacacgccctgacgttccgggccgggcaaccgggggagagtccccgccgcccggcatcgaacggccccttgcatgaggagtggcaggggagccggtcaggctgctttgtttccctgtaatttgcggcggccccctgcgggccaaacgaaaagaccgatctgcgtttgcgacgcgcagaccggtctttttgcgtgtttgaacgggagttacagcccttcctccgccagtaccgtccccagatcttccagaatgtcgtggggcagcatggccatgcggcttttgcgggcggagcagcggtcggcggcgtacccgtgcagccatacgccgcaggcggcggcgtcgaaaggcgcaagcccctgggccagcagggcggcgatcatgccggacaggatatccccgctgccgccccgggccaggccggggttgccggtggtgttgagcagcagggaaccgtccggcgcggcaatgaccgtaccgctgcccttgagcaccaccacgcagtcatgctgtgccgcataacgggcggcgacgccggggcggtcggcctggacctgggctaccgccagcccggtcaggcgggacatctccccggggtggggcgtcagaatggtgccggcgggcagcttgatgccagccgccttgcctgcggccagggcattgagggcgtcggcatccagcaggcagtctttccagacaaattccccgcccagcagtaccgacaggatgttaccggcgtccggccccagccccggcccggccagcaaaaccgccttgcccggggcaaagcgggaagccgcggcgcgcacgtcgtccaggtccaggctgcctgcggcgtccgcccgacaggggagcacgcagcattcgggggtgcgcagcagggcaagctgcatggcctcggggacggtggccagaaataccagcccggcgccgctgcgcagggcgccctcggcggccagagcggcggcgccccggtaggcactgctgcccgcaaaggcagccaccgtgccgaaactgcccttgttggagtcctgcgcccgctggggaaggcgctccagtacataatcccgcgtgattttctgcatatcgggtccctccgattgcccggaaacgctttacgcgcccggggcattgtattatacttttattataagtcagattacggttttgtgcaaaaaaggaggtcctctctatggtgccgcagctggaagaattgatccgtgacagttccaatatcgtgtttttcggcggggcgggcgtctccaccgagagcggcatcccggacttccgcagcgtggacgggctgtaccatcaaaagttcgactatccccccgaggtcatgctcagccacagctttttcatgtcccataccgaggagttcttccgcttctaccgggaaaagctcatcgtccacggagccagacccaatgcggcccatctgcgcctggcggccctggaacgggaaggaaaactcaaggccgtggtgacccagaacatcgacggcctgcatcaggcagcgggcagccgctgtgtttatgagctgcacggctccaccctgcgcaacttctgcatgaaatgcggcaaatcttacgacatcgattttatcgaccagtcccagggcatcccccgctgcaccgagtgcggcggcatcgtcaaacccgacgtggttttgtacgaggaaggcctggaccccgcgaccctggacggcgccgtccgcgccattcaggcggcggatctgctcatcgtgggcggtaccagtctggcggtttatccggcggcgggactgctgcaatatttccggggccggaacctggtggtcatcaacaaacagcccaccccggcggaccggatggccagtcttgtgctcaatatgcccatcgggcgtgcgctgtcggcggacagtgagtgaaaactacaaaaaaattgatgcaatgttttggattatcttgcgtttttgcggaaaagacattgctttttttcccggtgttctggtatgattggagtgggaaagcaaagcccggaattgcgggcaaatgataaggtttggccccaagcagggccgtgaacgcggacaggaggatcggaatggcaaacgtacttgcggattttaccaaaaaacgtgaatttttggtgtgcctggactcagatggatgcgtaatggacacagtgcgcctgaagcactgcaatgtgttttgtccggaactgatccggagttttggcctggaacagtataacgactatatcaccgaagcgtgggaagagatcaacctgcacagcatcacccggggcatctcccggtttgagagcgtggtgcagatctttgaccgcctgaaaaaccgcggcgtggagctgcccggcagcgaggacatcgccgactgggtggcgaactccagcgaactgagcaccgccaccctcaaggcggaggtcctgcgcaccggcagcccggccctgcgcaagctgcagcagtggaacaccatctgcaaccggcgcatccagacgctggaacccacctttgaacccttccccggcgtggaaaacagcctgcgccagctgcacgcggtggcggacgtggcggtggtttccgccgccaacgagtctgccatcgccagcgagtggaaccgctacggcctggcccgccatgccgacgtcatcttcggccaggaggtaggcagcaaggccaacagcattgccgccatgctggcctgcgggtacgagagccgcaaggtcatgatggtgggcgacgccatgggcgatgcccaggccgccgctgccaacggcgtggcctttgttcccattctgcccggccgcgaggccgagagctggcgccgcctgcaggaggaagccctgcccaagctgctgcatggcaccttccgccccgagtatcaggcggagctgctggctgccctgcgcagcgccctgcacggctgagcgttccggccgttcatagagaccgtcacgtcccggggaaccgcttccccggggcgttttttgcgttttgggcggtaggccttgcaaaacgcggcgggcgtgctataatagaacctgcaaggcgcggaagaaaaaacgcgccctgccggtatttattctcaataccggattcgcagagtagggatctgcgcgtaaggacggcgcggtttggacgcgccgccgcagtgcctgaccaacggggagttgtggcaggacgaagttgccgcttgcggcacgcggtgcagatcccgcatcccactgctgcatgacggagtgcaatagcggagctctcattggaaatcccgggggcggaaccgactgcgcggcggacagccgcggggaacgttccgccaggctgcgctgattgcttgttcgttggcagcgtggcgcaggggtttgaaaacagagttctgtatgggcggcaggcgtggtcagcgccggtctgcctgcatggcggtcctcccttgtgcggcgatgcgcacaagttaggaggaatttttttatgttcaatttccgctcctggtttgaccgcgtgctggtgcaggctccggcggagctgcgcaaccctcgcgcgctgtccatggctgccgtgctggcagccctcaacctggccatcaaccagtttaccatcccggtgtccggctatctggagatcagctttgacttcctggcctcggtggccaccgggttcctgtgcgggccgtgggtggcggctctgtccgccatcgtcaccgacctgctgggctatgtgctgcgccccaacggcccctatttccccggctttaccctcagcgccatgctggcgggcatcctgtacgggctgtggtactaccgccgccctgtccggctgtggcgggtcatcagctgcaaactcatggccacggtgctgttcaatttcctgctgacccctctgtggctgcatatcatgtacggacaggcttttgtggtgctcagcagcctgcgcatcgtcaagaacatcatcaagttcccggtggacgtggtgctgctgatgctggtactgaaagcctgcgaacaataccagaaaaccagacggcgggtgtgacccgcggcaggggttcgctgcggcagaccgcgcccggcggaccctttcagaaaaggagctgacccatatgtccgaaaaactgaccatggaacgcgccaaagaactgcttggcaccaccactaccgaggaccatctcttccagcacgccctggcggtgtccgcctgcatgggggcgatggcccggcatttcggcgcggacgaaagctattggcgcgcggtggggtacctgcacgactatgacttcgagcagttcccagaggagcacctcaagcataccgagcagcctttgcgggaggccggtgtggacgaggagagcatctatgccattctggcccacggctacggcctttgcaccgacaccgagcccaaaagcgatctggacaaaagcctgtacacggtggatgaactctccggcctgatcgccgccaccgcccggatgcaccccgcgggcatcgcagacctgcaggcttccagcgtgaagaaaaagttcaaggacaagcgctttgcggccaagatcgaccgcgccgtcatccaggacggctgcaaccgtctggggatggaactgcccgaggtcatcaccctctgcatcgaagggatgcgtcccgctgcggcggaactgggcatcggcccccgggaataaggcgtattgaataatcatacaaaccggaaagaccccggcatgggaggaccctctccctgccggggtctttgccatatgggggaccggctgccgtgcggggcaaaaccgacgcttctgcgcggtttcacaaaagcgcgggcagggcgggggagaggacgtttcccggcggaaccggcggtgcggcagcccgcgggaaacggataaaacgacggaaaagtcatactattatgcgggaaagttgggcattctcaccagcctttgcgcacagaaaaggaccgtttgccgcaaggttcacaaagatttaacaaatcggtcgaaacaggttgaaagcgggcggagttttctctaaaataagacatatgacgggcctgcgccgttgtacggtgcagtaccccggatcggaggtctgccgagggaaagacggaccaaggtcccaaaaaggagcccgcacggagaaacttcgctaacggaggttcccgcgcctgctccgcaaaagcggcccctggtgaacaaggggcttttccgttttgtatgaaataggaggaacacacatgaaaaaggtactgggcattctgttggccgcagtcatggcgttctctctggcagcctgcagcaccggcagcaccgcttccggcagcactgccgagggtggccagaccgctgagggcgccagcgcttccgacatcaaggtcggcgccatcctgctgggtgacgagaccgagggctacaccgctgcgcacatcaacggcatcaagcaggctctggagaatctgggcctgaccgaggacaacatcgtctggaagtacaaggtcgccgaggactccgcctgcatggacgccgccgaggacctggtgggccagggctgcgacatcatcttctccaactcctacggccatcagacctacatggtcgaggctgccgagaagtatcccgatgtcaccttcgtcgccatgaccggtgactttgccgccctgaccggcctggacaacttcaagaacgccttcaccaaggtttaccagtcccgttacgtttccggcgttgttgccggcatgaagctgaaggaactggtggaaagcggcgagctgaccaccgagacccagcccgattcctttgacgccgacggcaacatcaagatcggctacgtcggcgcttacagctacgccgaggtcgtctccggctacaccgccttctacctgggcgtgcgcagcgtgatgcccaacgtcgtcatggaagtcatgtacaccaactcctggttcgacatcgacaaggaaggcgccgctgctgaggctctgatcgccaacggctgcgtcatcatcggccagcatgccgactccaccggcgctcccgccgctaccgagaagatgcacaacaccggccgcatctgctactccatcggctacaacatcgacatgatcgataccgctcccaacgctgctctgacctctgctaccaacgtctggagcgtctactacaccgaggctatccaggccgccatgaacggcgaggaagtccccgttgactgggccaagggctatgacgacggcgccgtcgccatcaccaccctgagcgacaactgcgccgaaggcaccgccgagaaggtcgccgaggtcgaagctgccctcaaggacggcagcctgcaggtctttgacacctccaccttcaccgtgggcggcgagaccgtgaccaccgctgaggtcgacctgaccttctacgattacagcaccggcgagcccaccgttctgtatcagggtgagaccaaggaagccatcaccgacggctatttctctgagtccgagcttcgcagcgcgccctactttgccctgcgcatcgacggcatcaccgaggatgccgagcccgtggcataatccaaacaactgaccaggaggggaagccttgtagttttgcaggcttccctttctgtgttgcacgcccccgcgtgcagcggccggtcacggcatcaactgtaaaaaggaggaattttccgcatggcgcagacgcagtatgcgatccgtcttgaacacgtaaccaaaacctttggcggcgttgcggccaaccaggacatctccatgcagatccgccgcggcgagatcctgtctctcctgggcgagaacggcagcggcaagacgacgctgatgaatatgatcgccggcatctactatcccgacgagggccagatctacgtcaacgatcagctggcggacatccgctctccccgggacgcgctggccctgggcatcggcatgatccatcagcacttcaaactggtggacgtgttcacggcagtggagaacattgccctgggcctgcccaagggtgagcgcttcgacctgcgccgggtgcgggacaaggcccgcgccatctgcgaaaaatatcagtttgccctggacctggaccagaaagtctatgagatgagcgtcagccagaagcagacgctggagatcgtcaaggtgctgttccgcggggcggacatcctgatcctggacgagcccaccgccgtcctgaccccccaggagaccgagcgcctgttcgacgtcatgcgcaacatgcgcgccgacggcaaggcggtcatcatcatcacccacaaactccacgaagtgctggagatcagtgaccgggtcgccattctgcgccggggcacctatgtgggcgacgtgctcacctccgaagccaccgaggccagcctgaccgagatgatggtgggcaaaaaggtggagctggacatcgagcgtcccgagccgaaggaccccatccgccgtctggccatcaaggacctgactgtctacaactccgagggtatcaaggtgctggacgacgtcagcttcgacgcttacggcggcgagatcctgggcattgcgggcatttccggcaacggccagaaagagctgctggaggccattgccggcctgcagcacgcggcccccggctccgacatcaagttcttcccgccggagcaggagcacgagcctatggaactgctgggcaagagcccccgcgccatcaacgaggcgggcgtccacctgtccttcgtgccggaggaccgcctgggtatgggtctggtcggctccatgggcatgaccgacaacatgatgctcaagagctacgacgccggtcattcccccctggtcaaccgcaaggctcctcaggaactggccgaggagatcaaggaagagctgggcgtcgtgacccccgacctgaatacgccggtctcccgcctgtcgggcggcaacgttcagaaagttctggtcggccgcgagatcgccgcatctcccattgtgctgatgaccgcctacgcagtgcgcggactggacatcaacacctcctataccatttaccgcctgctcaatgagcagaaaaagaagggcgtcgccgtgctgtatgtgggcgaggatcttgacgtcctgatccagctgtgcgaccggatcctggtgctgtgcggcggccgtgtcaacggaattctggacggccgcaccgccaccaaggaggaagtgggcctgcgcatgaccaaccttgtaaaggaggacgccgagcaatgacaaaagccacacagccggtacatgagccgcttttgcgcatcgccaagcgcgacggcatcccgttcggtaaaaaggtgctcatccgcgccgtcgccattctgctggcgctggtggtggatgccctgttcatcttcttcgtcacgggtctgaacccgctggccgtctacggtgtcatgtatcagggcacctttgccacgtcggtgcggttctcctgggccatgcgcgaccttgccacgctgctgtgcgtgggcatcgccctggcgccggctttcaagatgcgtttctggaacatcggcgccgagggccaggtgctcatcggcggtatggccaccgccctgaccatggtctatctgggctccagcctgcccgcgcccctgctgtttttggccatgttcgtggcctccaccgcagcgggcgctctgtggggctttattcccgcctggttcaagtcccgctggaacaccaacgagacgctgttcaccctgatgatgaactacgtcgccaccagcatcgtcgcctgcctgaccaacatcatgcgcggccaggcttccagcctgggcaccctcaacaaggccaccaaggccggctggttccccattctgttcggccagcgctacaccatcaacatcatcgttgttctggtgctgacctttgccatgtacgcctacctcaaatactccaagcacggctatgagatagccgtcgtgggcgagagcgagaacaccgcccgctatgccggcatcaatgtccgccgcgtcatgatccgcaccatgctgatctccggcgccatctgcggcctgtgcggctttttgatcgtggccggcaaggaccagaccatctccaccacctcggcgggcggccgcggctttaccgccatcatcgtggcgtggctggccaagttcaacaccttctatatggcgctgatctccttcctgctggtattcctggagcgcggtgcgtccgagatcgcctcggcgtacagcctgaacgagtatgccgccgatatcatcaccggcatcatcctgttcttcatcctgggcagtgagttcttcatcaactaccgcgtggtacgccgcggcgagacgcacaaggagggaaagtgacatgagcagtctgatcgcatggatcctgcgcgcgatcccctttggcaccatcatcatgtacggcgctctgggtgagatcgtcaccgaaaaatccggcaacctgaacctgggcgtgcccggcatcatgtatctgggcggctttgcgggctttgccagcgcctactactacgaaaacctgaccgaaaaccccagcgcggtggtctgcgtcattctggcgctggtctgcgccatcctggcctccactctgggcggcctgatctacgccttcctcaccatcaccctgcgggccaaccagaacgttaccggtcttgccctgaccaccttcggcatgggcgtggccaacttcttcggcgtgttcatcctcaacggttccagttacagcgccgcacccctggccaacaaggcatttgctgccaagatccccgtcctgtccgagctgggcgtggtgggccaggtggtgttctcctacggctttctggcctacgcggtcatcgtgctggccatcctgctgttctggttcttctcccgcacccgcgtgggtctgaacctgcgcgccgtgggtgaaaaccccgccaccgccgatgccgccggcatcaacgttacccgctacaagtacgttgccaccctgtgcggtgctgccatcagcggcgtgggcggcctgtactacgttctggactataaccagggcatctgggccaccaccgagcagatcgaggctctgggctggctggccgtggcgctggtcatcttcaccacctggaagcctctcaacgccatctggggcgcatacctgttcggcatgctgtactggctgtaccagttcctgcccagcctgctgggtatttcggtccccagctacgccaccgacctcatccagatggttccctacgtggtcactatcctggtgctgatcgtggtatccctgcgccgcaaaaaggaaaatcagccccccgccagcctgggcatcgcctacttccgcgaggaacgctgaacctttttcccggggtttttgcacccggatcacggcatctccgatccccttgaccggggatatgcagcgcgtcaggaaacccgatacgctgcaaaaaaggacgacggtcccgcacggcttttgcctgacggatcttgttcttcaacagtatgcaacggctctgcttcggcagggccgttttttgtgtgcaggggagacaatcttcgattgacattgaaccccattgtgctatacttaaaaagccgaccgaccggtcggtcggaaaattcggaaagaaagctctccgggttctgcggcgtcagagcaatacccgggtaaaagtgcggctgccgcaaaaatgtccccgcaaaattgccccgcatggcttttgcggttttccttttttggcggcactgcgcggaaaagaaggtatcctatgtcgaaatacagtgtgaaaaagccgttcaccgtgctggtgggggtcgttctggtcctggtcctgggcgttgtcagcctgctgggcatgaacaccgacttgctgcccagctttacgctgccctatctggtggtggtcaccacctatcccggcgcaagcccggaaaaggtggaggaagaactgacccgcccgctggaaagcagccttggcaccgtcaacggcgtggagaacgtgaccagcaccagcagcgagaacttcagcatggtcatgctggagtttgccgaggacaccgacatggacagcgccatggtcaagaccagcacggccctcaaccagctggcggacactctgccggaaagttccggcacgcccatgctgatggagatcacccccgacatgatggctaccgagtacatcgcggtggacaaggaggatatggacatctatgacctgtccgcctacgtggaggaaacggtggtccccaccctggagcgggtgaacggtgtggccagtgtttcggccaccggtctcattgaacagatggtggaggtgcgcctggaccagcaaaagatcgacgaggtcaatgaccggctgttggtacaggtcagcgaccgtctggccgaggccaagcagaagctggacgacgcccgcaaggaactggaggacagcgaggatgccctggttaccggccaggcggagctggatgccaaccgcgccgatctggaagcgggccggcaggaacttgccgaccagcaggcgcagacttccgaggaactggcaaaggccagtcagcagctggacgaagccgttgccaaggtgacggccctgaccacccagctggagacggcccaggcattgcagaaaaccctgcaggatgaactgaacggctatctggacggcagcgaggccgagtaccagaagatcagcgaactgctggccaaaatggataccgacattgacaccattctgagcagcgacgaagccttccaggcatttctggaccaggtcaacgcctatctggaccagctgcagggcgcgctgcccactcccaagccgggagaggaaccgaccctgccggatatttccctgacagaggaagagctgacctacctgctgaccctgagcaaggatggccttgccgaactgcagaagatccatgcccgggtgggagaactgcgtgaccagctggcggcactgcccgatcagctggcccagctggaagcggccaaagctgccgccgagagcaacatgcagaaactgcgggacgcctatacccagctggaacagggcaagatcgcggcggctgccgggtttggcagcggcgacgcccagcttgcctacggccaggcggcgctggagagcgtccagtcccagctggacagcggcaaggaacagctggagaccggccgggaacagctggacgaagcctacgccgagtacgaggacgcccgggaggaagccctctccaaagccaacctggaccagctgctggacatttccaccctggcccagctgatcgcggcgcaaaacttctccatgcctgccgggtacattcaggacggcgacgagcagtatctgctcaaggtcggggatacctttgagagcgtggacgagctttcgggcgcgctgctgtgcaacatggaaggcatcggcgacgtgcgcctgtccgacgtggcccagatcaccgtcatcgacaacgcgggggagacctatggccgggtggacggcaaccaggcggtgcttctgtcggtgttcaaaagttccaccgccagcaccagcgctgtgtcggatgcctgcaacgcggcgctggaagaaatgaccgccgccgaccccaccctgcatctgacctccatcatggaccagggcgattatattcgcctcattctggacagcgtcatgaccaacctcatcggcggcgccatcctggccatcgtggtgctggccctgttcctcaaggacctgcggcccaccctggtcgttgcggtcagcatcccgctgagcgtgctgtttgccattgtgctgatgtactttaccggcatcagcctgaacatgatcagcctgtccggcctggcgctgggcatcggcatgctggtggacaactccatcgtcgtcattgaaaacatctaccgcctgcgcaatgcgggcgtccccgcaccccgcgccgcagtgcagggcgcaaggcagatgtccggtgccatcatttcctctactttgaccaccgtctgcgtctttctgcccctgctgttcaccgacggcctgacccgggaactgctgagcgacatggcgctgaccatcgcatacagcctgtttgcctccctcatcgtggcattgaccgtggtcccggcggcaggcagcacgctgctcagccgggtacatccccagcggcatcctctgtttgaccggatgctgaaagtctatgaccgcatgctgcgcttctgcctgcgggtcaaagtagtgcccctgggcctggcggttgtgctgctggccggttcggtgtggcaggtcacccgcatgggcctggtcatgatcccggagatcggctccaaccagatgtccatgaccatgtccgttcccgaggataccgaaccggaggacgcctttgccatggccgatcaggtcatggagcgggtgtccggcatcgagggcatcgatacggtgggcgccatgtccagctcctccatgaccaccgcctttgcgggattgtccgacacgaccgggcaggatctgaccaacttcagctattatctgctgctcaccgatgagggcagccgcgaccaggcccgcatccgggacgagatcaccgcccagaccgccgacctgaattgcgaggtggaggtctcctcctcctcggcggccgacctgtcggcactcagcggcagcggcgtccaggtcaacatttacggcgacgatctggacgatctgctccaggccagcgaacaggtcatggccgaactggagaccattgacggcatcggagaactctccaacggccaggaggaaggcgagcgggagatccgtgtggtggtggacaaggacaaggccatgcgccttggcctgaccgtggcccaggtatatgccgagctggcccaggccctgaccagcgagacggtctccacctccctgacggtgggggacgatacctatacggtggagatcgtggacaccgagagcgtcccccagctgaacgacattttcaattatccgtttgagaccaccaagatggacgaggagggcaactccaccaccgagacccataccctgggcgagttcgccacccgcagcgaggccgccggcatggccagcatccagcgtgaaaaccagagccggtatatctcggtcacgtcggtcacggaggagggctacaacacctctctgctggcgcggcaggccacggaaaagctgcagaatctgtctctgccccagggctgcacctgggagctgaccggcgagagcactcaggtgaacgagatggtctcccagatggcccagatgcttctgctggcgctggtcctgatctatctggtcatggtggcccagttccagagcctgctttctccctttattgtcctgttcacggtgccgctggcctttaccggcggtatgatcgctctggtgctgtccggggaggatctgtccatcatgtcgctgatgggatttctggtgctcatgggcgtggtcgtcaacaacggcatcgtctttgtggactacaccaaccagctgcgccagggcggactggaacgccgggaagccctggtggccaccggcaagacccgtatgcgccccatcctgatgacaaccctgaccaccgtgcttgccatggtgaccatgctgttcagcaccgaccccggcagcgagctgggccggggcatggccatcgtcatcatcggcggcctggtctatgccacgctgatgacgctgtttgtggtgccggtcatttatgacctgctgttccgccgcgcgccgcgggacgtggacgtgggcgatgacggcatggatgacctgcccgatgacgccgcccagtacctggcggccatggcggccgaaaacgccgccgcgggagatactgccgtggaaggaggagaacctacatgctgaaagaagaggaacgccgggaacgggaacaggccatctaccgggccgtgctgcggctggcaggcagcggcgccgacatttcccgcctgcgggtgcaggagatcgccgccgaggccggcatgggcaaaggtacagtgtacgaatactttgcttccaaggatgagatcctgcagggcatgacctcctactgtatagacagcgaactgtcccgggtggaggaactgcttgatcgctgtgccgcgctggatcaggtggagcaggcaatgaccgagtatctgctggacatgcatcggacccggggagaagtctattgggtgctttcccgggcgctggcggccaagggcagaaaatatccctgcacctggtcccgcctgctgcgcgggcgtctggaaaaatgcctgaaccgtatggtggagcgtttgcagaaagcaggggagatcgaccctgccctggatgcaggatactgtgtgtttgttctgatctcggtctttatgatgcacgccgtggagttgggcgtccatgatggacaaggcccggcggcggaggcggtttcggcaaatgcacggcggatgctgtcccgtgcgctgcgccccatgcccgggaatgacttgtaaaactttggtttgggaagaggctttcatcattcttccatactattttcatttttgcgcggtaaaattgtaaccgagtcaggccatggcatgcatggccggtcccagacaaagagaggcaggaaatcatatggaaaacgaagaattcggcattgcaccccagccggtcgggcaggagatccccgacatggatgccggggcagctccggatgacgcacaggatgcgcagccggcggaagctgcgcccgcccgcaagaccccctttgcccgtttcaaaggctcttttggtcgccgcggcggggaaacccccaagggcggcaactggtttgcccggcacaaaaagctcacggtgctgctggtcattgtggtgatcgccgccgtggtgatcaaccgcatgatggccgcggcggtcccggcttcggggaccacctaccagtacgtgcgcaccaccacactgaccaagaccagcctggaggattcggtcaccgtctccggtaccgtggcgtcgggcagcgaggccagcgtcaccgtggcggacaacgccaagacctacaaggtggcgtccgttgaggtggaagtaggcgacgaggtgcaggccggcgacgtgatctgcaccctggatacctctgacctggaaaagcagatcgaaagcgcggagctttcttacagcgacacgctgcagtcggcccagacgacctacgaccgtgcgctggaaagctatgaggtcgccgccgtcaagcatgaaaacaacctgatcgatctgcaggagaacatcaccaaggcggatgaaaacctgaccaaggcacaggaaaatctggacagcgcaaagtcctcccgtgactcggcccagaacaccgtcaacagctgccagaacaccgtcaactcgctgcagtcggcctacaatgcggcccagggtatttccagctatgtctccagctacgacatggccgtcgacgccctgaacaacgctgccgcggctctggacagtgcctaccagaactacaccaccgcttacatgaattataccggcgccgccgacaaggaggccgccaagcccgccctggaacaggcggtccgggctttgcagagcgcctgggatgcctacggcagcggcaccatcgataccaccaccaatgccagcatcagcgcaaccaaccagcgcaccgtcaccgggaccgttgcgccagacgtggacagtgtcaacagccagctgaacggcaccggcctgtctctgaagccccccgctgcggatactctcatcagtaccttcaataacgccgctcagacgctgctcaatcaggaaagcgccgtgaccagcggaaccggcatgacctatcagcaggtcatcgacacctacaaccaagcccagagccagctcaccgctgcaaagtcggcgctgacccaggcggagaccgctatcaccaccgcccagacccaggtggagactgccgaaagccaggtggagagcgcccacgacgcctatgacaccgagaagaactccaccaccctgaccacggcctggcagcaggtggaggacgccgagacccggctggaacaggcaaagcgtgttcccgataccctgcagaccctgcgggatactctggaggactgcaccctgaccgccaccatgagcggcaccatcaccgagctcaacgccacggtgggttccgcctgcaccggcacggtggccaccatccagaacaccgacggcctgactgtggaggtcaccatctcggccaacgatgtggccgacgtcaagaccggcatggagtgctacatcaccagcgactctaccggcgacacccgcatcaagggcaccctgacccagatcgatcccgttgccaacgagcaggggactttcggggccaaggtcaaggtggatacggcggacagcggtctgctcatcggcattcaggcccaggtggaaatcctgaagagcgttaccgacaatgtttttgtagtgcctatcgacgcggtggctaccgcggaggacggctccagctatgtctaccgcaagaccggcggcgagggcgtggacatgacctttgaacaggtcaccgtcaccaccggcgagtccaacgactattacgtggagatctcgggggatgatctggcggaaggcgacgtcatccggtccaccgccgatctgagcgagggcatcgataccgccaccatcgacactgagtcccagatgatggtcaccatgggcggcatggacggcgcacctgccgaggcttccgcccagatgcctgccggcggcggggaaggcggccgcggcggcggagccatggccgcagcgcccggcggaggcatgtgatatggcagaacatgaccgtacctctgtccgcaccccgcagcggcgtctgctcatcgacatgcaggacatccacaagagcttttacatcggcaaacccaacgagctggagatcctgcacggcatcgatctgaaagtctgggaaggggaatttgtagccatcgtgggtgagtccggttcgggcaagtccaccctgatgaatatcatcggcgtgctggacaaacccacctccggacgctataccctgaacggcgtggacatccatgccgccgccgacaacgaactggctgccatccgcaaccgtcagatcggctttgtgttccagacctacaatctcattgcccgccagacggcgctgaaaaatgtggaactgcccatgctctatgcgggtgtccccggcggggagcgcacccgccgcgccaccgagtggctgcgccgggtgggcatggccgaacggatgcgccaccagcccaacgagttgtccggcggccagaagcagcgcgttgccatcgcccgggccatggtcaacgacccggccatcattctggccgacgaacccaccggcgctctggacagccagaccagccgggtggtcatggacctgttccatgagatgaatgaaaagtatcacaagaccatcgtgctcatcacccacaaccagaccctggccgaggaatgccagcgggtgctgaccctgctggacggcaagatcattgcggagagaaaggggagtggccggcgtggggttctttgaaaatatctcgctggcccttgccagcctgcggggcaacaagctgcgcagccttctcaccatgctgggcatcatcatcggtattgcggcggtcattgccatcgagaccatcggcggcagcatgaccggcgccgtcaccgattccatgagcggcatgggcgttaataacatcaccgtcagcctgacccagaaaagcagcgacgacgagatgggaaccaccgccatggacgttaccctgcgctggttcatggactccaccccctcggacgaggacctgatgaccgacgaaatgatcgaggaatatcaggcagccttccccgacaaggtgtcctccatccaaaagacggtgtcggtgggacaggctaccctgcaaaaatacggcgatgccgacaccaccatcaccgccagcgtcagcggggccaaccgcgccgtgctggacggcattgccgacgacacaccgctcctgaccggccgctggctcaacgacggggacggcgaccgccgcatctgcaacgtttccagcaaattcgtggagcagaccatgggctgctccgacgccgaggcggtgggccgcagcgtcaccctgaccatcaacggaatgccctacaccttctatgtggcgggggtgtatgagtacgacgacagcagcagctacatgttcggcagcatcgacgacgacagcatccagaccacggtctatatccccatggatacggcccgggccatcacctcctcgtcggacggctaccagagctttaccgtggtggtggcggatggcgtggacatgaccgaatttgtctccaccactggctctttctttgcgtcctactacacccgcaacgatacatggacggtggaagccaccagcctttcctccctcattgaggagatgaccagcattctggataccatgagcctgggcatctcggccattgccgccatctcgctgctggtgggcggcatcggcgtcatgaacatcatgaccgtctcggtcaccgagcgcacccgggagatcggcacccgcaaggccctgggcgcacccagttcggccatccgcctgcagttcatcaccgagtccatggtgctatgtctcatcggcggcgtcatcggcgtttccctgggcattgccctgggagcagccctggcgtcggcggtgggctttgcggccaaaccggatatttcgtctatcgtcattgccgtgggcttcagtatgggcatcggtctgttcttcggctattatcccgccaacaaggcggccaagatggaccccatcgaggctctgcgctacgaataagccgtatcaaaaatcctttccgccggacaaaacgtatctgccgttttgcccggcggcttttttgcggaaatttgcgtcaacggctttgcctccggccccattgcggcagggacagacgaatgctatactgttattgtcgggctcggcccgaaggaagagggatctggaaagagaatggaaaaaacagttgaaattcagcaggaaaagttgttcaccaaccagaaactgctgcagcttttgtggccgctcgtcattgagcaggccctgtcggtgctggtgggcatggcggataccgtcatggtctccagcgtaggcgaggcagccatctccggcgtttcgctggtggacatgatcaacaacctgatgttcaacattttcgcggccctggccaccggcggcgccgtggtgaccagccagtttttgggcgcacgccaaaaagacgatgcctgccgcagcgccgggcagctggtgaccctcagcgccgtgctgggcgtggcggtcatggcggtctgtctgggcttttcccacgggctgctgcggctgttcttcggtagcattgacgacgacgttatgaacgccgccctgacctatttcttcatcacgggactttcttacccctttctggcgatgtacaatgccggtgcggccattttccgctcggtgggcaacagcgcggtgtccatgcgggtcagcgttctgatgaacatcatcaacgtctgcggcaatgccctgtgcatctacgtgctgcatatgggcgtggcaggcgtggcggtgcccaccctgatctcccgtgtggtgggggcggtgctcatcctgcgcatgaccacccggcatgacaaccccgcccgggtcacttgggacggcgtgcgccgcttccggccccgcatggtccgcaacatcctgtacatcggtatcccctcggccatggaaaacagcctgttccagctgggccgggtgctggtggtcagcatgatctccggctttggtacggtgcatatctcggccaatgccgtggccaacaacctggacagtgtgggctgcatcgtgggtcaggccatgggccttgccatgatctcggtggtgggccgctgcatcggtgcgggcagccccgatcaggcgatctattacaccaaaaaactgctgctgtgggattacatcgcccagggcttgaccaacgcggtggtcattctggcgctgccggtctttctgggcatgtacaccctttcaccggaaacggcggaactgtcccgcatcctggtgctcatccactgcggctgcggcatcgtgctgtggcctgcggcctttgtgctgcccaacgccctgcgcgccgccaacgatgtccgctttaccatgctgacgtccattttgtccatggccatctggcggctgggattttcctatatcctctgcgtcaacatggaatggggcgctctgggtgtctggatcgccatggtggtggactgggtctgccgcgtactttgctttgtcatccgctttgccagcggaaaatggaaacgccgtgccgtacctgcccaaagtgcagcgaaggcgtgacgggagaggaattttactatgattgtttcctattaggaacgctgtaaatacaaggcttttcggagcctacgaaccacaaaaaataatatttgatctatcacattacacaaaaagccgtccggcgttcaaatcgggcggcttttttgcgtggatagaccggaaggaggcggaaaaataattacagaaatttaacccgcaaaattgtgcaactttcacgaaaaggaggatagtgaatggcagatgaaaaattgaacacaggccccggtgaggagaagctcccggaggctcccgctcctgttacggttgacgagccccaggctccggctcccgaacaaactgccgctcccacaccccagcaggaggggcctgcccagcccgagcccggtgatgtggtggtgtcctttgacaaaatcaatgagctgatgaatgaaaagcggcagacagcccgggccgaggtagaaaaagaggaggcggcaaaagagccgaaggagaaaacgcaggaggaacctcccaccgctggggatgatgaacctaaaaaggcccgtcggggccgtcccccaaaagaggaaaaagcggagcctgctggcaaggaggcggcgaagccccgcaagggccgcccacccaaggcggataaggcggcccccggcgaggccacgccgactaagcgagacaaattgtcccgaagtgggaaaaaggctgcggaggttaaagctgccccggaacccgaaaaggccccacccgaaaatgcggctccggccccggaacagactccgcctgagccagccgctccgccccgtcctgtggaggaaggaaagctggtctatctgaagctttccgaaatgcatccgttccacacattccgcccccacccgtttaaggtgcgggacgatgccaaaatgcaggaaacggtagcgtccatcaaggcaaacggcgtaatggttcccggtcttgcccgcccggaaaaggatggcaagggttatgaaattgtggcaggccatcgccgccatcatggttgtgagctggccgggctggaggaaatgccctttatcgtccgggaaatgactgaccacgaggcggtacaggccatgaaggacagcaacaagcagagggatcagacgctccccagcgaactggccgccctgttggaactggaagtggaggacatcaagcaccagggcgggcggctgaaaaatgtggccgagggcgatattggaaaacgctccgttgagatcgtgggcgaggcgcacgacatgaactataaaaaggtcatgcgttatctgcggctgaactcccttgtgccggaactgctggacaaggtggacgataaaaaaatgggctttatgcccgctgtggagatttcctatatccgccccaaaaaccagcggctgatcgctgtttccattgacggagaacaggcatccccctctctggcccaggcgaaaaagctccgggagctggacaaggacgggaaactcaatggtgatgtcattgatggcatcttatcagaaaagaaaaaggaggatcgaggcgtgattatttctaccgctgaactggaaaagtattttggcaaggaagccactcccgccaaaatgaaggagcagatcatgactttgctggacgagtggaaagagaaacagccgcccgaactggcgaaggctccgaaaaagatggagcaggacaagtaaccacttcgagacattttgtcccgagggccctgccctccgcatcatggctctggtggtatatatcccccgtcgccgcctgttttttcgtacagccgggagcgggctgtcaagggtgcatcgcaccgccgttttacggcggcctgcccttgacggtctgccccggctgtgctatttccccggcaagcggcgggggtatatcctccagagccgccccctttcccatgattgggaaagggcggggggattgggttgaactttcttattaaaatatcggaggtattgactatgaagcgtccccttgcatacattaccgccgcatggttgagcggcgacagtgaaaacgcagaacaggccgcccgctactgccgggcggtttatgaggcaggcttttccccaatctgcccgcccctttatctgcccctgtttctcaatgacgcagtacccgaggagcataaaagcggcatcgacatgggccgtgacctgctccgccgctcccatgtgctggtggtctgcggccacaccatgaccgaggccatgaaaaatgatattgccgtggcccagcggctaggaattaccgccaccacccttgagggcatcctgaccgtcaagggacagggcaaacgctgatggagtctgtttttgaggctttcatttcaaatcctgccctttacagtgcggggcatctggtgggggaaacgctgcatttccccaccaacacggaggaggtgcagtccctcttaaagcggatcggcgtggacggggtgcgctgccaggaatactttattatctcctttgacagcgacattctcggcctttatgactatctgggcgagtatgaaaacattgacgagctcaaccacctggcccatctgctgaaggagctctccccatcagaacgggaaacgctggaggcggttatggacagcgaccagcattgtggctcggtgcaggacttgatcaaccttacgcaaaatctggactgctacgacctgcatcccggtgtggacaatgaggaaatgctgggccgcctttatgtggaggatatggaaagtctcgaagtgccggacaatataaaaccctactttgactttgaagcatacgggcgggacatttccatcaacgaaaacggacactttgcaccgggcggctatgtgacgaaggtgagtgacgatttccgggaggtctaccacggcccccaggacatccccgctgaacacagggtttttgcttaccctcagctttcgatccgggagcagatggccgcttatcaagaaattattgacggttcctcaaaggaggggttccggcggctggctgaaaaacaccatgaggaacggtaactggacttcgagacaatttgtcccaaggcgaaaggaggcggtgtaactgattgatgaagaaatttcccggagctccatagcgatttctgtccgggccagcaagctgacagcccgggggctggcctatgtgctccgggcggctggccgccagatcgccaaacggcataagaaagcccaaaggccccacggcaggcagagcgtgaaaaagctcatggcccacggcgaaaatgtgaacagcatcgaggtggaggccccgaagctctttgaccgcatggcccgccgtttcaatgtggactatgctttttacaaaaccgggccggacaaatacctgctgtttttcaaggcaggacaggcggatgcaattaccgcctgttttgagcggtactcccgcaggctgttggaacagtcaaaatccagccgcatccccatccgggaacaactcaaaaaagcggcggaacagcttgtaaaggaaccgcccaaaacacaggaacggacaaaggaggtggttcgtgaagaacgatagcatcaaaaaataccttattcccaacatcccgtatctgtttgtcctgtgggcctttctcaagctggggacggcctaccgtctggcggcgggtgcggattttgctcataagctcatggggctgggccagaccattggcccggcctttgccgactttgccccggggcttgctccctttgactggctcgttggcattgtgggggctgtggcgttccgggtaatggtctatgtgaaaagcaaaaacgctaaaaaatttcggcgggatgaggagtatggatcagcccgttggggctgtccgaaagatatagcccctttcgtagatccaaagtttgaaaacaacatcattctgaccgggacggagttccttaccatgaatacccgtccgaaaaatccagccaacgcccgcaacctcaatgcctgtgtgatcggttcgtccggctccggcaaaaccaggttctggcttaccccgcagattttgcaggccagcgcagacaaaaacggcggatgcagctatgtgtgtgtcgatcccaaaggaggcgttctcgggcaggtgggccacttcctgcaaaagcgtgggtatcggatcaaggtgttcaattccattgatttcacaaaatccatgcactataacccgctggcgtacatccgtaacgaggccgacatccttaaatttgtggacgctctcatttccaacacaaaaggcgaaggcaaggaaggcgatccattctggacaaaatcggaaaccctgctttactgcgccctcatcgcctatatcatttttgagggtcccgccgaggatcggaacatgaacaccttggttgacatgatttccgggatggaggtcaaggaggatgacgaggattttatgaacgccgtggactatatgtttgcgggcctggaaaaacgaaagccggattgctttgcggtcaagcagtataaaaagtacaaactggccagcggcaaaacagcaaagtcgatccttatttcctgcggcgcaaggctggctccctttgacatcccccagcttagggaggtcatggcctatgacgagctggagcttgaccgcatcggggatcgaaaaacggcggtgttctttatcatctcggacactacgcaaacctataatttccttgtggctctggccttttcgcagatgttcaatctgctgtgcgagagggccgacaatgttcacggaggccgcctgccccatcatgtacgggtgctgtgggacgaggccgccaacacagggcaggttccccagcttgaaaagatcgtggctgtcatccgttcccgtgagatcagcttgacgctgttctatcagcagttggctcagtgtaaggcgatttacgataaacacgccgaaaccattttgggaaatatggacagcgtgatattcctcgggggccgggaggccagcaccatcaaggaaatatccgagaactggctgggtaaggctacaatctccatgcagacggacagccgctcccgtggtcagtcggaaagctacagtcaaaataaccagcggctgggccgggaattgatgacacccagcgagttggcaaccatgcccggggataagtgcattttacagcttcggggcctgcccccgttctattccccgaaatacgatttgaaaaagcacccgaactaccgatatacggctgaagccgacaaaaagaaaaacacctttgaccttgaccggcttatcaaccgccgcaggcggcccaggccggacgagctgtgtgaggtgtatgccgtggctgtgccggatgatgggctcacaagcgaggacgaggacatcctcaattatgatgacatcgacgatccggacgcctttgcataaatagggctttgggacaaagtgtcccgaagtatgtaacctgccgccagaaatggcggcttttttcatggccgggaataccccggagaaaaggaggctctatgcagtttttcacttccgctattgatactttgcagactcttgttgtagccctcggcgctggacttggcgtgtggggcgttgtcaatctgctggagggctatggatcggacaacccaggttccaagagccagggcatgaagcagctcatggctggcggcggcatcatccttttgggaaccacgctgatccccctgctgtctggcttgttctaaggagggcttatggattttctcaccgactggctcacgaactggctgaaagagctgttgatcagcggtatcatggggaacctcgaagggctctttgataccgtcaatgccaaagtcggagagattgcggtacaggtagggactaccccggcggcatggaacgccggggttttctcccttatccgccagctttccgaaacggtgatcctgccgattgccggattggtgctgacctttgttgccacctacgagctgatgcagatgcttttggaaaagaacaatatgcacgagtttgatgtggcgaatatctacaaatgggtattcaaaaccgcttgtgccatcctcattctttccaacacctttaatattgtcatggcggtgttcgatgtgtcgcagagcgtgattgcggatgcggcggggctcatccaaggctccaccgacattacgccggatatgctggcggagctggaaaccacgctggagggcatggacttggggccgctccttggcctgtggctccagtcctctgtgatcgggctgaccatgcagatcatggggatcatcatttttgttctggtgtacggaagaatgattgaaatatatttaatgaccagtctggccccccttcccgttgccacgctttccaaccgggagctgggcggtacagggcagaactacctaaaatccctgttcgccgtgggctttcaagggatgctcatactggtctgtgttgcgatctatgcggtgctcatccaaggcatcgccacaggcggcgatccgattggagcgatatggggaaccgtgggctatacggttcttctgtgcttcatgctgtttaagacaggcggcattgcccagcgcatcttcggggcgcattaaacggacggactttgggacaatttgtcccgaggccgggaaaggaggaaacaattttgagtaaggatgtcatattaaccccggaacagatcgccgccgaggagcgacgctggctgttcgatgcgccgattgcggagctggccgaggtaaaaggcgtgacggtggacgaggcggttaagctgcggacggacgcaattttgcaggaggccgctgttcccatcgaagtcacggttcgcccgattgagccccagggcaagctcatcggctttgccagcgtcaactatggcggtgtagtgattgacgatttcaaggtggtggatggtaagaacgggattttccttggggctcccagcaaacccgatcccaccagcaggacaggctaccgctccacggtgcggatcaatgaccgggccacccaggagcggctcaatgcggcgggagcccaggcgtaccattcagcggtggaaaagctcatcgcccgggccgaggcagtccgccccaccccgatcaaggagcagatggcacaggccgcaagggaggccgggaaggaaaatgccgcccgaaccgccccggcaaagaaaaaggaggcccgggatgacaggtgatgtgacctcgagacaaattgtcccgaagtctccagcctgcccggaggggctgtttttgatggacgggattgaagggctgcgctctttgccgaagcactcggttgatatgcttctaaccgatccgccctatggcactacccggaacttttgggatgtgccgctcccgctcccggagctgtgggaggcggtcaagtgggctgtcaagccggagggcgcagtgctgtttttcgcacaatgcccctatgataaggtgctgggggcatccaacctcgctatgctccgctatgaatgggtgtggtacaaaagcaggtgtactggctttctcaacgcaaggcgggctcccctaaagcggacggaaaacattctggtgttttatcaaaaattgccctattacgatccgcagtttgaacagggcaagccctataagaaaatttcccggacaggggacaacagccccaactatggaaaattcctgcgttccagcagtggatcagaggatggcctgcgtttccccggaaacctgctggccttttcttccgtacagcgcaccatccacccaacgcagaaacccgtggagttgtgcgagtatctcatcagaacctatacccggcccggggaggtggtggcagacatctgcgctggctccggcacgactgctgtggctgctgtcaatacgggccgccgctttgtatgctttgaaaccgccccggccttttacgccccggctacagaacgcatccggctggctactgaggcggtcaaagccgggcagaaaggagtatgactatcggaaactattctatcatttacgccgatcccccttggcagtaccagcgcagtaaggtacagggggcggcagaaaaccattatcccacaatggggattgacgagctgtgtgcgctcccggtggctgatctggccgccccggacagcgcactttttttgtgggcgactttcccccagctcccggaggccctgcggctcatagaggcgtggggcttccgctataagtcggttgcctttgtctggctgaaaaagaataaaaaggcagacagttggttttatggtcttggcttctggacgaggggaaatgcggaaatctgcctgctggctaccaggggccatcccaaacggaaggcggcaaatatccatcagtttatcatttccccgattgaagcccacagcaaaaagccggacgaggcccgggaaaagattgtggcccttatgggcgacctgccccgggtggagctctttgccagacagtccccgcccggctgggaggtgtggggaaatgaagtgaaaagcacgatcccggactttgggacaaagtgtcccgaggttaaaggggccggaaaggaggctgatccatgccctatgtgaatgtacccaacgacctgtcaaaagtaaaaaccaaaatggccctaaaccttaccaagcgccagctcatctgttttggctgtgcggcggcggtaggcatcccgtcctatctgttggcccggggctctatcggtaataccggggccatgttccttatgctggccgtgatgctcccggcgtttcttctggccatgtatgaaaaagacgggctcccggcggaaaaggtgctgaaaaacatcatacgggcccggtttctgcgtcccggagtcaggccctatcagacacaaaacatttacgccccctttgccggacggggcgctgtgagaaaggaggatgcgattgcgaaaggcaaatccaaccagcggaagaaaaaccgcaaaggctaaaaaccgggcggccctgtccgcccagcagacgatcccctatgtggcgatgcacccggacggggtatgcaagctccccggcgggctctacacaaagaccgtggaatatgaggacatcaattattccgtggcatccaccgaggatcagactgcgatctttggcggctggagctcattcctcaactactttgacagctccctgccgttccagctttcctttatcaaccgccgctcccactcccggagccgctataaggtaaacattccccaagcggatgatgatttcaacagcgtccgtgaggaatttaccgggatgctgaaaaaccagatcgcccggtctaacaacgggattgaacgctccaagtacattactttcggcatcccagccggagggatcgtggtggcccggccccgtctggagcgtgtggaggccgatgtgatgggcaactttaagcggctgggcgttccctgtgaaccgatggacgggcgggcaaggctggccctgcttcacagccagatgcatccgggcaaccgggaaccgttccgcttttcatggaaggacatcccgcagacggggctcggcaccaaggactatatcgccccggacagctttgacttccggcactcccgcctgttccgggtgggccagtattggggcgctgtttcctacttgcagattttggcgtctgagctctcggataaactgctggcagaaattctggagctggatgcggaaatgaccgtaaccctccatatccagacggtggatcagctaaaggccatcaaaaccatcaagggaaaaatctccgacatcgggaaaatgaaggtggaggaacagcggaaggctgtccgggccgggtacgatcccgacattctcccgcccgacctcattaccttttccaaggatgcggcggagctccttgccgacctccagtcccgcaacgagaggatgttccttttgacttttacggtagtcaatatggcccctacccgccagcggctggaaaacgatgtgtttaccgtgggcggcatcgcacagaaatacaactgcgccctcaagcggctggactggcaacaggaacagggctttgtgtcctcgctggccctcggctacaacgaagtggagatccagcgtggtatgacaaccagctccacggcaattttcatcccctttatgacaagggagctgcggatggacgaacaggccctctactatggcatgaacgccctttcccacaatgttattatggctgaccgcaaaaagctgaagtcggccaacggaatgtacctcggctctacgggctcgggaaaatcctttgcggcaaagcgggaactgctcaatgtctttctgaccattccccaggatcggattatcattgttgatccgatgggcgaatatgccccgctggttcgcaggctgggcggacaggtgatcgagattgccccggacagcccccaccacctaaacccgatggatgtggagcttaacatggccgccggggagagccctctttccatgaaagcggatttcctgctttccctgtgcgagctggtggtaggcggaaaggaaggcttacagcccatcgaaaaaacagttgttgaccgctgtgtgcggctggtgtaccgggaacaggcccttgggcttgatacaggaaaaaccccgcttttgcaggacttgtacgaggagctcttaaaacagccggagcccgaggcccggcgtgtggcaactgcccttgagctctactgcactggctccctcaacctgtttaaccatcccacgaatgtgaaaaccgacagccgggtggtgtgtatcgtgctgaaaaacatgggagaaaacctccgcaagatcgccatgcacatcacaaatgaatttgtgtcccaggcggtagataccaacttccgggagggcgtggcgacatggtgctatttcgatgagttccatgtcctgctccgtgatccgctgaccgccagctattttgtggcggtgtggaaaatgctgagaaagaaaggctgcgttcccagcgccctcacgcagaatgtaaaagaccttctggccagccgggagattgagaacattctggataacaccgattttatgattttgctctcgcaggctcagagtgaccgggcgattttggcaagacagctcggtatttccgagcatcagctttcctacattacccactctaattccggcgagggcctgctgttttacgggaatgtgaccatcccgtttgtggatcggttcccgaagggggaaatctatgacctcttaaccacccgaccggaggatatgaagaatgaagcgaaaaccgaataaaccacgcccggagtcccaaacgcatacggaacccggaggcggagctaccgagcccgggggctctgcttttggggctggctctgaacaggagcccggggcgtctggcacttcgggacaaagtgtcccaaagtcaaaatttcggcagaaaagccagcaggaacaggcggcggcatccaagctccgcatggaaaagcggggcgaaaaacgggaagccgcccgggaaaagctggcaaagcagaagccgcccaaacaaaaaggcccgatccgtaaggcggcgggggccgccggatggggcgttcacggctttgtgcatggcaagctctacgaggtggagcaggaaaatgtaggaacggaaggggcccaccgttcggagcttgccggggaggttatcctgcggcatggctcccggtttgtaaagcgcaaagtccgggagcatccggcaagggcggccagccgggccgaggccaggtatcagaaagcggcggcggattatcatttccacaccgccgcacaggagcacccggagctttccaaaaactattttacccggtactggcagaaacagcggcttagaaggcaataccagaagcgggcgaaggaggccgcaaaacagggagcaaaagccgccgggaaaacagccgccgccacggaaaagctgacagcccgggccgccgggtttgtgaagcgccatccagtcggatgcctgctggcgctggcctgtgtccttgtgatcgtcctgctccagtcctgttcgtcctcgctggtgtccatcggcaacgccggagccggggcgctgggggccaccacttacccctctgcggatgaggcgattttaggggcggaggcggcttatgccgggctggaggcagaactgcaaacctaccttgatacttacgaaagcacccatgattatgatgagtaccacttcgatctggacgagatcgaacacgatccctatgtgctcatttccctgctgtcggcactccatgagggggaatggacgctttcacaggtggagggctccctgcaaatgctctttgaccgccagtatattctgacggagcgtgtggaggtggagacacgctatgacagcgacgatgaaccctattcgtggtacatctgctatgtgacgctggaaaacaaaaacctgtcccacctgcctgtttccttgttgagcgaagaacagatgtcccggtattccatctatatgtccaccctcggcaaccgtcccgacctgtttcccgactctccctatgtggacaaatacattaccaacccgccggagggctatgaggttccgggggaatatctggacgatgaaacattcgccgctattttctcggaggcagagaaatacatcggctatccctatgtgtggggcggctccagcccgtctacatcctttgactgctccggctatgtgtcatgggtgatcaatcattccggctggaatgtgggccgccttggggcgcaggggctttacaacatctgcactccgaccagctccccaaggcccggtgaccttgtgtttttcaagggaacctatgataccccgggcgtgagccactgtgggatttatgtaggcgatgggcggatgctccattgtggcgatcccatcggatacgcaaacttaaatacaagctactggcagtctcatttttacgcctacgggcgtttaccatgattggaggtcatttatggcaacagcaaaaagcatgaaaatccaagccgagattgataaggtcaaggccaaaattagcgaacagcaggcccggctcaaggagctggagcagaaaaagctggaagcggaaaacagcgagatcgtggacatcgtgcgtggcatgagcatcccccttgcggagctgcccctgctgtttgaaaagctgaaaggcggcggggctttgggacaaagtgtcccgaagtccgaggatgaggaaaaggaggaaaactgaatatgaaacggtttcaagttttgacagcggcgctttgtgccgctgttttgttatgcggctttagcgttcccgcctatgcctacgcaggcggcgagggcgaggactacggcgatcccacaatggaaaccccggccccggagccgactattacgctgggcgagggcttttccgaggagggaaaccttgtaacccgtgatctgctctatgacgagcacaccaacaagcagtttattaccgtacagaccagcggcggcaataccttttacattgtcattgattatgacaagcccgtggacgaggaaggtgaacagtatgaaacctactttttcagcgttgtggatgagggggatctgctggccgcagccgaggccgctggcgtggaacaggcggtctgctcctgtccggagaaatgtgcggcggggactgtgaatacagactgcccggtgtgctccgtcaatatggggaaatgcgtaggtgcagagtcggagcccgagcctgccccggagcccgagccggaacccgagaagaaaagcaattccgggatgctcctgctggtgctggggattgccctaattggcggcggggctggctggtatttcaaggtttaccgtccgaaacaccagcaggctgaccagaccgaggaggacgatggcggggattacccggactatgacgagtttgaagatgacggccccccgtgggacgaggaggacgaaaccgaagaaaaggaggaaatcagatgaattttaccagcagtccctttgaacgaatgatgaaagaaaaaccccgtccccaggctcccaccgagaacaggccgcccaggggctccgcctgttgtggctgctgttactggcgggggatcgcctgtgtgtcctgctacaaggaacttttgaaggccggggctggcgggaggtgatggattgtcccgtgaactgacacgcaaggaaaagacagcgatccgctctcttgtggtaacatggtgcgccaactatgaccgggaatacggatgcctgccgctggatagcgattgctatatgctgggtaaatgctggacgggatcatactgccgctatttccgggagtccgtcctgccccttgatccggcgctggaagtggcccttatgagcgagggcccaaggccggattttaagatatgcccggtatgcggcgggcctgttcccccggacaggcggcaggcgtactgctcggcggcctgtgcaaagaaagcccaccgccgccagcaacgggaatatatgcggaaaaagcggggtgcatccgttgacaattagggcctgcaaaatccgcttatagcaaggctttccggggccatttcgttggcctgccgtatcattctacggtctggccccgcttgccccgatgctgtcaacatccatacagcgggactttgggacaatttgtcccgaagtacccgctttctgagaggaggaattatgccgaaatattaccccatcaatgaggaggccgcccggcgtgccaaaaacgccaacagcttttccgactatgttcccggctccgccaccgccgcttaccgtgaaatggtggatcgggcctataccctcgggaaacagcagaaagggcgtgtcgatcccatgtaccacgaaaagattgacgggctcatagaccgctatgcccgaaagctggcggagaacatcaaccagagcaacctcatagatgcccgtgtaccctccatcctcatcgccggaggctccaacttcccggtgcggaaaaaggaaaagcagaacgccgcccgggataagaacatgggcgaatatatgcagatcgagggcctgctggataaggtgcgctcaacgggcaggggcgggatcagcgcagacgatgaccgggctgtggaaaagctggaggcaaagctggcagggctggaggtcatgcaggaggaaatgaaaaccgtcaatgcctactaccgcaagcataaaacgctggagggctgtcccgttctgtccgccgaggaaatcggaaagctccagtcctctatggcatccgactggcgcaaaaatcccgtaccctatccgtcctatctgcttaccaacaacaacgccaacatccgccgcacacgccagcgcattgaggatttgaaaagccagtcggaatatgcgggctgggcctttcccggagggcgggcggaaatcaacgaaggagaaaaccgcttgcagctcttttttgaggaaaagccctcggaggaacagcggcgggaactgaaaagcaacggtttcaagtgggctcccagccagggggcatggcagagacagcttacgaaaaatgccatctatgcggcgggccggatggagtttttacgcccggaggatgggcagagcccttaccagctccagccctttgcccgaaaaacggaaaaggatatgacacgatgaaggaggtgtatttgtggacaaaaatcaaggctattccattttgaaggctgtgatgctggaaaatggcaggggctttgcgctggggcatcatcccacagctccatccccctatgtcacatgggcctgttacgatgataagaacggccagcggcagtatgaatggggacattacggcaacgatctggccgctatggaacaggatttttcagaccgggtaaaggactatcagcggctttaccatgtggggatcgtgcagaccgaggcccccggcctttacaagtattactctacccaacggcctgtggacatcgggacattccccaaaccgccccacaatgccccggatgagatcgtcaactatgaccgccgcatcccggtggagggcggcgcatttctggcatgggggcatctgacttatacaagaccgctgaccgaaaaggaggcgtctgactatgagctccgtcctgcccccgtcatttctgaattatcccgaaaaaacgatgacaggcccctctctattgcccagcagatgaaagaggccggagctctggccgaagccagccagggcgatcccatccataagaaaaaggcccccgaccggggcgaccgataggaggatttgtatggaagaaagatataacccgatgaaaagtgcggagatcgccaccgagcacaattacaatatgctggacggtgttctcaataaccaggccccacccccggaggaaaaggagctggataaggttaaggaaccgccccacaagcgccggagccgggaacgggaggaacgatgacaaagaaacgccgccgcccgatccatctccatgtgatggtgtccgaggaggagcaggcccttattcaacagcgcatggccgagtcgggcatccgcaatatgggggcctatatgcggaaaatggccctcaatggctatgtgctccatgttgacctctcgcccgtccgggagttggtatcgctccagcggcggtgctcaaacaacctcaatcaagtggcgatccaggccaacacctacggcgggatttaccccgaggagatcgccgctttgcaacgggactatgccgccctgtgggggccgctgtccgatctgctgaaaaagctctccgcattggtggagctctgatcctgccggggagtggcgtatgccgctccccggttttcactacttcgggacaatttgtcccgaggtgctgaaagccggaggcatccttgttgtccctcccggacagaggtataattatcatgtaaggaaccataaaccacacttttcaaggaggtatcaagcgatgcggatcattctgaaacttttagcggccccctttgttctggccctcacgctccttgtggcagtattgaattttgctttttcctttgcgtcatgggtgttctgcgccctgtcctttctctgtctgatcggagccctgtttgctttattcacgggggatcgctggggcatacaggggcttgtgatcgcctttgctgtttcgcccttcggcctgcccgctgtggcggagtggctcattgacaagctggacagtctcaactactcgctaaagagttttatcacaggataacgctttgggacaatttgtcccgaagccccctgcggcggctggacggacagccgccgttttcttttggaaggaggtgtgctcacggctacaacttatatccggccctacaaggtggcggctgggaaaggcgctgtccagacaatggaggaacgctttaactatgggcttaatccgaaaaagctgggagccctgtcctcatacctctgcgatccggccacggctcccgctgagtttctgctggtaaagagccagtaccaggcggaaacaggccgggccgtagagcgtggagccctgttttttcaaatccggcaggcgttcccacccggcgaagtaacagcagaggaggccaaccagatcggctatgaaacagccatgcgctggacaaagggaaagtatcagttttttgtctgcacccacacagacaagagccacttccacaatcacatttatttcaattcaacggcctttgaccgctcccggaagttccataattttatcggctccagctttgctctgcggcggctctctgaccgggtgtgcgttgagcatgacctctctgtgatccaaaatccaaaacagcacagcaagggccggtatctccattatggccagtggattggggaaaagccgccctctgcaaaacagcgggtgcggctggccatcgtggaggctctgaaaaaacagcccgccgattttccggcgtttctgaggctcatggaggagaccggctttctggtaaagcatggccgtggcggtgtgatctcctttcttgctcccggacaggataagcccacccgcctgcgggcatctaccctcggggatggttttgatcccgaggacatccgggctatgattgccggggagcgtccgatcccggagctcccgcaggaggctccggctcctgcccggcgtgttaatctgattatagacattcaagagcgcatggcacagggcaagggcccggcctatgaacggtgggccaagatttacaatctgaaacagatggctgctgcgctccagtacctgcgggaaaatgatttgatggactatgaggcgctggcggccagtacagaaaaggcagtagagcgttttcacacgctgtccgaggaattgcggcaaacggaggcggagctggaaaagaccttcgggctcatggcggctactgtggactacgcaaaaactcggcctgtgtttgacggttacaaggcggcccggtacagtaaaaaatatctgtcggagcatgaggcggagcttgccgcttaccgggcggcccgggtcactatgaatgagcttttggacggtgcaaaattgccaaagatggcggatatgaaaaagtcccgccaggaattggcgggaaagaaaaaagccctctatgcggaataccgcaaggcccaggcggatatgcggcaggctgtggcggtcaaagcgaacatagatcatctgctcggcgtgacagacgggcgggaaaataaggcccaggagcgatagcgacaggccgcagacaacaggcgcatagcgccggaactttgggacaatttgtcccgaagttcagcgggtttggggagctccccaacaagcatttttgcgggcctgcggccagcaaaaatttcggagtgtggccacacccgaattgcttgccatttagcggcacccccgaaaagccccctaaaaacgagaaaaacgaaggccctcttacttgacctccgtttctctggctttttgtagtccctctgctgtggcctccatgaccgtcaattccttttcgtccattgtattgagtagcctgtcaatatgctggcggcagtcgctttcgccgttctgcctgtcaggataaaagaattggtctacggaaatgtccaacagggtgacgatttggtaaaaggtgttcaggctcggatgctggccccggttctcaaaatacatgatggaacgaggggtacgatctacgagctgtgcaaggtattcctgtgtccagcctttggcttctcttttgcgcttgatctcccggcctaatgcgtggaagtcaagccgcctggtgtcttggtacattctcatatcacccctatattattttacatttcgggtttgactatgagaacgaaacacagttttatgttttagtagtattttattgtccgctgacaaggttgccgatgttacacggccaaggtataataacagaaagaaaatttgaaaactacactttaatcacaaaaatctatgatacgctatctttggaggtgttaccatgcaaaggattttagtcgttgaggacgattttgatattcaagaacttttacagaattttttacaagaagcaggatatgaagtagctgttgcaaatgatggtgtcgaggcactctctttatttgcaggccaacgatatgacttgattgtattggacattatgctccccaaaattgacggttacggtgtctgtgaattgatacgcaagcaatctgatgttcctatcattatgctaaccgcattaagcggagaagaagatcagattaaaggattggatttgcaggtggacgactacatcacaaaaccgttttctatgcctgtcctgctccgcaaaattgcggctgtacttcggcgcagtaaccgggaaacagatgaaaagtatcaaatcattacttatggcaatttgcttttgaactgtgacagctacaccgccaccgtggacggagctaattttgaactgacacaaaaggaatttgaaatactgcgggaactgctgacccatcagggccggatattgacccggcagaacttgttggataagctgtggcgatatgatttttatggggacgagcgtgttgttgatacccatatcaaaaatctacgaaaaaaattgggaatagatttcattcaaacaatcagaggggtgggatataaagttgataaagagaattaaaggcagtctgtttgctaaagtctttattctgactgtggcagttttgctctgcgtgagctttcttgtctatggcgttttggcttggtatatgcctcaaacctattctaacaatctcaatgcggcattagatgaacagacaagcgactttatttatgaattagaacatatccgtatgcaggatagcggcggactttttgatcagtttcttcaaaacacgacaattagcatggtggagctttatactgctgatggtgttctggtggaaacaccgtctaaccaaaatagctttaacgatgggatcaccggggaggctcttggcggagcatcttatgaaagtgcgccgattatatccaacagctattacttctcatttgcagatgataatagccaatatattttaacagtttatggagaagcctctcaaatcgcagaactgcggcaatcatttgtaagcgtattaccgattttgttttgcgttattctccttgtatcgttggcaactgcttgggtgtattctcgtattattacaaacccggtattaaaaatcagtcggatttctaaagaaatgtctgatatgcggctggaatggcaacttgaggaacgccgttctgacgagctgggtgtactggagaatagcttgaatacgctgtcccggaaactatctgctaccttggaggagttgcaaagtgcaaatctccagctccaaaaggatattgaacatcaaaaggcgctggaacgggcacaacaggatttcttttcttccgcttcccatgaactgaaaacccctatcaccattatcaagggtcaattagaggggatgctattgggtataggggcatataaagaccacgaaaagtatcttgcccgatccttggaagttgcagctacgcttgaaacgatggtgcaggaaatattaacgatttcaaggctggaaaccaatgtcgatttcaaaatggagcattttgattgcgctcccatgatacatggctatttgagggagattgatgatttagtggcaacaaaagagctacaaatacatcttgatatacagtctcccgcttttatcaatgggaacaaattactgattgaaaaggtgttctccaatttgatttcaaatgctgtaaagtattcgccgcatggagcaagcgttgatattattttacaaaataccaacggacgctttttgttctccgtagagaacacaggtacacatataccagaagatgatattcccaaattgtttgacgctttttatcgtatggagcaatcccgcagtagaagaacaggcggtagcggcttagggctttatatggttcaaagaattttacaacaacataacagctattgtgaggcttgcaacacagaaaacggtgttaaattcttcttcacgatttagcggacaatcagcggcaggtgaacaacctgccgctttttttaactacacataaatcacaaactaatcccaaaggtatcccaaaatgctttgctatacttggggtacattcaaagaaaggattggtaaacactatgagaagaatggcattatgcgctgcgtccatgctcttgttaggctgtttggctggatgcagtacgacaccacagaacagccaggaacaaggtaatcccgttatcaaggaagaaatcagtcaacctcttggcggttctgaggcgctgggaaacagcgaggacagctcggcactctccgccgcagacaaagaaaaaatgtttgcaccttatgaacaatacgggatgacctatgacgcggtcaaagatgaacttacctataacgggaatttggttcgctggtttgaggactattatcccatcagtaacaacgaaaccgccggtattgattttctaaatgagaacggcacagtagatgtgtatgctgtacgggatttagagagcttttcaaaagcggctgacggctccgttgatccggcgggtaaactgattggcttaaaagagtttacccagcaggaatttgacgcacgggatattgaggcgttgaaaaacagcacatccgttgctatggcaggaacgccgcttgaagatagcgaaactgcaaagctcgttgcagagtatgaggcatttggagtaacctatgatgccgaaaaagatcagtggtatttcaatggtgaggaagtccgctatttccgggatgttcttacttctaatggtgaaagcctcaccagcggaaaattccgaggcgaaatgagaacgcttggaagtggtgttggcacaatagacatttataccgttcgtgattacggccacttgaacagcgaacttcacggaacattaactggcattgagaaatacagtcaagaggaatttgacgagcatacacaggccggaatgtctggaaatcagcccataggtaatgcaagccataactaaacaaaccatctatctgccgcacgacggcaaaagaaaaaagccgtcgtacagcagacacatttctatgcgcccatgaaacggcggctcaattttcagagccgccgtttctctttggatattcagtaaccccacggcggcccataggagggtgtcgccgtgtccatcttactttctcacaattcccatgaccttcaccagctaaaaaaagcgtagctccccctccgggacagtctggctatgaaggtacaatatatcagtacaattatgataatgtaatttcatgcgtctgcatagcgtcttgctgtgtgggcgcttttttgtacgtcgagacaaattgtcccgaggtgctgggcggctccccggggtgccgctccccgccaagccccgtttcggtcactcatccacccaacaccgaaacggaggtttatttatgactacaatcaatctgaaggatttttattattggtacacacaggatcagtttatcgaggtttctgacgaggtagccgaagtgtttgtgtccgatgcccggcacgaaatggcctaccagcggcggctctcccggcataaggcgcagtattctctggactgcgatgacgggatcgaatattccgcctgcctgcatgagccaacgccccaggagcttctggagcgcatggagctgttcatccgtctatggaacgccctcaactctttgccggagatccagggccgcaggattgatgcccacatcattcttggaaagagcatcaaggaaattgccgaggccgagggcgtacatgaggagtctgtccgccagtcgatcaagcggggacttgagcgtatgaaaaaaactttttgattttttcattttccccacttggaaatgatgaaaaaatgtctcggtttatgaaaggagatattcttctttccgcagataagcagcggcggccccgggcatagtccggggagccgggcggcgggtgcgctgtgactttttctttggaagaacgagcgaacaacaccaacgccgcaactgggccgggccaacccacggccacgatccggcataggacaggctggccgcctgtccctccgggccgccctcttatctgcgagggaacgccgctctgagcatggttgtctttggacagggcaagaaaatgggagcggcgttctctattttatacttacatggagtgaggcaagagggcagcatcgtttgggtgctgccctcttgcgtttccccacgatatgcgggaggcgtatcctatttttgataaggaggttttaccgtgagattaacggcaaaggaactggaacaaatgaaaagcgttgacatcggcgcagtggctcccgagtccctgccggatgtgagcggtatgacctttgacacctctctcccccgggaggagcggatcgctctgtttttgcaggcggtagaaaatccatactgcttttgtatcggcgggatcggtgtaaaaattgaatttgcggaaagcgggccgtccttgcaggacacgctgacggacttcctgctccggcaaaaaagcgggctgtaacttcggttatggcccgttactacttcgagacaaagtgttccgaggcggaggcatccttgttgtcccgcccaggcagaggtataatatagatgtaatgtgatagggaaggaggaacaatggcacgaacaaaaaacagaggattgcaacagagtttctctccctcttataccgtccgccgctggcggctgggcgaatacatccggctttccaaggaggacttgaaaaagggaaaggacgacagcaacagcgtcatcaaccagcgtgatctgctcaatgacttttatcagaagcatatcggagaatttgaaagtgtttccgaatatgtagacgatggacacacaggaacggacgccaaccgggaaaatttccagcggctcctttccgatgtaatgagcgggaaaatcaactgcgtggtagtaaaagacctttcccgttttgcaagaaattacagtgatgcgggaagtctgattgataacctgtttgtgcagatgggtgtccgttttatcagtcttgctgaaaatgtggacagctatctcaacccggacagcgtttccagtattatcgtcccgattacaaatgtgatgaacgatcaatactgctaccagacctcaaagaaaattcgccaggtatttgactacaagcggcgcaacggtcagtacatcggcgcatttgctccttatggatatgtgaagcacccaaaggacaagcaccggttaatcatcgatcccgatgccgctgaaatcgtcaaacttattttctctttattcctaaaagggacatcgaaacgggccatcgctttgtatctgaatgaacacggcgtacccagcccctcggcttataaactgcaaaagggcatacccgtttcaacaagaggatatgacgatcctatgtggggagcccgtatgatccactccattctgacgaatcccacctataccggggatttggcacagggccgcagtcgggtaaaaagctataaggtacacgaggttgaaagcgttccccgtgaagaatgggtggaagtagctggtacgcatgaggcaatcattgattatgaaacctttgataaggtacaggcccttttacagcgggatacccgtacttctccaaaaggccgggaagtccacctgttcagcggttttctgaaatgtgctgactgcgggcgggcaattacccggagcgtaggcaacaacaataatgtgtactatgcctgttccacctacaagaaccgctcccggacagcctgcacaatgcactcgatcaagcataaccgtctggaggccgctgtcctctttgcggtacaacagcaagtccatctggctgtttcatactcggaaatgattgcccgcattaacaccgccccggtcaaaaagagccagtccatccgtttggaagaactgattgctgcgaaggagcgggaactggcaaaaatcagccgctacaagcagtccctttatcaagactggaaagacggggaaattacccagcaggactaccgggatatgaaagccgattatgagcgacagaccatcgctcttacggatgtgctggcccggctgaacgctgaacgggcggaactggcaaacggtgtaaagagtgaacatcccgcattggtggcctttacaaaacatcaaaatatcgaccagctttcccgggaacttctcgttgagctgatcgaccatatcaaggtttatgagaatggaaacattagtgtgagatttaagtttgcggatgaatttagacgcatagcagaatacattgaaatcaacaccacaaaacccgcagtagcgggctaacccccgctacatacccctttgacagtgtgttttcctaataggagctaatcatatgaaactgatcagctggaatgtcaacggcctgcgtgcctgcctgaaaaagggttttgccgaggcctttgaccaactgaacgctgacgctttctgcatccaggagaccaagatgcagccgggccaggcggattttgccccggaaggctacaccgagtacatctactcggcggagaagaagggctattccggtacggcggtgtggaccaaacagcagccgctgtcggtgaactacggcatcggcgtggaggagcacagccacgagggccgggccatcaccctggaataccccggcttttatctggtcaacgtctatgtccccaacgcccaggagggcctggcccgcatcgactaccgcatgcggtgggaggatgacctgcgtgcctacctgctggaactggacgccaaaaagccggtggtcctctgcggggacctgaacgtcgcccatcaggagatcgacctgaagaaccccggccccaaccggggtgcggcaggcttttccgaccaggagcggggcaagatgaccgagcttctggccgccggatttaccgacagcttccgctatctgcaccccgacgtgaccggggcgtacagctggtggagcatgcggttcaaggcccgggaacgcaacgccggatggcgtatcgactattttgtcgtatccaaccgtgcggcggacaagatccgggaggcatccatcctgcccgacatctacggctccgaccactgcccggtgcttctggacatcgacctttaatacggcacagacacaccggcccgaggccggatgcccacgcggcgtccggctgacagccggttttgtttgcggctttccgccggcgttgcagaggcgaaagggcggagaaatgcagcaggaaaccttttcctgaaaaaaatgcaaaaaaatcgggcgcggatgcaaaatcccgggccgcccattcgtactatggacagaaggcgccgctgcggagggcccttccaaagggcccgatatcacgcagaggggggtgtgctggctgaacaacgaacaatttgccgatttgatgcggcagtatcaaaggcttatctataccgtatgttatcagtttgtgcacgaccctcacaccgccgaggatctgacacaggacacctttttatcggcgtacagctacattgaccggtgcgatccggcctactacaagcaatggctggtgcgggtggccaccaacaaatgcaaggaccacctgaaaagcgcctgggtgcgccgggtgcaggcccaggaggacgatcagctgcccgaaccccggggcacgccgcccggcgaagcccgcagtcccgaggaagcgatcatcgtccgggacgagaccgagcagctgcggcagatgatccgcaccctgcgggaaccttacggaagcgtggcgaccatgtatctgctggaacagaaacccgtcccggtcattgcccaggcgctgggcaggccggaaaagacggtacagaaccagatcttccgcgcgaaagtcattttgcgcagacaaattgaggaaaggaggcagacgtgatgcagaactctctggtaccctttgacaacaataacctgtttgaccgcaatggtcatttgaccggcatggggctggacgccatgcagaacggcaccctggatgaactgggcagcctggaagcggcggaacacatcagcttctgcaacgcctgcctcagccgctacaccaactggctggaagccatgccggaaaggctcctatccccggccaacgacctgatcccgcaggtccagaacctgatgcggatgcgctccatccggatcatgactaaccgatatatctcggtggcggccgccgtgatcctggcctttgccctgtggtctttcggggcgttcaacatttctggcggcagagcgcagagccaggccaatcgcctgtccgaaggcccccggttcagcatcagccagggcatcaacggggcattcggtgcagtcagcaaatccatcaacgacctgctgaacgatctgcaggcttacgcacagagcgggctggcccagctggcagagcccggccacaataccaacgataccaacgacggcgggcagaaatccgccaagggggagtaaaccatgaagaaaaacggatttttgactttctgctttgcctgtatccccggtgcggggcagatgtactacggatatatgaagcgcggcctgtcgctcatcacgctgttttgcgtgggcgtcggcctgggcgccctcatcgggccgctggtggtcgtgtgccccatcgtctggatgtacagctttttcgacacctacgacctgatccgccacctgaccagcggggaccccaaacccgactctctgctgctatttgaaaacctggataccctgcggggcatcttcccctccggcaaccgggtgctgggctggatcatgatcggcctgggcgtctgggctttgtacagcagcatcattgaacctatcctgtataacctgctgtcctggtatttcgtcaacatggtgcccaccattgtggtggcggcgctgctcattgccggcggcttctggctgctgggcggcaagcggggccgttccggcgggtatatgcccccggatgatatccctccctatcccggcggagactggaacaacgccggcaatatgggggacgccgacatccccggtttctccggtatgccggatgaaaacctgaacaacggcagcgcgccccgctggccccgcgccgggctccacaactccgccccggagcaggatgctccccggacggacgccgatgacgagactcagacccactgatctgcagggaggaatatagtacaatggaacagcaaactcatcaggccgcgcccaatccggcgcaggccgggcatggtgcgcccaaaaactccggccgcgtccgccgcgtggggactgtggcttttgcggtaacgctgatcgtcgtgggcgtgctcatgctggtcaacgcctttgtgccggaattcgatgttctggaagttttgaaattctcgcccgtcattctcattatcctgggcattgaagtgctggtctactccgcccggccgggtgtcgtcctgaaatacgatttcctgagcatgttcgtctgctttgtgcttgtggtgggggcagccggtgctaccgtggccagcgctttgatggaaggctacggccctacccacgaatataccgagctgcgcctgaaaaaggaattggaacagcaggcgcacgacgcgctgtcgtccctggaaaccatccatgacgtgacggtcaatgtgactctgcagcgctccatctcctcggaaaacgcccaggatgccaccattacggaggcagacgatgtgtgggcctacgtcaccctgaaaaacaactacgattcccgcgaggcttttgccgcggactgccgccgtgtcatcgacgcggccgaggcggcgggcctgccctttgactcctatacctttgacaccttctgggcgcacagcgatatgccggatttctcccgcagctattatctcactgtggaaggtatctggagcctggaccgcacggcagaggaactggccgtcgacgtggacgaggacatctggtatgccggcgactgttttgacggggaagcggatctgcagaactatctggacgagtacgatcaggaactgagcgacctgatgccctccaccgcggaaagcgccgatgccgcgtccgacaacggcacggataccggtgtggataccggacgcgcgcccacggtgaccaccgagagcgcctgagcatacggcacgggacttcccgtttccatacgagcattttacacaaattttgcggcacgcccgttgttttgggggcgtgccgcattgtttttgcttctgggggatggtacaatatattttagtattgatcgtcaggaggaaacggtatgggtttcttgaaaggctacaccaaacaggaagtcagctggatgatgtacgactgggcaaacagtgcccactcggtcattatcgtcaccattctgcccatcttttttgattcggtggctgcctgcacggcggacagcgtctccagcatgagcacctggggctatgccaccagcatcgccatggccatcgtggcgctgtcggcgcctttccttggagtgttcggcgacatccggggtatgcgcaaaaagctgtttgccatttttctgggcatcggcgtgctggcctgtgcgggcctggcctttacccccatgatggactttacctcctccaccgacgcggcctcccgcgtggccatgacggtgctggtactgtacatcgtcagcgtcatcggctttgacgcttcctgcatctactacgatgcattcctcaccgacatcaccaccgaggaccgcatggaccgggtctccaccctgggctacggcatgggctatatcggcggctccaccatccctctggtgatcttcctggtcatgaacctgatcggcatcgacacgctggtctgcctgtcggtcattttcggctttacggcggtgtggtggctgtgcttcagcctgccgctgctgaaaaactgcaagcagaagggcggcaaaccctatgaaaagggcgacatcggccgttccatccggggcgtaggcgcaacggtaggggagatcatccgcaacaaggcgctgcttgtctacatcgtgtcctacttcttctacattgacggcgtgcataccgtcatcagcatgtccaccacctacggcaccaacctgggcctggattccaccggcatgctgctggccctgctgctggtccaggtgctgggcctgccgttctgccttctgtacatgaaactcagctccaaattcggcgcccgggtcatggtgggcgtgggcatctgcgtctatatgtttatctgcgtgttcggattcttcctgcgcagcctgtggcagttctgggtattggcggtgctgtgcgccaccagccagggcggcatccaggcgctgtcccgcagcatgttcggcaagctcatcccggacaaggagcgcagcggcgagttcttcggcttctttgatattttcggcaagttcagctccatcatcggtcccacgctggtgggcatcgtcagcgccacggtggccgacagcatgctgcgcagccagggcctgaccgcagccaccgccaccgccgagcagatcgacgccatcaatgcggcatccagcccctacggcattctgtccattttgctcattgttgcgctgggcggcggactgtacttctttgtgctgcccaaatgcctgaaagcaagcggcaaacagctgtaagggagcttacccgccgtttgcatctttgctgtgtttcgtgtaaaataaggaacgacacggcagtatacgcaatgtctttcagccgcgtcccgaccgtttcccggccggacgcggctgtttgcgcggtgcggtgaaagccgcccgcggcaatgtttcaatacaaaaggatgggacccgtcaatgcccgaaggatatacccatgtacgcatcgcccgccgggcggcgaaaggcgttcactatcatattcaatacccggcggcgtttgcggccggagccaacgggccggattcgctgttctgctttgaaatctggaagtccgcggccaagcgccgctatgacctgcccggcctgggcacccggatgcacgacgtcaataccggggcttttctgcgcagcctggtgacacgggtatccacccggccccagatcgagtatgtgctgggctttctcagccattacgccgccgacacggtcatgcacccctatgtctacgccatgtgccagcccggcatgccctacgggggaccgggcggtcacggttactttgagatcgccctggactccaccctccacgccgaggataccggggtttcccttgtcccggcggaggacaccagccccctgatgaaaggggaggaactggccgacgtcacgtcgctgctggcccattgcctgtccgatgcctacggggtggacatccccattgagtacctggccgatgccttcaacgacatttaccgcctgcgcaagctgttcccctcccggaccggcatcaagaaagccgtctttaccctggtggaaccgctgttcggcggcaggggatttatcacggggcatgtgtcgccccggcggctggtgccggaactgcccgacgtgtggaacgatccctttaccggggaggaacgcaagggcaacgcctttgccctgctgcgggaggcggaaaagcgcagcggcatttttatggccggtgcgctggaatactggatgggccgcatcacggcggatgacctgttcggcctgctgggcagcatgagctacaatcagggccgccccacgcctctcagcgacccgtctctggccgcgcagcaggcggcggaggagaccgcccgccccgatgcacccgaaacgtcggagcctgccccggaagccccggcccccgcggcggaaaatcccccgcagcccgacggtgaggactccgggccggcagctcagccggcggaggaaagcgcaaactggacggcgcaggcatgacccctgcaacctgacccatgcggccgcgcacgcctttgacggggcggacgcggccgggtaagataaaacctatcacacaaaaaggagaatttcctatggtacgcatcaccatgcaaaacggcaagaccatcgacctggagctggatgcccaggccgcgcccatcacctgtgagaacttcctcaagctggtcaaccagaagttctacgacggtctgaccttccaccgcatcatccccggcttcatgatccagggcggctgccctctgggcaacggcaccggcggcccgggctggcacatcaagggtgagttcgcccgcaacggcgtcaacaaccccatcaagcacacccgcggcgtcatcagcatggctcgcgccatggaccccaactcggcgggcagccagttcttcatcatgcacgccgacgctccgcacctggacggcgactacgcggccttcggccatgtggtctccggcattgaggtggtggacgagatcgccaacgttcccaccgactggaacgacaagcccaccaagcccgtggtcatcgagagcatccgcgtggtggaggactgagttcttctcaaactctgaaaccgtaaagcaaagccgccgcaggcatccgttttcgggcctgcggcggctttttgctgtatattgaaggaacggtttatgtagcctggagcggtgcactttccatgagcacggcggccaggttgccgatctcggtgatctgggaagcacccggctcgggaaaatcggtctcggcgctgccccagctggtcagcaccgcgatgcagtacggctcgtcggcgtaaacaatggccatgtcatgcagggcgtactcccagctgccgtatttcttagccatctcgtagtcgctttccagcatgggatggtcggcatccagaaacgcctgctgcagggaagctgcattggcagcgtcgctctcaaagtagtcccacagcgccagcagaatgttggcggcgtcccgggaactgaacactccctgaatattggtctcatcgctcagagcgttcaggggacggtcgatgcccagagtcagcagaaacgcggaaaaatcgctctcggtgtaggcgggccagacgcggtacagctgggtggcggcgtcgttgtcgctttgggagatcatgctgtaaatggcgtcctgcgccgtctgggcgggggcagtgtccagggcaggcagtgcggtggtaagatctatctcacccgcgtcggcccgctcacacagccacaaagcatagggggccttgagcaggctggcggtgtagtactcgcagtcggcgttgtactcgtaagtatacccgtcggagatgcgcacgcagctgacggagaccacaccctccagactttccagataggtgttgagggccgaaagtgcctcctcctcggtgatggcgggctccggcgtgggagtgggtgtgggccgcggcgtggccgttgccaggggagaggcactgtcgtcctcttcgctgtcctccgtttccgaggaagtcacggcactgacggcatccggcagggcggcggcttcctccgcgggttcggcgtagcagcctgccagcagcgacagggcgcagagggcggatgcaaggggaagttttgacatatgctgatttccagcctttctttcgcaggctggggccgatgagcaaaagctgttttcttgcaaaaagaaaactgttgtttacaacatgacacccggactgtgcatgatacagagagatttatggaaaagcgcggtcaggcggggggccgagtatcgcgcatttcaaaccagaaggtcgcgccgtggccgggggtgcttcggacaccgaaggcaaatccatgctgctgcaggatcgctttggtgatggacaggccaagccccgaccccgccttgccctggtctttgcgggaccggtaatagcggtcgaatacgtggggcaggtcctccggcagaataccggggccgtggtcctggacctccacgcggcagacgccgtttccggcggggatgcagcgcaggatgaacacgccgtcggggcccatgtgatgggtggcgttgcccagaagattgtgcaaaacccgctccatcatgccggggtcggcctgaacgatgcattcgtggtcggcctccagctggagggtccagccgttctggtcgcagacggcgtcatagcggccggcgacctcaaagcagagctggctcatgtcaaatgtgacaaggttgggcttttccgcgccgctggaaaccttgctcagttccatgacgctgttgaccagcccggacaggcggtcggtctcgtccacaatgatgttgcactgctcggtgcggtgctcggcgtcgtcgccggtaatgtcgcgcaccgtctcggcgtagcccttgatgagggtcaggggcgtgcgcaggtcatggctgacgttggccagaatatcccgttccagctgggccgagcgcttgacctccgacgccatgcggttgaattccagagccagcaggcccagttcatcccggcggtggacgtccacctgcacgtcgtagttgccgtcggccatttcccgtgcgccctcggacagcttgcgcaccggggcggtgaaccagcggctgaacagcacggcaaacagaatatccaacagcaggatggccaggccgatggggggcagcatcttgcccagcacgcccgcggcggtctcgatctgggcgacactggcggatacgatgatggaatagttgccgtcggcggaaagcccgcccaccaccatctgccggttgctgccggattccacgatcttgtacagcgaaccccgctcaaacacctctttgcgcagctgaatgaccatcggggtatcgctggtgctgtccaccgagccgctcaggctgcccatgctctcgtgcaggatgcaggggtacaggctttcaatataggcaatgctgcggtaggtgtggtcgctgatgtcgatgcagcagttgtcgatgttcagctcgccgttttcaatggcctcggtcaggtcctggaaaaactcggtgttggggatcacatgccacaagtcccgggagatcaggggcgcatcggcggcgtcaatgcgggcggtgatgctctgcaggcggctttccagattggaacggatggtgcggttgtactgcggctgcaaaaaatagttgatcagcacccacaccagcaaaagtgtcaccagtgtgatgccgcccagaaccgcgatcagctgcccctggacccccagcagaatgttgcccttgtgcgggcgctggggctggcggagctttggcagtggcaatttcaagaaaaatacgcctcccgggacgttacagggtatcgggatcgaacttgtatccgatgccccagaccgtcacaatatagccgcggcatttgcccagatggctgcgcagcattttgatatgggtatcgacggtacggtcctcaccgtagtagtcgtagttccacactttttgcaggatcttttcccgcgacagggcaatgcccttgttgctgaccagaaagaccagcaggtcaaattccttgggcgtcagcgaggcttcctgcccttccacccggacggtatggctggcggtgtcgatgtacagatcgccgaagctgtataccgaaccggcatcctcggtcttggccatggtgcgggacaaaaccgccttgacgcgggccaccagctcccggggggagaagggcttgaccacgtagtcgtcggcaccgctttccaggccggccagcttgtcgtattcctcactgcgggcggtcagcatgatgacgggggtcatgatcttgcgggtgcgcatttcgcgcaggcaggtcatgccgtccatgaaaggcatcataatatccagaatgaccagatcgacgctttctcccgacagggtcgagagggcagcggtgccgtcgcccgcctccaggcaggtgaatccggcgtgctgcaaatgttcccggatcagatcacggatccgcggttcgtcgtcgacaatcagtatctttgccataataacccctccttacgggaaaaagacgcacagggcgggaagaaattctcccaaatgtccatgatactatattatccgtcaggtatggctgttttgtgaaatgtttctgaaaacttttcacaattttcggcggtgccgccgccctccggcgcggttgtcagagaaacgggtttgcgctacaatagggattgcccgcaggcgggaatgcacgcgcatctctcgcacgggcggatgtaaaagggagggtggatgttctcatgttgggactttccattgttttgatctgcgcggcagtgctgtgcgccgcggtacttttcctggtctgtccgacctttggccgcaaggcgctgcgggaaccgtttgccgggcgcaactacgcccacagaggactgttttccaaggaccagtccacgccggaaaacagtatccctgctttcgaggcggcgtcctcggcagggtacggcatcgaactggacgttcagtttaccagtgaccggaaactcatcgtctttcacgacgataccctggaccgtatgaccggcgtacagggctgggtgcacgatttcccctgggaacaggtctcgggcatgtccctggccggcaccgggtaccatccgcccctgttttctcaggtgctggagacggtgggcggccgggtgccgctgatcgttgagatcaagagccgccaggaatacgacggcgcctatctggacgatttgtgccgtgccacgctggacgcgctgaaaaattacgacggcgcctattgcatcgagagctttgacccccgtgtggtggggcgcatccgcaaaatggcacccggcgtgctgcggggacagctggccgattgcagccagggctactgctgcgacggggcgaatcccgtccatgcctttgccatgtcccactgtctggggaactttctggggcggccggatttcattgcctggtgtcccgaaccccgcaactgggcggtgcggctgaatgcagccctgggggccatgatggtcaactggaccgccttgccggaacacgacaccgcaaagctggaacgggaatatgacgcggtcattttccagtggtattccccggaaccccgctatcgctaaaggaaggccggacagcccggatcacaatgatccacaatcatagtaagacccattgcccgtttgtgtcaagaagcagcggagcaaaaacggtacagtccggggcaggaaggccccagtgtgccgcgggacggggaaaaggaggaggcccgcatgaagccctatctttcacagtttcgcttccccgatcaggatgccgaatggcagttctttgcgggccagcgccgaacctgttatgacagctactatccctttcaggtgctggcgccccgcggagtgcggcggctggaatttgagggcgtgaccatcctgtacggcggcaacggctccggcaaaagcaccgctctcaatgtcatggcggaaaagctggaactggagcgggatgctccttttaataagacgggatttttcccggactacctgcgcctgtgcagcgccggggatgcccggccgccccggggcagccgcatcatcaccagcgacgacgtctttgcctggatgctggacctgcgcagcctgaacgacggcatcgaccgaaagcgggagcaactgtttgaacagtatctggacgccaaatacgccgattttaagctggaatctctggacgattatgaacagctcaagaccgtcaacgcggcccggcggaccagccagtcccgctatgtccggggccggctgatggataacgtccgcacccattccaacggggagagcgcctttctctatttcacccagaagatcaccggcaacgccctgtatctgctggacgagccggaaaacagcctttcccccgggcggcagctggaactggccgactttttgctggaatcggcccggttttatggctgccagttcatcattgccacccattcgccctttttgctggccatgcgcggggcgaagatctacgacctggatgccgacccgccccgtccccggcgctggaccgagctggaaaacgtgcgggtctaccaacaattttttgtcgaccacgccggggatttctccgacgatgaatgagcggcagcaaggaaggagggcgcgccttgcgccatcaaagtgagactatcaccgggctttccgtgcaggatctgctgcggggagaggaatacatcgactgtgtgtttgagggctgccgctggcagggcctgcgggtggaaaactgcacctttgcggggtgtaccttccgcaaatgccagtggtcgggggtggtgttttcctttaccaaaatgaccgatgtccggctggaaggctgtgcctttcgggggattgcctggggcgggctgcggggcaagagcgccctggcccagaccctggcctcggtgaaaaactgcatgttccagtacaacgacttttcgggcatggcgctgaccgggtttgatttttcgggcagcgagttccgggactgccgcttcgacaactgcaagctgacgggtgccgggttccggggcgtgcgcctgggggaaagccagttcacccgctgcgccctggacaaggcggacttccgggacgccgagggctatgtcatcgacccggcggcgaacacattgaaaggggcgcggttttccttccccgatgtagtgcgcctgctggacggcaccggcatccgcattgagtgacccgccccgaattaccgggccggaaacagaaaaaagaccgccccggcgggagaacgctctccctgccggggcggttttgtgttgcaaaatcaagccttgtggctgtaatcccgggcgccgtaaatggcggtgccgatgcgcacgatggtggcgccctcccggatggcggcctcgtagtcgccgctcatgcccatggacagggtgtccagccgggcgcgggcgtagccgcggccgcgggtctgttccagcagttcccgcatccgggcaaagaaggcccgggtctcatcctcccccgcgtcggcagggggaatggccataaggccccgcagccgcaggtgatcccgggcttcggaggcgtcggtcagctcccacagcgcctcgggggagacgccgctcttgctggcctcgtccccgatgttgatctcgatgagaatgtcctgcacaaggtccagtcgttctgccgcggcttcgatcttgtccagcaggcgcaggctgtccacgctctggatcagggcggcgcggcccaccaccttgttgaccttgttggtctgcaaatgcccgatgaaatgccccggcttgcccaggtaagccccggcgtcggtcttttccaccagctcctgcacatggttttccccgaacaggtcaatgtccagcgtggcgctgtcctttacttcctccactgtgcgggtcttgcaggcggcgcacagcagaatgtcctcgggacgccgcccggcggctctggctgcgtcggccatgcgggtgcggatctctgccaccgcggcggccatctgttccctggtactcattggtcttacctctcctgatagacggcacgggcgccgccgatgtatttgggacggcagcgggcgcacaggatgtgcgcctggccgatgtggtcaaagctgagccgaaccggcaccgccacccggcgcagatgcatgccgatcagggtgccgccgatgtcgatgcccgcaccggcacggacttcctccaccagcaccggttcccggaaagcctgccagcagttggtggcccagctgccccctgcgtggggctgggggatggcgttgacttcctcgtagccatagcggtcggcggcttcccgctcaatgacgatggcacggttgagatgctcgcagcactgggcggccagatacacgccccgggcccgcagggtgggcaatacgccgtccagaacggccttggcggcctccatgctgctgtccttgccgatgtgtccgcccacgatctcgctgctggaacagccgatgacaaaaatatcgccggcccggagctgcgcggtgttcagcagttcctccacggcctgacgggattgacgggtgatggtgagcaatgcttcactgtccatggggcactcttcctttcctgcaaatcagaacagatacattccggccagcccgaccagcccgccaaaggccagcccggccagcacatcgctgggataatggacgccggacaagacccgggtcacggcgatcagcagggcaagcaccgccccggcaatgcccaaaggcgggcagaccgcccatgctgccgccgcaatgaccgccgaactgaaagagtggcggctgggcatgctttttcccaccgtatccttggggaacagcgggggaacgcccagcgtctcgtaggggcgggggcggttgatggcggcacgcagggccgtaccggagacaaacacggcgcaggtcacgatcagcacctgccagaaccggacgtcctggttcagtgccagccaacccagcagcccggcatacaaaatgtagatgcacaccaccgacccctgcgcggtaaaacggatcaggcggcatagagcggggcgggctttgagccagtccagcatggcccggtaacgcgtagcagtcaaagatgtgtcctccctgttttgtggtggggcggggcattccgcgccccgcccgtttctacctgtaaggatagcaccggcaggcacccttgtcaaacggggcgggttgcgtggcgggccgcctttgcttataatagaggtgcgcacggtatggccgtgcaccacacttctccgcaaccggaaggaggaatggcagaccttgtttgaatttgccaacgcattgctggcggcgctgtttctggccgccgtttttgatatgttcgctgccctgcgcgctgcgccggggcggggctttggccgggtaaaagcctcggtgagcggcctttggcggcaggagcattacctgttcggcggctggggggcgtcctggcggcagaaggcgggggaatggctgtttgccatcggccttgccgcctatgaggtcagcgtctgcttctgcaacagtatggccagggaaaactgggcctgggtgcaggggaccttggcgcccatcctggactggacggcatttctctgcttcggcatcaagatcttgttcggcacgcggtatacctggcggtcgctgggggtggcggggtgtttgtacttcattgcacggtgggtctacttcaactgccataacatctggtggatcggcctggtggtggcggtgctggcggccaagggcgtggcgctgaaaaagccgctgcgggcctatctcatcgccggcacggcggcggtggggctggtgatggcgctgcactttgcgggcatcgttgccccggatatggtcagcgagcgcgtgggcgagtaccgggggaccttcggctacggccaccccaataccttcggcgggctggtctttggtctgaccatggcctacgccatgctgcgtgccaaaaaggtccgctggctggacgtggccgtggtgggcgcgctgggaaccttcctgtgggtgggaccggcctcccgcagtgcggcgctgtccactttcttgctgacggttctgctggcggtatataaggtgttcccgcgcctgtttgccggaaagcatctgcccaaagtggcggcggcgctggtgccgttggtggcggcggtcagcttcctgctgcccctgccgctggtcaaaattggcccctggaacaacgatttcggccccgcgtggctggcaaaaatcgacggcctgctgaccaaccggctctccctgacctggagcgcctactatcttctggacatcaagatcgccggtcaggtgctggacgactggcccccgctggacaactcctttgcctttgctttgtaccagtttggtccggtcatggcgcttatcatcggcgtggtgttcgccgtcgccctgtggggcctggcccgcacccgccgtatcccggaactgctctgcctgaccgtcatgctggtctacgcctatatggagtgccagagcttccacctgaccaccaatcccacggcgctgctgctgtgcggggcggtgtttgccctggctccctcccgctggccgagtctggaggatgccccgcccgaacacggcgcaccggcggcagaatgacctataaaaatatccccgcgctttcccgatgcaatggaaagcgcggggattttttgtgcggcggcaccggacaaagtgcagaccggcgccgccgggacaggcgggggcagaaaaaagtgtcgtcccgcccgtgggaaacagaactcaatcggtgggccagatgcccgcgtcggccaggtcggcgctgacctcggtgtcggtttcggactgtccggcgtcggctgcggtctcctgggcgtcaccggaggtgtcggcgcttacttcggtgctctcctcatcggtggcagcgctgacttcggtgccggcggcttcattctccgccatggtctgggcagcggagatcagcccgctgacctccccggagggcttctccaaaagatacgccccgatggcctgggccttgtagaccagcagcacgcagtaacagtcggtctcgccgtcggacaaagcggggcagagcaccgtccatttttccaccgtcttgcccttgtagtcggccaggctcatgccgctctcgcccaccacctggtcaaaggcggtgaagctgtcgtcccactttttcgggatcttgaccttatccaccgcggcgctggccagatccacctcaaagccgtggccggtgaaaaattcggcaatatcctgggtcgtctcgatgccggactcggccaccgccccagtcgtcaccgtctcgcctgaaaaatgtaccgccgctgcaatggcgccggtcaggcagacggcgcacagcgcaagcgccccggcctgacgcagaccgggctttgtcatggtaaacagaaacataggtgccgcccccttggtgcgtgcggcggcgcgctgctccgtgccggatgcacgggcctgccgccgcttttgtcaccctatctgtatgccgcggggcgggggagtattcccttctcaggcggggcgtctgccctgggtgcggtacaggtcgcacaaccggcggcccagactgcccagactgcgggcgcaggcggcggcacggccgtttttggcaaggtcgggccaggcaccgcccagaatgtccccgatagcagcccggaaccctgccacgtcgtagcgtttgaggacctcccgcccgtcggagagccagccctcgtagacgggaatatcccgcaccaccaccggcacgccgcaggccagggcttccaataccacgatgccctcggtttcctcgtggctgcaaaagacaaaggcgtcggcgccgcagtaggcgtcccgcagggcttcctgatccacaaagcccgcaaagtgcagattgcccggcgcggcggccatggcctcccgtacccgggcgggggtcagggcgggctcggtgtagccgaaccagaagaaacagacttccggcatggcccgggccagctcgatgtagtcgaggatgcccttgcgctcaaagtaatgtcccacgctcaccaccaccggctgatcgtcggagagctgacgcgcccggcggaacgcggcgcgccgcgccgggtcgggggcaaaaaagtcggtgtccaccccgttggacaggacgcagaccggctttttcaggtgatagctttccaaaatctgttgggagtagggggtgggggtgatgatgaagtctcccagatcgtagcagaagcggatccaccgcccgaacagcggcgccagcaggttggaacctacaaaggaatcccggaaatcctgcatggtggaatggccgtagtagaccaccgtctcgccccgcatccgggcgcgcagggcggcaaagacagcatcaggcagaacggtgttgatgtgtaccgcgtcggcgggaccgtcccaggactcggtcacggccacgcccgcctgttccagcatggttttctggtggtaaaaggcctgccccacgccgctgcggcgcaccaggccaagggaaccgttatacagatgtacccgcatgagaaaaacctccgatcaaagggataaaaatgaggtcaccgccacagacccagcacctgctggaacaagaccgtcaggcccaggctgtacatggcaatggcaaagggcttgcatagcaggatgatggcggtgtacagccgccaggaaatttcggtggtgccggccaggaaacacaggtagtcgtccggggccacggggataaaaatgagaaaggcaaaccaccgggcaaaccggccgcgctcgttgctccagcggtcgtagcggtcgatcatctcccgggggaacatgcggtagagcagcggccgtccgcagctgcgggcaatggcaaaggccgccaggctgcccgcgcagatgccgatataattgtacaaaaacccgtaccacggcccgaagaggatgaccccggcgagacaccccagcccgcccggcaggatgggcaccaccacctgcacggcctggaacaggatgaacaccgccgcccccgccgcgccgaaactgcccacaaaggtgcgcagccgttcctgggaggtcagaagtccctgctgccagaaccagatccccagcaccacacaggcgatgagcccggcgatggaaaggtactgcatccattttgccgacatactttttgccatccttctcttcctttccggtacgggaccaatcagcggcggggcagcccggcgggcagcggcacgggcagggccgggaaaggccgtgcctgtgcgccgcgggcaaggcaggcctcgcggtaaagtgcttctgcgctcaaagcaaagttctgggcggtgaaccggcgggaatgccgggccgaggccgcgcccatggcggccagacgtgcgggatcggcggccagcgccttcagggcggtgcagaactcgtcgccggtgcgccagaggacgccgttctccccggggaggaccacgccctccaggcagggatcgtcccggcagagcagcggcaagccgcaggtcatggcctcaaaataggtcaggccctgggtctcgctggaggacgcactgacaaacacatcccccagccggtaatagtccggcacccgggcgggggataccatgccggtaaacaccaccgctccggcgggcaggcccaggctgcgggcgcgctgttccagccgggcctggtcggggccgccgcccaccagaagcagtgtcaccggggcagcgcccagggctgcccggcagtccagcagctcgtcaatgtttttctcccgcgccagccgtcccagggagatggccacgcagttgccctccgggatgcccagcgcccggcggcgggcggcgatctcctccccgggcagagggcggtcaaagcgctcggtgtcgatgccggtggggatgaccctgaccggcgtgcggacgccgtagctttgcagcaggttgctgaccttgaggctgggggcgatgaccgcatcggtgcgggccagcaccgcccgggtgaagcccttgaccagcagccgaccccagcggcggctgggggagaagtaatgggtatagtcttcgtagacggtatgataggtatgcaccaggggcgcgccgcaggcccgggcaatgcggcgggcgggggcaaaggtactgaactcgcactggctgtggaccacgtcggggcgccagtcgatgagctgctggatcaccgtccggggggagggcgccagcagccgcgcgccggggtagatgcgccccgcatccagcgagcccaacgcatagacgctgcctgcctggtggtcgcggccatcgcccgaaagggtcaggatgcggacgtcgtggccgcggcgggacagctccttctgcaaggtcaaaacagaggtgaccacgccgttgacggcgggaatataccagtcggatgtaatcagaatcttcattgtaaaatcctcacatggggtccggcggggcagggtccgcagcgcccgctggatcaggtttttcgttccttgtccattgagacgagacaagcaaaacggattgagcagcggcggcggaattttacaacttgatgatatctgcaactgcaaaatgcgatgatttatgacgtattgacgcaaaaaaagaacggacggcgccgcgcgggataaaacccgaaaaacgcggcgccgtccggcgcaagggggagaaaggtaaaaaaatgagcagaaaagttttgtgtcaaaggcccggcaaaacacggtttgcccgcggcccggggggctaaaaatcaggcgtcagccctgggcgggcatctgccaggcgtggtggtcggtgtgcagcagggcttcggccttttcactgcccggctcgcccagttcctcccggtacagggcgttgacctccgggttctcatggctgaagcgcaccgtctggatgcggtcgatgttgtacagcactttgccccgctgggccgcccgctccacgtcgtcggtgtggatgggctgtccgccgccgcccgcgcagccgcccgggcaggccatgacttccacaaagtcgtaatggactcgcccggcctgaagctccgccagcaggcggccggtgttggccaggccgctgaccacggcggtgcggaccacggccccgttgcccaggtcaaactcggcttcggtccaaccggaagccccggtggcgtccccacgcacggcacggaaatcctccggtttggggttgcggccgttgtgcaggaagtacgcggagcgcagggcagcttccatgacgccgcccgtggcgccgaagatgacgcccgcgccgctgtatacccccatgggggagtcaaacccttcctcggggatgtcctcggggttgagtttctccgcacggatcaggcggacgaactcccgggtggtgagcaccaggtccacgtcggggccggcatcggtgcgcatggtgggcaggtcgcactccgactttttggccacgcagggcatgatggatacgctgaaaattttggacgggtccacgccgatccgcttggcaaagctgctcttgaccaccgcgccgaacatctgctgggggctcttggcggtggacaggcggtcggtccattccgggtagtggctcttgagatagcgcacccagcccgggcagcagctggtgaacatgggcaggtcccgggtatccccggcggcatagcggtggaggaattcggtgccttcctccatgatggtcaggtcggcggtaaaggaggtgtcgaacacatagtcaaatcccagccgccgcagcacccccgccatgcggttgacggtggccttttccgggggcaggcccaaggactcgccccaggcggtgcgcacggcgggcgcgatctgcaccaccgtgatcttgtcggggtcggccatggcctggaacaggcgtccggtgtcgtcccgctcccgcagggcacccaccgggcagtgggtgatgcactggccgcacagcacgcagtcggattccttgatgcggcggttatggctcacatccacccgggtacggctgccggtgccggacagatcccagacgttgacgccctggatcttgtcgcacacctggatgcagcgcatgcacttgatgcacttgttggtgtcccggtagagggggaagtccctgggccacagggcgcggacaccggtgaccaggtcctggggatagatgttgtccaggatacccagatcgttggcgatggtctgcagctggcagttgccgctgcgcacgcaggtagcgcacttgcagtcgtgctgggagaggatcagctccacgttgatgcgccgggtacggcggacgcggtcggtgttggtgcggatgtccatcccctcaaaaacggggttgttgcagctggggacaagattgcgctccccctcgatctccacacagcagatgcggcaggcgccgatctcgttcaggcctttcagatagcacaggtgaggaatctcgacgcccgcggctttggcggcgttgaggatggtggtgccctccggcactgcgatgggggtgccgttgactgttacgtttaccattgcgtcgtcctccctcccttaaagatgccgtagccgaagtggtcgcaccgcaggcagcgcccggcttcctggatggcttcctcctcggtcatgccgcaggtggccagcttgaaatcggtgcgggattccatgggattgcggctcttgagctggatgcgcccgcagggcggcgtgttggacagtttggcgggcgggatgcgtacctgggaggtgatggtatggttgaagcccaggaaggcgtcgatgttggccgcgcccaccttgcccgccgccacggcccggatgacggtggcgggaccggtgacggcgtcgccgccggcaaagacgttgggggtgccggggacatagccggacagatcggcctggagggcgccgtggctggtgacgatgccgcccttttcaaattcgtcggactcgatgcgctggccgatggcaatgatgatgtaatcgcaggggatgcggaattccttttccgcggcgttgcggggaccggggcgtccgtcccggccatagccgccgatgatctggggcttggtccacagggctgcgaccttgccttcctcgtcagcctcgatgcggtggggcgcctgcaggggcagaatctggcagccttcagccagagcgtcctcgatctcctcgggcagggcggtcatatcgtccacccggcggcggtagacgcaggtcacgctggccgcgcccagacggatggaagtccgggtggcgtccatgctcacgttgccgccaccaatgaccaccacccgcttgccggtgaagtcgggggcgtggccctcgccgcagttgcgcaggaactccacggcggaaaggatgttggcgctgtcctcaccgggcaggcccagctttttgtcggcatgtgcaccgatggccacatacacggcgtcgtattctttctgcaggtcggggacctgaacgtccttgcccacgctgacgccggtgtggacctcggccccgcaggccaggatgtagtcgatgtcgcggtccagcacctcggggggcaggcggtagtcgggaatgccgtagcgcagcatgccgcccagcttttcccgctgctcgaacacggtgacgctgtggcccatctggcacaggtagtaggccgccgtcaggccgctgggaccgccgcccacgacggccacccgcttgccggtggaggtcgcagggggcgggggcgcagtgcggctgcaatggtccacggcaaaccgtttgagaccgcagatgttgaccgcatcgtccaccagacggcggcggcactggcgctcacagggatgctcgcagacataggcgcaggagaaggggaagggattgtccttgcggatgagatccacggcgtcgtcaaagcggccttcccgcaccagggccacatagcccgggatatccacatgggcggggcaggtggtgacgcaggggaccggctgtttcaggctgcagatgcagcggccgtagtgggcgtgctcctcgtaatcctcccggaagccgcggacgccctgcaagaccatggcggcggcctcgtaaccgatggcacagtcggcggaatcggcaatggcggcggcggtggactcgataagatcaatggtgccgtcgggagcggtctggtccagcacgctctcaatcagcgtctccagctgggacaggccgatgcggcagggcacacacttgccgcaggtctgggcgtggcacaggcgcaaaaaattcagcgccatatccaccgggcagagccccggcgggttggcggcgatgcggtgccccatgtcgcggcagaggtcctgtaccacctgctgcgcgcggtccggggtctcgatggaaagtctcgacacggatcaatacctcctgaatccattcggcgcctgttcccggacgtacggggccggggacaggcgcggtgggacgggcggagaaaatgcccgccgggaacaaatacagcaaaacactgtattaattgtacaggatgtctgatattttttcaacaaaatactgtgtcaaatcacaaaagttcagatttcgttcaccatttggagggaaaggaccgcctcttgaacaggtgaacgcaaaggggtacaatgggggcaatgacgcggcctttggccgcctgacagggaggatggcatcatggcgatcacagtcaatatctattacaccggcaaaaacggcagcgcccggcagtttgccagggagatgaccgacaccggcgtggtgggacgcatccgcggggaggagggcaacctgcggtacgagtattttctgcccatggacgaccccgagacggtgcttctgatcgacagctggacagggcaggcggccattgacgcccaccatgcctcccccatgatggcggagatcaccgccctgcgggaaaagtacgacctgcacatgaaggtggaacgctacctcacagacgaggaaggcgcgcccggcgacgaggcctttatccgccggtaagacagaacatgaaaaaacgcggcataccgcggggaaacatcccgtgcggtatgccgcgtttgagtttgttttggtcaggatccctgtttctggcccaggtgacggatgtcgtcgttgtcggcaaaggcagcggcctgatagccggcggcctccagggtgccgaactgcttgcccagcttcttggcctggggcagcaccgtcacgtcgtagtcggcgcgcaggcgctcggccttggccaggacgtcggcaaagtcggcgtcgggcaggtagagcagggccagacggggctttgcgccggggatggcgtaaccctgttccagcagaatgccgcagacgcgttcaaagccgatggagaagcccacggccgggacctgctggccgatgaacttgcccaccatgttgtcgtagcggccgccgcctgccaccgcgccggagaactgcgggcagacgatctcgaacaccatgccggtgtagtagccctggccgcggaccaggctggggcagtaggcaatgccgtaacggccgttggcgaccttttcgctggcggagagcacatagcgcaggtcgtcagccagggaggcatcgccgcagcgggaggccacagcctccagagagaaatccccgccctgcaggaagtcgtacaggctggccacggcgtcagcgggcagttccttctcggtcagctcgtcccgcacgccgtcggcgccgatcttgtccagcttgtcaaagctgatgcagaccgaatccagggtgtcggcggcaaagcccatggtctccagcatggcgcgcaggatgcgccggtcgttgatgttgacggtgaacccggtaaagccgatgcgcagcagggcgcgggcggtcacgtcgatgagctccacctcagcgttgggggagctgtcgcccaggatgtcgatgtcgcactggacgaactcgcgcaggcggcctttctgggggcgctcggcgcggtagacacggtcggtctggatgaccttgaacgggttgggcagcacggcgcggttggccgcatagtagcgggagaggggcagggtcaggtcatagcgcaggcccatgtccgccagtttggccgcgtccccggcctgcaaagccgaggccagcttgtcgccgcgcttgagcaccttgaagatcaggttcaggttgtcgccgccgtcgctcttgtccaggttttccagatcctccaggatgggggtggaaatgcgctggaagccggcagcgcggtaggtggccagaatttcggcctggatatggtcacgcagggcctgctcattgggcagcaggtcacgcattccctttaagggttgggtcttcatacagggtccctccaatatatcaacaaacagtattacaatgatagcccgcagacaggcattttgtcaaccgcggcggcgcatactagacgttggggcggcgcattttccggctgccctgttgaccgaaaggaggcatcggcagatgcacgcacagccgcgcgcaaaatggatactggcggcgggggcagccgtccagctgctgaccggcatccccgccgcatggggcattttccaaaagccggtcatggaggattacggcttttcccgagggcaggctacccttgcctttgccattcttgtggcggcctacgggctggggtgtctgctggggggatatcttcaggacgccaaaggcccccgggcggcagggctgctgggaacggcgctgctgggcggcggttttgtggcggcggcctttgtgccggggagcaaagcctggctgtttctgctggccttcagccttcccgccgggctgggcagtgcctttctggcccccgcggtgctggcctgtgtacagaagtggtatgccgacaaaaaaggcttcgccaccggggtcaccggcattgccaccgggctgtcgggggcgtttttgacgctgttcgtccgcatggtgggcggatggttcggcatgcgggtctgtttcggcgcgctgggaggtgtcatgctggtggtctgcggtgcgggggcggcggtgctgaaaaatcccccggagcaaaaaccggcgggggaaggcgacggcaacgatctgcctccccaaaagatgctccgcacctgtcagtaccggctctgtgtggcggcggtagccctggccgcgccgccggtcctgctgttcagcccggatattttgtccatcgcggcggagcggggactggcggaaaacctggcccagtggtgcgtggtcatcgggtcggcggccagtgcggcgggacggctggcctgtcccgccctcagcgaccggctgggccgaaaaccggtcctgtacggcgtctatgcgggtctggccgccgggaccctggcctttgcctttgcgggcgggtggttcgtggcggcggcctatgcggccctgacctttttctattccgggggtgcggcggtgcagcccgccctcaacaccgacctgttcggcctcaagcacgcaggggtcaactacgggttcatcgctctgggcatgagcgcgggcagtttgctgagttatgcggggtcccagcttctgcccatgagcgcccgacattgggcggcgggggcctgcgccgtggcgggccttgtatgtatcacacttgtaaaacctgtggagcggcggggctgaacagttgaaaaaaatctgcgtagacggtacaatgtcgtatgtctgtacaattttccccgctttgtcaggtgtgcgcggagggaacgcagccggggctgaaaggagccgccccgctgtgatcgcgctgttctgcccggcggggccaaactttgggaggagaccgtttcatgcgcaatgacccgctccaacgtctgacaacgggcgccgccaccgcattctgtgccgcggcgctcagcgtctatcctttatatatcgaccggttttccaatctgggcgtgaccaagttcacgggggtattcaccctgtttttgctctggtgctttgccatcggggcctgcgtgctcattggcgcccggaccgtccccggccgttttgcggcggcccggcgggacgtcagcctctggtcgctggccgcctttgccggagccaccctgctggccacctgcctgtcgctgtcgcccctctcctcggtgtggggactgggcagctactacggcgggctgatgatggtgctgttcaccgccgtgggctacctggcggtgcgggccttcgcccccgagaaaggcatggactttttggcgggatgcaccggcgtgacggtcattatcgtcacggtgctgtatgtctgcaatattttcaacatcgaccccatcggcagctatgaaaataccgccgtggtggaacgggcgcagtttttctccaccctgggccagaaggacttcaacgccgggtacatgagcgtggccctgcccctggtgttctacgccttcctcaccgccaagggccgcgcccggaccatcgggtatgccatccctgccgctttcggcgctttggctctggccgtggtggacgccgagggcctgaccctgggcatcggcgccgccatgatgatcctggcctgccacaaggacttcgataccaaaaaaatgcgccggggcgccatagtgggcgtcatgttctttgcctgggccgcctggatgcactatatgcggcggtcggtgtatacccagggcgggacctcgctgctggcaaaattcggcgagatcaagctggccctgcccctggggcttgcctgcctgctgatctgggcggggcttgcctggcgggcgcacaagggcaagccggaaatttccctctgcctgctgggccgggtcatgaccgccgtggtgctgggtggcggcgtgctggtgtttttgctggccaacctggtccccggcttcccctccctgggtaagctggacaacttcttcgtctttaacgatgactggggtacctaccgcggcaccgcctggcgggcagcctggggcacctgggcggatgcccctctgtggcgcaagctggtgggctacggccccggcatgatgcatcaggcggtggaagcttgggcgggggacaactataccgcccgtatgaaaaccttctacgctgcccacaacgagtatctggagcagctgctctccaccggtctgctgggtctggcggcgtgggtcgctttcatcgtcagtcacctgcgccggggctttgcccactggaaaaattccggcgtcgccccggtcatgctggccctgtgcagctacctggtgcaggccatcgtcagcattcgggtgtccatgatcttccccgaggtcatgctgctcttcgcgctgctggcggcgtggacttcccccaaagcggaacagcccgccgaaccgctgcccaaaggccgcggcaagcgcaaagcgccccgcccggcggaggaagtctcccgctggggctgggtcaaagtggcagtggcggcagtggtctccatggtgctggcggcggctttttcccacctgatcttcttctatctgttctgatcgaccggtaactttttccggtcctgtgcttcggctcccgggcgtgcggcgtgcgccccgggggccgttttttgcgccccggcgggataaaagcggggaaatatggaaaaatctcgcatggcgtccgtcaaatttgtcacaaagtcttgaaaaaacgcgccccgcattttataatgaaggtgctgtgtaatgctttaccaaatcgtcgtaaaggagagaatattatgacctattctgcacaagtcgaacacatgtgccccattgcaaaaggtccgaagcacggcccggctcccatccccgaagagggcgaatgggtaaaggcttaccaaattgaggacatcagcggctacacccacggcgtgggctggtgcgcaccgcagcagggcacctgcaagctgagcctgaacatcaagaagggcgtcatcgaggaagctctggtcgagaccatcggctgctccggcatgacccattctgccgctatggccggcgagatcctgcccggcaagaccatcctggaagcgctcaacaccgacctggtctgcgacgccatcaacgttgctatgcgtgagctgttcctgcagatcgtctacggccgcagccagactgccttctccgaggacggcctgcccatcggcgccggcctggacgacctgggcaagggcctgcgcagcatgaccggcaccatcttctccaccaaggcgaagggtgtccgttacctggagctgaccgagggctacatcctcaagactgctgttgacaagaacgatcaggtcatcggctatcagttcgtccgtctgggcaagatgatggaggacatccgtcatggcgtcgatcccaagaccgcttacgagaagaacatcggtacctacggccgtttcagcgccgagcagggtgcggtcaagtacatcgacccgcgtgaagaataagagagggaggaacagatactatggctacttttgaatctcaggagcgccggatgcccaaaatcaacgagtgcctgaaagctaacggcctcgagtctctggacgcctgcaacgagctgctcctttccaaaggcatcgattgcgacaagatcatccgcggcattcagcccatctgctttgacaacgccgtctgggcttacaccctgggcactgccattgccgtcaagcgcggcctgaagagcgccgctgactgcgccgccgccatcggcgagggcctggaagccttcaccgttcccggttccgttgccgagcagcgccatgtcggcctgggccacggcaacctgggcgccatgctgctgcatgaggacacccactgcttcgccttcctggccggccacgagtccttcgctgccgccgagggcgctatcggcattgcccgtaccgccaacaaggtccgtaaggagcccctgcgcgtcatcctgaacggcctgggcaaagacgctgccatgatcatcagccgtatcaacggcttcacctacgtcaagaccgagttcgacttcaagaccggcgaggtcaaggttgtcgagaccgttccttactccgacggcgagcgcgctgctgtcaagtgctacggcgccaacgacgttctggaaggcgttgccatcatgaagatggagggcgttgaggtttccatcaccggtaactccaccaaccccacccgcttccagcacctggttgccggcacctacaagaagtgggcgctggagaacggcaagaagtacttctccgtcgcttccggtggcggcacgggccgtaccctgcatcccgacaacgtggctgccggtcccgcttcctacggcctgaccgactccatgggccgtatgcacggcgacgctcagttcgccggctcctccagcgtgcctgctcacgttgagatgatgggcctcatcggcgccggcaacaaccccatggttggcatgaccgtcgcctgcgctgttgccgcttcccaggccaacgcctgagtctgtgcgcagcatagcctgacaacaacataaaaagcgccgctctcccggtttcgggagggcggcgttttttgctgtgcggagccagaacataaaaacggagggagagcatttctgctctccctcctgtatttggtatggaggtaaaaccgggaaaaggatcaggcgtcgtcctcggccatgttgcccagcgccttggcctgctcgatgaccttgccttccagcatctggggcagctgctcgtagcggacgaagtcgaaggtataccagccgcggccctgggtcagctgacgcaggaatgcggtgaagtcctgcatttccgccatggggacctcggcctccacgatctgctggccgtcctcatcgggggtcatgcccagcacgcggccgcggcgcttggtgacctcgcccatgatgtcgccggtgttgtcggcggggacgtgggccttcagggtgcccaccggctccagcaggacgggacctgcctcaggcacggccgccttgtaggccagtttggccgccatgatgaaggccatttcgctggagtcaacgggatgatagctgccgtccagcagggtggctttcatgccgaccacggggtatccggccaggacaccgtgctgggaagcctggcgcaggcctttctcgacagcggggaagaagttcttgggaacgctgccgccaaagaccttctcctcaaagaccagttcctcgcaatcccagggttcgaactcgacccagacatcaccgaactggccgtgaccgccggtctgcttcttgtggcggccctgtgccttgcactttttgcggatggactcacggtaggggatgcgcggcgcttccagagtgacttccacgccgaacttgttcttgagtttggccacggccacttccagatgctgggtgcccaggccgctgatgatctgctgtttggtctcgggatcgaccacaaagccgatggcgggatcttcctcgatcaggcgggtcagagcgccggagaccttgccctcgtcgcccttcttggcaacgcggacggccatgcggtagctggcgatggggtaggtgggagcaggtagcttgaccacacgggcgggatcacacagggtgtcgccggtcttggcggtggtcagcttggcaacggcgccgatgtcaccggcagggatggccgcggcgtcggtctgctttttgccgcagacggtcagcatcttgcccagacgttcgggctggccggtgcgggcattgatgacgttggaggtgctggtcagcttgccgcccaggaccttgacaaagctcagcttgcccacaaagggatcggccacggtcttgaacacgtaggcgcaggtgggagcgtcagcgtcgcaggcgacctcaacgggctcgcccttgtcgtcctcggcgaccacggcagcggtgtcagcgccgggcagcagctctttcatgttgtacagcagcatatccagcgcctgctggttgacggcgctgccgcagaaaacgggagtaatctggccggtgcggacgcccgcggccataccggagacgatctcctcggtggtgaagttctcgccctcgaagaatttctccatcagagcctcgtcggtctcggcgatggcttcgttcatggcctggatcagaccctcgaaccggtggccgatgtcgggcagctcgatctggatctgcttgccgctctcgtatttgaaggccttctggctgaacaggttgatgtaggcgacggtgccgtcatccagacgggaaggcacgacgcaggggcagatggtggggccgaagtcgatcttgagctgttccaggatcttgaaatagtcggcgttctccaggtccatcttggtcacaaagaccatgcgggcgcggttgttcttgacggccaggtggtaggctttctcagcgcccaccgtcacgccggaacggcccgaaacacagatcagcacgctctctgcggcggaaacaccctcgcaggcgccggtctcgaagtcaaacaggccgggagcatcgatcatgttgtatttgacaccctgatattccacggggacaacgctggaattcagcgaagccttgcggcgaacttcctcaggatcaaagtcgctggcggtggtgccgtcctcgacgcggcccatgcgctcggtagcgccgctggtgtacagcagggcctcgatcagcgtcgttttgccgcagcctgcgtggccggcgaccagaatattgcgaatgtctttgctggcgtattccatcgttatcaaacctcttttcgcgccggagccgaatgttcgggatctccccctccggcgtatacttactggtcgggaaaagctatggcttacccggcataatcctactttaccacacaatttgcaaagattaaacagttttttatcaaatgtctgtaaaaatattgtgcaagagttttggtcaatgtgtcaaaagaatcacaaaagccgcgctgcagcgtgcagcgcgacagtggcgaaaacggtgtgcaaaggggaaaatctcacggccggtccaggcgcagggcggccacggtgatgtcgtcccggcggctgcctgcccggcgcaccgccgaatccgccagggcggcggccgtctgggcggggctgtgacccaaccgggcgctgagctgcagctgctgcaggatccagtcggtgccgtcgcacaaaaccccgtcggagaccagtaccaccagatcgcccacctccagggtgaagctactggagcgccccactaccgagtccaggatgcccatgggcaggctggcgccctccatcatgcggggctcgccattgcggaccaggaaactgggggctgccccggccttgaaaagtccggcccgcccggtaaacagatccacggtcaaaaggtccagggtggcgccagactcctgttctccgtttttcaggcccagggccacgttgaccagccgggcggcgctctcggcggcaaaccctgcccgcagcagctgcccggtcaggcgggccgccatctggccgtccacggcggcgggacggccggtgcccatgccgtcacagagcagcatctgggcgcggccacaggtgtcacagaactggtcacaggcatcgccgctgatctcctcggcagggcggctggccatgccgaaccgggcgctgaacagcggccgctccccaaaggacagcatggtcaccgtgcggcagtgggcgatctcgggcagggccaggtcccggcggcaaaggcggctgacctcgtcggtgagggcgcgcagctcctcgggggtaaaggcggtgcgggccaccgtgacgttgacggagatgcgccccgccacatcggtggtgacgctgcattccagcgtttccagcccgatggaggcaaacagctgggccacccggctctcccggcggggatcgggcagaccggcctgccccagacgggcggacagctgtgccagggccgaggcaatggccccgtactgctcggtcagggcgctgcgcaggacgttggcccgggcgcgggtctgacggcggctgcgccacagccggtatccgtggttgagggcgtcgcacaggtcagagggatgctcacagacgctcagctgacccggcatgtgttccaggtcggccacgccggtctgctccagaatgggcttgaactggtacatgccgtccatggcgcaggagtagcccttgatccagcagcgctcccggcgggcgcagtcctggcagacccggcgggcggtgtactccaccacaaagtcgaaggtctcgccccggggcgggaactgccgttcgcacacggcgttgacggtggaggcgatgtcggacaaggtgtcggcaatggtggacagccggcgtgccgctcccgaaaggctctgggccgaagccgggggcgcgggctggggaaagaaggactgcagcgtgcggggcggcaccagcagatagacggtcagcccgcacagggcagcggttcccagggtcagcgcggcattgacggagggggcggccagtgcgcccaggcagcagccggcggcaaagaccccggcgcagcgccagcgctcaccggggaacagacaggaagctcccagcgtacccagcgccacagccagggccgcaaagcagaggtcgggactggcggcggtgaaggcggcagccagtgccacggccagcacggcgctctgttccaggctggcggcaaaggcggtgcacagcccggccagggcgaacagggccagaccgggggcaaagacgggcagagacagccgctgcaggcaggcgacccccatggccagccacaggcagacaccccggggcttgtccgacgggagggtatgtatggtgctgccgaatcccacggcgatgatcccgccgcacagagcgttcagcaggtcggcggggacaaagcccaccggcaggccggacagcagctgggccaggggcagggcggcgcagccggcggccgcacccaggcggaatctgccgggagccagcttgcgcaccgccagcacgatgccgatggcggcggtcaggggcaaagcctgggcaagaggctgaaaggccagaaccccggcaatggcgcccagggcggcggacagcagataccccggcgcacagccgatgaccagtgctaggccaaagggggccgcaccgccgtaaatgcgccctgcgcccagcaaaatgccggtgcaggccgcgcccagctgccaggcaagggcggaagcccggaccccgcccggcggaaggcggagccgccggtcagggggcgcggaaggcggtggcggcggtggacagacggtctcccgttgcggtgcggatgcggcggctgggccgcgacgtgcggtggtttctttgacggtgttcggcattgcgattcctccccggcggatgcctgccccggatcatctgcgcgccggaaaggggccatgccggtgcggcggcgccccctgcgggcgctgcaagcaagagtataccttgcccgcagcgcgctttttgttgcgatgcagcgaaattccaaaaccggccaaaagggggctgctcgtgccagagtacgcggcaaaacaccggcgtccggcccgaaatcccggcatccggcgcaaagcggcccaatgccccggcaagcgggcaaaagccgggcgctttgcggcgaacggccccattgcccgacaacatccggctgggacaagccttcgcccttgacaggggtggaaatcctggagaaatgttgaggagtgaaccagaaaatcagatcatcgggaaaaaggggagaaaggtagttttcgttgttccctccgcagcctgaagaaaccggaaaatcctgacgaaacaactgattttggaaaatcaggcttcggcgggatatgacaaagaccggccgtggaaagcgggaacactttccacggccggtcggtcgaagattatggagttttgagacagagcagagggaacggcgtcagtttgcgcgcagagcgtccagagcggcgttcaggcggcgcagcgtttcctcgcggcccagcatggcagccagatcggtgccgccgccgggggtgcggctcttgccggacagggcgatgcccagcgggtagagcagccagccgtttttcttctccatctgctcggccagggccttgcaggcgtcaaagatggcgtcgcgggaccagtcggtctgggcttccagcaggggcagcagggcgctcagggcttccagcgcagactcgggggtcgttttctgcttcttgttgcggtaaagctcggcgtcaaagggcaccaccgcgtcaaagaagtccagctgcggcgggatgtcctccagcacttcgcagcggggttgcaggttggcgcacagcagatcccggtcgatgtccatatgcacggcgctgtcgatgaagggatcggccagacggcggaactcctcggcgggcagggcgcggatgtaggccgcgttgatggcccgcagcttgagggggtcaaaaatggcgggagacttggacacgcgggtagggtcccagatcttgatcatctcgtccagggagaaaatctcctgctcgccctcgggcgcccagcccagcagcagcagatagttcagcaccgcggcaggcaggtagcccttggccaccagatcctgatagctggcgtcgccgttgcgcttggacagcttgttctgcgcgtccttcatgacgggcgggcagtggatgtaggtggggatctcccagccgaaggcctgatacagcaggttgtacttgggggtggaggacaggtactcgctgccgcggatgacgtgggtgatgcccatcaggtgatcgtccaccacgttggcaaagttgtaggtgggcatgccgtcggtcttgatgaggatctggtcgtccagctcggcgttttccacctcgatgtggccgtagaccatgtcgtcaaaggaggtagtgccctctttggggatcttctggcggatgacgtagggggtgccggcgtccagcaacgccttgacttcctcgggggaaaggtcacggcagtggccgtcgtagtggctgacctcaccggcggctttctgggcggcgtgcagttcctccaggcgttccggggtgcagaagcagtagtaggccttgccctcggccaccagctgctcggcgtactggcggaacatgcccatgcgctggctctggatgtagggacccacggggccgccgatgtcggggccttcgtcccaggtcagaccggtggctttgagggtgttgtaaatgatgtcggtggcgccttccacaaagcggccctggtcggtgtcctcaatgcgcaggatgaaagtcccgcccgagtgcttggcctgcaggtaggtgtaaagggcggtgcgcaggttgcccacgtgcatatagccggtgggggagggcgcaaaacgtgtacggacggtgttttccatattgggttatgctcctttggatgcgaattttttcaatctgccggggaaacgggggcccggaacaaggtccggcggcaggcagcagcctgcggaccatatctctcaaaagtctacctgccgttggaaggtttgtcaaccgtttgaggctcagccgccgcagtctttatcgggctgctggccgtcatgggcctgccactggcactcggtcagctccatgtggctgaatactgcccggaagctggaatcctccgggctggcggcgtagataccgaaggacaccggaccgctgccttcccacaaatggcagatgcgcatctgatgccagtcctgaccgtcctgggaacagtcgatgcggaaatcgctgcccctgcggctgagccggtaccacatggatttgatgtcggcagggatctcggtggtggcccagtccgaatagccgtgattggtcaccacgctgcccagatgctggaaggtctcgttctcatactcaatggagcctttcagccagttttcgctgtccagatacaggaccacgccgcactgatcgaaccggtggccggaagcaaactcggttttgaccaggaaggaaaaatattgttcccgggtggtcatctgcagcaccggggcggtgtcgttgcggaaatggtagtaggtgcgctgccacagatcggtgtgcggggccgtgacgatctcgatgcggtcgggacggatcttgtattcggcaggttcccgagtccagaccaggcgagaggaatcaaatacgtccataaagatcgcttcctttccgatttcgccgcataaatacattttattatatggtatcataccgcgggtactgccgcaagagtatggactcaagagaaaggggagggctcttgacaaatgttatttcgtgtgcttgaatacctgtataaaggtgcagatgatgcgcctcgttgagaaaccgcagatgcgaaagtaaaactgcgccatgcccccacagagaacccggatggctgagaaccgggtgggaaacaggacagacaaatggttcgcagagggcggcggggaacggccatatggtctattatccgtcgacggcagcccccgttacagggcggaagcggtggttgccgcttcactgagcggccgcgttcgcgcggcaaacaaggtggtaccgcaggagattgacctgtccttgtacaaatttctgtacgggggcagtttttttgtaccccgccaaaaggcaaaggagcgtaaaatcatggcagaaaacattcaaagcccgcaggctcagcccaaacgtaagcgaattctttcgggcattcagcccaccggcacgcccactctgggcaattatatgggcgcggtgcgcaactgggccctgctgcagcaggactatgactgcctgtatatggtagccgacctgcattccctgaccgtgcgcgaggagcctgccgctctgcgccgccgtacccgggagctggcttcgctgctgctggcggcgggcatcgacccggtgaacagcgttctgtttgtgcagagccatgttcccgcccacacccagctcagctgggtgctggcctgcaacacccagttcggcgagctgtcccgtatgacccagttcaaggacaagagcgccaagcatcccgacaacgtcaacggcggcctgttcacctacccggtgctcatggcggcggatatcctgatctacaatgccgacctggtgccggtaggccaggaccagacccagcacctggagatcgcccgggacatcgcccagcgtttcaacaatgtgtacggcagcaccttcaccctgccggagggctatgtcccggcggcgggcgccaagatcatgtccctggccgagcccaccaagaagatgagcaagtccgatcccaacgtcaacagctttgtgctgatgaccgatgaccgggatgccatcgtgcgcaagttcaagcgtgcagtgaccgactcggacggcgtggtgcgctttgatgcggcggaaaagccgggcgtttccaacctgatgaccatttattcggccttcaccggcaagaccatgcctgagatcgaggcggaattcgcgggcaagggctacggcgacttcaagatggccgtggcagagactaccgccgatgccctggcaccggtccaggccgagtacggccgtatcctggcggacaagacctatgtggacggcgtgctccgcgacggtgctgcccgtgcgtcccgcctggcggaccgcatggtggcgaaggtttaccgtaaggtgggcctgctgcagcttgaccgctgagcggaaccctgacaaaaagtacgatattaaattgaaaagcaacgttctctgtttgtttgagcggagaacgttgcttttcaggttttttgggcaaactgttgttggtaaaaaatgcggatttggaaaggagtatctgaaatgcagcatgacaaaattcttgcctatcgccgctggcttgaaaaccgggaatacagcgcagccaccattgaaaagtatacccgtacgctggggcgattttttcgcgagacaggagcacaagagcaccctgtcaaagaagttgtggctgcatggagagattctctggtccaaaaaggatattcggcgtccggggtcaacgccatgttggcggcggtcaacgggtatcaggaattctgcgggatgccccagaacaaagtcaaaccgctcaaatgccagcgcaaggttttttgcgatgccgagcgtgaactggacaagggggaatacttccgcctgctcaatgccgcacgtcagagcagaaaaaagcggatcctgctgattttgcagaccatctgctccacagggatccgtgtttcggaactgaaatatatcacggcggaagccgtcaacaaacggcgggccagcatccggtgcaagggcaaatgccgcgagatcctgctgcccagcgagctgtgcaaacgcctgagcaggtggtgcgcccgccgcagaattcgcagcgggccggtgttcattacccgcaacgggaaaccggtggatcgttccaacgtctggaaagaaatgaaggccctgtgcaaacaggcaggcgtggcgtggaaaaaggtgtttccacacaacttgcggcacttgtttgcaaggaccttctatcagctggatcgggatttgtcgaaacttgccgacgtgctgggacactccagcattgaaacgacccgaatttatatcatggaatccggcacacagcatgaaaagctgctgaacagaatgcatttattgttgtaattacaacgaaagtgcggttctgttgttttggattcaaagaagcaaccggtttgcgccttttttccaataaaagacagcaagaacatattaaaatttctaatacatattatcacaaacaagccggcaaatcaatagattgcgtcttgaagcgcaatatttgctaaaaaagcacacgggaaatcagttggacagagtactctggccaactggactcgtgtgcttttttgctgtcggaagttgctgatgctctttctttgaggtctggcccaaatggcgcaatatttgatgcaacagaaccgcactttcgttgcggatggaaagggggcggtaaaatgcaacgcaggaacgatgaaattttgtctggattttccgtttctgattttgtctgccaaaacgaagcgaaatggaatacagcaacacgcagcagctacagtcgctcattgtgtgaactttatgagttcatgggggtgcatggcccgcctgaccttgcaagtctccagcaatgggtggagcagctgaaagagaaaggatacggcggccgcagcatcaatctgaggatctcggcggcaaataattacttccgctggtgcggcaggcccgatttgctgatgcaccatcagcacaccgacactgcgtcgcaaagccctgaaatgactcgcagcgaatatctccgcctgctgtgtacggcacgggccatggggaaacgccgcttgtatctgctgatcaagttgtttgcaactacggatctcccgcttcagtgcctggagcagatcacggcggaagtgattcgcgcgggcgaaggaacattggagttccgggaaggcagcgttcaatttcactgcccggagggtctgcggcaagaacttctcgattacatggcggacaacggcatcgtccgggggcctgtttttctgacccgcggcggacaggcagtcaaccgctccaatctttgccgtgaaatgcaggaactttgccgcaaggcagggattccggaacaaaaaggcaatccccgcagcctgcgcaagctgtaccagtccacccagagtgaacttcgctccggactggaacgcatgatgcagcaggcatatgagcagcttctgcaagccgaacaagcttcagccggatggaaggagggagcttgaaccccgaatcatcgggcggctttttatatacatcgcagttttgcaatccaagattcaaccaaggaggactacggatgaaaatccaattcaaacgtatcgtcagtgcagtatgtgcgctggccttatgcgcaagcatgatgccggcgtctgcgttggcggaacctgtggtatctggcggagatactgccattgtccagcaggtggaagaagatacgtctgtgccggtgacggaaaccaccgacgagactacggaacctgtcgatgtggcagatacggcagagactgagacggataccgcccagcctgctgaggatgcctctgaaaatgataccctaccggaaacgagcacgcagccggaagagacggaacagaactctgccgacgccgaacagccggccacttccgatgcctctgagccggaagctgcggcagctgttgaggaacaggctccggtggcgcttgccgatggcgttgagacctatgccaactacgcaagcactactgttgtgcgtggtcagagtacgacctacgttggccgtggctcgggatatttgatccatgattgggaaatagttgctggctctggtgttgtgagcattcagggaaatggaaacaaagtcacgattactggcaagcaagccggtacggcaacccttaaacatacctatgcggtgtgggattataccgagtatgttaccgttactgtaattgaaaatgcaggtggggaccggtctgtatatctgttcgtggcaaaacctggtaataccacattgagcagcgagggaaaagattattattatcttgctcatggtggccaggtatctaccaatgccagtcagtctatgaaacctgttatcagcaccacgaacgaggatcttattactcagtatgtgactacgtggcctgatacgctggattttctgaccggaaccagcagcacctcggtagacagaggcagtacttggaaaattgactctcagaccggcgaagttaccgaatttactctctaccttgacggcatcgcctattcgagcgatagcaataagagcggcgatggaattgcttatggtctgcgctgggcaaagttcagctgggcagatacagccagccagggtagccattatcatgccgatgcgattctgtataaaaaagttacggtcgatactgttcttgatgagttgaatgtcaagaaagttctgaacggattttcgctgaacgaagaaggcgttgaaaatagttcggaaacattcaatttcaagatcgttgacctgaatgagacggacaactccgttgtgggaaacgtccaaattcctttgactgctacggttacggctaccgggcagcctggcgttgcgcttgattcgggaacatatggtgacacagaactcgcccctggccactatatgctttatgaagaactggattcgaagcaggcacccaatgcacaaaacagtgcggtttgggaaaccgtgcagccggtcatttttgaagtgtatacgaacgacaatatcaacgtggtcagcggtggatcaaaaggtaacaccactattaccaacactcccaaaacttacgacctgtcgtatgagatgaatggcggtacgggcaatattcccagccagaccggactgaagtataatgccaaagtcgaagtttccgatacggtcccgaccaagacaggcagtgtgttcctcggatggagcacaaccgctgatggaacggtggaatacagctctggggataccattcagctcaaaggcaatgtgactttgtatgcggtctggggtcctgtcagtgtgaccaagtcgctggtcttgtccaatacaccggtcgacgacggcattgacaagagtgcttatgccacggttatcaaaaatggtgaagagtatgttacctacactgaggatggcacggcagagattctgtatgtcgtgagggtcagtgcttatattggggcggaggtcagcatcactgaagtcccggaaaacggtactgcttcctatgtgaaggcgttcggcgcaagcacgactgacaacggaaaaacctttaccatgagcgccgccactgcaaacctgtactatagcgtccaggtatccggagttcaggatgagacttttgtaggcaacagtgttggctggactatcgctacacagagcggcacttccgcagcagatgatgtgaaggttatccggacggacgagtctctcaaaatcgaaaagagcattctccaggtcgtacgagggcagaagaccatccaagatgttacggatgatacggtacttcacgtcggtgatgttgttacatggcagatcaaagtgaccaataccggtaacgttgagctggaaaatgttcgaatcaccgatactctccatgcttctggaactttgcccaccagtgcgaaactgaaaatcgatgatgggcaggaacaggtgctgcccaccagttggagcgatggaaccggaggaaatcacagtgccaaatggaccattggaactctgccttacgacatggaacatggacagggcagctatgcggtgattacatatacgtatcaaattgttgacacggatgcgtccgcgcctgctacgaaagatctgagcaatacggcagctccggttggcatggcgccggatgcagattcccggctgactacccagaactttgttgaggtaccttcccttacggtggaaaaggacgggactgtgcaggtcgatgccggtaagatgcagatcgcatatgccgtaacggttaagaataccggcaatgcaccgtttacctctgttgtgctgaaagatgccaagttcccggcaagcgtttctgtcaagattgatggaaccacggttgacagtcagaaagtcgagctgtctggtgacacgcttacggttaacgatacgctggcaatcgatgccgtgatgacggtagaatacatctacaatgtgacggaacagcctgattctgatggtttcctgacagttaataatacagtcgaagtgaccggtactacggcttccaatggcactgctgccgggacggcttccgacagtactgaggtatactccggtacggtggaattggctcttgcaccgattgtgatttacactggcggcgatggaaatacccaggcgattattggtgcggatggccagcctgttgacagcgacgaaaccggtctgcctgtgttcggcgttacgatggatctcccgaatggagatgcagtggaagttaacgcgaatgaggtggctgcggagctgtatgatatttccaatggcggagagcacgcgggttattgctggagtgcattgccctacaatgacaatgcaaccgttctgatgctgcttaccccggaagaaaatacttccaaagttcgtattcagttgacggatgagaaaaataacgtcatcacgtctgacgagttctctatcggtgaagctctctgtgagaactacacgactgaactgtatgtggatcaattggaggataccacgattatcgcagaggttgacggtaaatactaccagattgcctatcagtcgtctacgctgacggttcgcggtacaacgcctgatgctgaaagcaataaggtcgttaataaagaaagcgaactcgataccagtgttgatgttccgcaggcggttatgccggaagacgcaaaatattattacgttagtggcaacgaggacaacgctggcgttttggaagttgccgatacttcttccgtgtctctccttgtggacgaaatcgttgaccagtccgttgagactgaccagcagtatgtccagatgatgaaagacaaagtcgaaaaggacagcagcatcttgggcgctgtccctgcggataccgctcgcctgtggcgtttctactacatggatctggttctggcaaacaacggcaacgctgttctgaccacggataaagacgtggaaatctactggccgtatcccagcggcgtttcgtatcaggatgccgttaatggtaagtacagctttaaggtgctgcattatactggactgaaccgtaattatgaatccgatacctttgaaacggaattggattcctgccgtgtggaggtttaccaggttaccgcaaccgagaagggcctgaaattcacggttccggccaaggacggcttctctccctacgctctggtgtatgagtactccaccaagggcccggatcagaccgtgaccgtggaaggcgacgaccatcccgatatcgcggaagccattgccaacggcacctggggccagcccacgccgactcctgcgcctgcggtcattccgcagaccagcgatgatatgcctctgggcatgctcatcggtgtggccgctgttgctgccgctgcactggtcgtgctgacggttctgcgccgtcgccgccgcaagcagtaaaatactgaccgggtaacaattatcccggaagaatttctgaatcacggccaaagcgccggggcgtaagccccggcgctttttgtcatatccggcagtttcacattgtatacaaaaacaatccatggtataatagtacaaatataatccagtggccgcgtttgtccctgtacaccatggcgagtatgcggaaaatcctgcggcaatttgtttgaacgggagtgtagcctgtgattccctttctttcccgtgcggaaaatcgatttatacggcagcggctttccgctgtgcgtcatgtgaccctggaccccggcggacccggcgtggtgcgcatccatctggtcccctgcaagacccggggccgcgatgttccctttgtggccatcctgaacggccgggacatcctgcccctgaatgtatcctgggctattttgctggccaatctcatcgatgccctgcagccttatgagggccaggaactccagaccgggcagtggaacgatgtagcggacaaggccgtggatgaaacggtggccgtgtacacccgtaccccccgggagcagatccgcgccgaccttgatgcaatgctggatgcgttccgcgatattgcggccgggcgcggcaccgaactgcccgtccggcagatgaacctgggagagtacgccccctacatggtggctccccaccgcatggatctgatggtcagctccatgcagaaggacggcacctggcagtgcaaccagaaatgcctgcactgttacgcggccaaccagccttacggctccactgccgagctggacaccgaccagtggctggcggtcattcagaaatgccgggcggcgggcatcccgcagctgacctttaccggcggcgaacccaccatgcgcaacgacctggtcaagctggtccgcgcagcccagtggtttgtgacccgcctgaacaccaacggacgcctgctcaccacgcccatgtgccgggacctgtacgaggccagcctggacgcggtacaggtgacactgtattcctgggatgcagcggtgcacaatgaactggtgggcgcaccgggatttgaggatacggtcagcggcatccgcaatgccctggaagcggggctgaacgtcagcatcaatacgccgctgtgcagcaaaaatgccgactatcgcaagacgctggaattcatccatgaccttggggtgcgctatgtgacctgcagcggcctgatcccggcgggcggcgccaagaccgagaaaagccgcaccacccgcctgtctaccgaacaactgacggacaccctgcgggatgccatggaatatgccgtgcaaaacggtatggagctggaattcaccagcccgggctggctgccggaggaaaccctgcgggatctgggcttccgcctgatccccagctgtggtgcctgcctgtccaacatggccatcgctcccgacggcaccgtgctgccctgccagagctggctttcggggccgggactgggggatatcctgcacgatccctgggacaagatctggaacgcgcctgcctgccgcaaagtccggcgggtcagcgcgcgcatggaacatatctgccagctgggtgacccccgccggcaaaaggaggacgcatgaaaaggataccgctgcaccgcctggcctgtctgctggcggcggtgatgctggctgccctgtgtgtacccgcagtgtcggccgacgagggcgattacgatgagattcagagctatgtcatcacggtggacccccgccaggacggcagcgcggacatcacctacgagatcgactggcaggtgatcggcggcggctcgggagattacctgtcctgggtcaacatcggcctggccaacagctacgccgacgagatcgagatcctgaccccggataccgtggcggatgtctccctgaccaccgacaacggcagctatgccaaggtgaccttccacgacaagtattacgctccggatgtggcggcggccaacggcggccagagccgggtggagtttgccttccgggtgcaccagagccatctgttcaccatgaacgacgacgacacggcaagcttttcctttacgccgggatggtttgaggatatctgcgtgcagagcctgacggtgcgctggcgtaattatgacggctttctggcggacaatcagtcggtggacggggattacctggtctgggaattcggtcccctggaacacggcgagcgcgtcaatgtcaacgtcacggtccccatcgtgacggcggatggctacgccgaggaaaacgaacgtacctccgctgacacggctttccctgttggggaaatggtggtggaggattccgactccgacggcgcattcctgggaatttttgtcctgatcctggtgctggtcctggtttacagcatgacggctcggccggcacgctggcgcggcggcatgggggcggatgatgctgcggcgtggatctggtattccaacaatctgcacaccatccgtatgcgccggggcgcacggcccccggccgggtatcatgccgtgccgcctccccgggatttccatacgggcggcggctctacccgcggcggcggagcggggcgctccgacaccagccaccacagcggatgcgtctgtgcctgtgcctgcgtttcctgtgcctgcgcctgtgcctgtgcgggcggcggacgggcaggatgcagcgtgaagaacttctaccgcatccggctgccccagacggcaatgccggacaaggagcaagaccatgagcattgaggaacaatacgacgcctgggtgcggggcctgatgggctccacccgtgcgggcagcaagcgggatgccgaggaagcagcccgcagcgttgaggaaatgcagcgggcgctggaacagttctccgccccgcgcaaggaccccacggaagcggtgcagcgggcggccggggctacggccgagaacgtccgccgcatgagcagcgaactgacccgctccctgcagcgggatggtctgctggatcatgtcccggaaccgcgggagaaccccgcgccggcgaaaaaaggagattttgtcggcctggccgacaaggtccgcgcccgtgtgctggggcaggatgcctttgtgggagcgctggtcaaagccttccggcgcccctttgtcatgggcgtgccccgggattcctcccatgtgcgggggcttatgctgctgtgcggcacggaaggcaccggccgccactatgcgctgaactgcgttgccgaggaaatggcggcgcggggattgttgtccagcgcccgcatcgagaccatggatctgtccctctatccgggtcctgcccaggaaaagctgtttttgcaggatctgtacgcggcgctccagtcgaaggccgagatcctggccttcgaccactacgagagttgcgcgtcctcgtatctgaatatgctggccaccttggccattgacggcacgctggccctgtccagccggtatgtgctgcagcggggcattctggtggacgtgggcactgccctggcccccggcgcggtgggagagctggaagcagggggaaagtatttcgtgttcttctcccacaaaggccccgaggccctggccgagcgtttcggcgcccggtttgtggatgccctgtcgggggatatctgctctacccagcccttcacccccgaaagcctgaacgccattgccgcccgggaactcaattccctggcccagaaagtccgcgcccagtgcgggctggtccttgccatggacagcacggtgcgggatctgctggcggcgcagtacggaaaagcccggggcatcgaggccatccaggagtatgcggacaacgcctaccgcgcggtggtggagtacgttctggaccacgaggaacctttggctgccggaacgccggtgcggctgagcgtggccgacggccgtctgatggcggctgtgggggacggggaaccctttgacctgttcggtctgctgccccagcagtaccgcggtgacgtggccgctgtggaggcggaactggatgccattgtgggactggatgaggtcaagacctttgtgcgtgacattgcccggaacgtgcaggcccagcagcgccgcaaggctcagggtatgaccgcggccaccgtcaatatgcacatgatttttgcgggcaaccccggcaccggaaagaccaccattgcccgcattctggcaaagtatctcaaggccatcggcgccctgcggggcggccagctggtggaagtcacccgggccgacctggtgggccgctacgtgggccataccgcaccgctgaccaatcaggtcatccagagtgcgctgggcggcgtgctgttcattgacgaggcgtacagcctgtaccgtggacaggacgacagtttcggcctggaagccatcgacacgctggtcaagggcatcgaggaccaccgggacgatctggtggtgatcctggcgggctacacccgggagatgcagcagttcctgagcgccaactcgggactggaaagccgcttccccaatcagatcgaattccccgattacagcggggaacagctgtggaggatcgcccagtccattgccgccggcaagggatatgtgatggacccctcctgtgaaatgccgctgaaaacctatttcgaccgcaaacagacggaggacgcggcccagaacggcaacggccgtatggcgcgcaatgtgctggaacgggccatcctgaaccagtccaagcgcttggtggcggacccgtccgcctccctggaactgcttttgccgggcgatttcgacctggacgactgagcaatttccagtgtttctcaaatccaatcaaacgacccccgcagggctgcccatggacagtccccgcgggggtcgttgtgtttgatgttaagctgtttactccacgtcggtgacgacggtcagcagcgtgtcaaaatattctccggcagccgccgcatcctcacgtccgggcaggaagagcccaacatcccgggagaaggggctgtcctccccgttgagggagatccaggtgtcctggctgaaagcgtccggcaggcattcccgcagcagtgtgtagtcaaaggtgcggttgttgggcgtgttggaggaagtgctttcgtcggaggaaacatacagcaccgcgatgttctccacctcgccgcgcaccggggaaccggagccgttcagcagggcggcaaaggtttcgtagctgttttcgcccttgcccacaatggaggtagaggaggcctctgccaggctcagacagccaaagaagcgggcatcctcgggcagggcatccacggcggcgcagaaggtatcatacatggcctgtgcatactcgccgtccaccggtgcctccgttccggcgtagagggcctctgcgctgttttcgcagaacagctccaccatggagaagttgtcaccgaacagcgtttccagcagttcggggtcatcgtccaggacctgcgtcaggcggagaaggacgtatttgctgcccgtttcggtggcggaagcatcgttgcggtccatccagtacaggatgtcggaaaggctgtcgtcaacctccgcgtcggggtcgcgcagcagggagagcgcccgcacagccagcgccggcgaggtatcggtccccagaccgatgaggtggatcttgtccccgctgctctgggtggcgttgtattcccgcagccactcgtagaactgcagatcaccggtgttggcatccccgtgaagggccagatactggtcatacagggcttcgtcgccgccgttgatgtagttgtccagcagcagcccggtggcaaagccttcttcggtgagcaggtagttcacgccgtcctgctcatgtaggcgggtcagcgcggcctggcggacggtcagactgtcgctggcggaagtgtcgtcgcccatcaggcagacgcgggcggcgatgggctcggatacggattcctcgctgtcctccgtctcctcggcttcgtcggtgtcggccggccacattccgctgccgtccgcaagatccacagcggagctgttttccgccagatattccccaaaggattccagctcttcttcagagtaatcctccagcgccgtctccaccgtctcgccgttgggatagacatcgctggtgctgtccacaccgtacaggaacttgtgcaggatggcaatgttctctgcccagtcggggtcatacatcaggcggtcgtccatgccgtagcggacgccataggtgccttccgcgggcagggacagctgttcggcggtaacgcccaggaaatcaggaagctgtaccagcagcgcggcgatctccgacttggtaaagttggtctggaccagaggcagaacggtgttcagcaggttgtccagttccatgggcgtggcattctgaatctgatccagcacggcctgaatgaccgtgcgctgacgctggatacggacccagtcgttgtcaatggaacgcaggcgggcatattgcagcgcagtgtagccgtccatgtggttgagacccggttcgaccttgtcaacgatcagcatggagttggagggaacttcccagttgagggccgcggcttcctcctcggtcaggtagatgtcaacaccgcccacggcatcgacgatctggacaaaggagttgaagttgatgcggacataatggtccaccgctacattgaagcagtcttccaccgtttgcatggtcagctttgcgccgccgtagcggaaggtatgggtgatccagtcgtactcgccctcgtatccgtccagcaggatgggaacgccggtgccgcgctcgatggaaaccagcttgatggtgtcctcctcaatgttgagggagaccaggatcaggctgtcggcgcgggcatcttcgctgaattcggtagtggcgctggtgccgtccagatcgttcaggtgggtgaaagcgtcccagtcgttgacggcatcggtgcgctcgtcggtgctgatgagcaggatgttcagcacgttggaatcctcaaagggactgccctcgggcatgatcatctcgccggtgttttccaccagaccggtgccgtccagatcctggtcctcgtccgcgtcgatggtgccgatggagtccacactgccgtcatcgtagcggatcagatccagcttgccgttgatgtacagggctgcggcgcccaccaggaccagcagaacgcacaggatccccaacaggatcttgccccacagcggaatgcggcgcttctttttgccgttttttccaccggtctgaggagaagatttgtggtcatcggaagacggttccgccttgcccggctctccgccggagtcctctttggcggcgtctggggacggggtatcgggagacgcggtttcgtcggaggtttttccctcttcggcgggggaatcggactgagcggccggggcgggggagggctccggtgcggcggagacgccggcagcggccgttttgggctcgttatcttgctgtgtcataatattcctctaaataaagacgatatatcgcctgaattttggaaatgcacagacggctgtgacaaaagaaaagacagcctgccgccgagcattacacacttcataataccatactttctaacatattgcatcaattttcgcggagctttcacatttgggaaacacagctaaaacagaagataggaaaagcgccggagcctgggctccggcgctttttacgatcctgtacgggaccgatttgggatttactggttgcgcttacgcttgcgcaggatcaccagcacaacgataccggctgctgcaatgccggctgcgccgatcagcagagtgatgggcatgtcgtcactggtctggggaatgaccgcaggcgcgggggtcggcgtgggctggccccaggtgccattggcaatggcctcggcgatgtcagggtgctcgtccggggtgggagtgccgacgaccgtggtgctctggctgttatcccacagcagaacgtacggggagaagctgtcggtctggaaggaaatgccgtaggcatcggtggtgacggtcagcgtctcaatttccgcactttcgatggcgctctccacattgtctaaatccatttcgcggtcaagatctttgaaatgaaccagcttgaaggtggtgttagtgtcggtaccatccgggtacggccagtagatcgtgactttttcgctgggggtcagccagacgttgccgttattagcgtccaccaggtcaaggtatttggcttcgtactttacttcctgcataccttcggcggcctcatccaccgccttatcggtgagcagggagtaatagtcgttggcaccctccgtgtttccatctgtaacgatatcgtcaaacagcagggaaacatcagcaaagttttcgccctcggtgacatccacttggctgtcattgatgaagaacttggtgtccttatcgcggatcacataggccttgtcaagggcggtcttgttggggttgtcctctttggaagcctcttccacgctggtgaaggaagaagtgaccacgctgtcctggtcgccggtgacatagcggatgttcagattgccgggagctgtggtcatggtgcagtagtaggtttcggtcttttcctcgcccacgggaatatcaatctggatgatgacctgtctcaggtctaccagtccggcatagacattcattatgtagtgctgagacagggagttgatatcagcgggatcaaagttgtcgctatcgtaggtggtgccgttttcgtcggtaaaattcagacggaaggaaggcgtctcatcattggcaggtgtgatggcatagatgtatttgttgttcgcagcagagaaggtgttgccataaggaaccagagtccaggtataggaagtttcacccacagtgcggatggtgatcagatcggaaagattggcaggggttccctccgtcacaaggccggcctcttccagaaccgtgttgatctcgctgggaagagtgatgtaatagccgggttccggcagggaattgttgctttgaatctcaccggtttcatcggcaacgccgctgtaaccatgttcgccgcccatataaatggtcatgtcggcaggctggaccacagcaatgtactgtttggtccatttggcatgcagagtggtccagttcttggtcagaggagtggtaaagtcaaacttgttgccgtcgctgcaggctgaatcggtgtaccaaccctcaaatatatagtaataatcatcgtcggcgctgctctggatagaaggcgcggcgggttcggagtaggtctggccatactcataagtggacacggtttcgggaatgccgctcacagcatttgcatcaacgccggcggggagattggcgtcaaactcaatgccgaccagaggggcgtagacataagtgcctttgcagtcaaagctgtgggggtgagaaccggtgtttgaagtataggcagagcagacatcagtgcaggcataagcccgggcaccgtaggtggtcgcggtggccgatacgtcttccttggcaggctgtgaccagtcgtagttatgatgggaaagctgagccgtggaaacctcgccgatttttgcattatctgcaccgagaatatctgcaggggcggtcacccgatcatcagcaaacagatcggcatcattgttgctggcggagttttcggcgtttccacgggcatatacggtttccatgaaggggttcaggagcagagtgtgcatttcatcattaagagcaatgctggcattggtcaaaactggtgtggtgttgctcttaagattgtctgccgcattggtgttcaagtcataggcaacgatgctgccgcttgtggtagtgacggaacccttgcggccaacagcgccgagccaggcgtaccccggccgcgaagcagatgtaccgccgtcgacggtcagagtatagccgttcagccagagatcaccggcgctgtaactcagtagcttttcaccattacagcgaagatccaccgagcaattggtcagactagaatccttcgactgaatatacacaccggcatagccgttgtgcaggacttccagccgggaattggtcatattaaatccaatgcaggagagtgcatgaccaccaaggttgccattcataatgatgctggagttattgacgatccagaatccggagttacaggcattgcccaggttattgctgacggtaatgctggagttgtcgaccagaatgttgacgttgttgattgcaaagccgcctgctctgttgtcgctgaaatcgatgaccgaatctttgaaaaagatggcatcatatccggtgaggttgtctccggagtagaagatattgatattgccgctgtcagtagatgcaccggtagcagacatggtggaatggtccagtttcagcacagaaccgccgtacatggcatagcaccagccattgtggttgtttgttgcggaaattttgctgttattgaactgtactgcgccggaattgccgtaaagacccaggaactggccgttatagccattggcagtcagggaacagttgttcagagcaatggtgccggagaagaaatagatgcatgcatcataaccggcggaagtgcttttggagccggagctgtcggtgacgaaggtgcagttttcaaaccgaacattaccgccaatccagagtttggtgatcacttcgccgttatggtaggagatgccgtcctgattgccgctaattttgacggtggggccggaaagattgaacgtgcagttggtaaaaaccacgggagagtcttcggcagcgtcctggccgctgatcatgacggtcttatccgtgtcaatgttgaagacagtgttctccttgctttccttgatgatgttgacgccggaggtcagagcatattcctcgctgccatcggaattggcaccgattatgctctcatcgacgccgataccggaaacggcaccgatcgagtcgtctgcaaatacggacacaggaaatgccgtaccgatacacagtgccagagcacacagcatacagacgaaccatttccattgggatttgactgtttgcatggggtaattcctccttcaaaacctatattccttttttgatatatccgtgggaatgacggaaaacgtatccctcgaatggaccctcccttcttgtgccgatatatcgcttcgacaggcgcatcaagccttaggtaacggcagtttccgggcaagttgttacaagcaggatgccatagctgacatgatgaaatactacataataaaaattatcttgcattatttgacaaaatagtatataatataaattttatatatttttgtctgcgtagtatatgttatcacatatccttttgggaagcaagaatatctgctgataaaagcccccggcatgtatacgcataaaagagaacccatggatttactgtaagtacgttcaaatcaaaaaacagtcaaacggtgtcggatggaatatataaaaagaaaaaccgcagccccgaaatggactgcggtcgatataactatatgtggatagaggttttactcgttggggcgctggtagaagcggcccagaatctgttcggtcttgatgacattgatgaaagccttggggtcggcacgcttgacggcgtggatgaccgacttggcttcgtcgctggaaaccaccgagtaaacgaccttgcgttcctcgtgctgataggagccttcaccgtccatcacggtagcgccgtggtggctgatctttgcgatctcctcatacacgtcctggggacggttggtgacaacgaacagggttttctgctggtagcgcttataggtcatgtgaaggacctgggtggaggtgaactggaagatgatggagtaaagcgccttgtcccagccgaacagcacgccggctgccgccaggatgaacacattgagcaccaggaccatgttccaggcgtcgatctcttttttctccgaaagatagatggcgatgaaatcggtgccgccggtggtggcgttcatggcaaggcagagactgatgacaaagccgttgatcagtccgccgaagatgctgatgagcagggtgtcgtaggtgatggggaaagcgggcagcaggtcggtgagcaggttggtgagcatgatcatcaggcaggaatagagggtgaactttttgccgatgaagcggaagcccagatagacgggaaaggcattaaggatgacgttgaccagggtatagggcagctcgacgtggaaccaaagctcaaacacccgctgcaaaagcagggtcaggccggtggcgccgccgggatacaatccgcccgtgcggacgaaagatttgatgttgactgccatgatcagggcagcaagacagatggcggccagccgcaggccgtctttttttatgtcaaatttcatggatacgataccgcctttactatgtagccgacgccctgccggtagaagagagcgccgctggattcgactccattatactaaatccatacccgcttgcaaagtttttttcggacggggctgcataatccccggaaacaggcgccacactaaggacagcagtaccgcgcggggaccgcccgcgcagaatctttcgcggaaaaggacggaggacaatggacagcttgaaagcattttttagggaaaaaggcctgtacttgatctgtttgggcctggtcctggccgccacggtgaccagtatctgggcgatccgcaacgtcgtgcgcggcgttgaaaatctgaacaacacggagaccacgcaggagggatcgacatggaatcagcccgacgctgccgtaaacaatccggcatccgatgtgccgcagagcacgccgaagccgtcggaggcgccgtctgcctcgtcgtcgtcctctggggcgtcgtcacaatctgccgccgtgcagggcgggtctggcggatctgccgcgtcgtcggcaccgtcagcaagctcctacactgcgccggtggatggtgagatctccctggccttcagcggggatgacctggtgtacagtgagacgctgggggactggcgcacccacaatggtgtggactacgcctgcaaggccggtgacgcggttagagcctcggcggcaggcactgtttcggcagtgtacagcgatgccctgtggggcagcgtggtggaagtgaccgacggctccggcaacgtgtggaaatactgcggcgtgtcggaacctaccgttgaaacgggggacaaggtctccggcggggacagcattggccgcgcaggcagcatccccagcgagtcggaggacggcgtgcacatccatctggagtgcatgcagggagagacctgggtagaccccaccaaggcgcttgccgggtaaattcttcatacaaaccaaaacagtgtgccgccccgttttttcggagcggcgcactttctgtgccgggagactgccagcgggaccgcaggtcaccgcagacaagaacgtcgccccctcccgcggtgggcagggatggagcccgaagggaaaattcctggcttaccatttgggcagtgtactgcctgccaacaaaaacagcgccgcccggcgggaacttcctgccgggcggcgctgtttcttatttaaggtttatctcagtagactttggcttcctcttcgccggtcacgacgcgcaggccgccctgtgccagggccagcagctcgtcctcgccggggtagatggtgatgggagcaatccagcccaggctctcggtcagcttgtccttggtcagctgggcgtaggcgatgccgccggtcaagatgatctggtcgaccttgccgtgcagcacagcagccatggcgccggcgtccttggcaatctggtagtagaaagcgtcctggatcagcttggcgtaatcgtcgccctcgtccaccatcttctccaccacacgggcgtcgttggtgtgcaggtaggcgttgaagccgccgttgccgcagatcttcttgtagatctcctgctgggtgtacttgccggagaagcacatcttgatcaggtcgcccacaggcacggtgcctgcgcgctcggggctgaagcagccctcgccgtccagaatgttgttgacatccacgaccttgcccatggagtgagcgcccacagaaacgccgccgcccatgtggatgacgatgaggttcagctcatcgtagcgcttgccgttctccttggcgtagcggcgagccacggccttctggttcagggcgtggaaaatgctgcggcggggcagctcgggcataccggagatgcgggccacgtcggtcagctcatccacgaccacggggtcgacgatgtaggagggcttgccgatggcgtcgccgatctcacgggccaggatgccgcccaggttggaggcgtgctggccctggacacccttcttcaggtcggccagcagctcgtcgctgacagcgtaggtgccgccggggatgggcttgagcaggccgccgcggccgacgatgacgtccagggagtgaacgtcgcagtttttctccttgaggaagtccagaatgatctgcttgcggaaatccttctggtcgatgatggaggcatacttggcgatctcctcggtgggatggcgcagagtttcctcgaacagcagggtctcgtcctcgaagacgccgaccttggtggaagtggaaccgggattgatgatcaggcttttgacagacatgatatggtactctcctttatgcacggcgacgggcgtcgattactgctcgttgttcaggccggcggcgacaacggctgccagcgcgatggaattgaccttggtctggaaggagtcggagcggctggtcaggatggccgggaccttggtgccggtcaggatgcagccgttctcgcactgggcggtgtggaccagcgtcttgtagaccaggttgcccgcctggatgtcggggaagagcagaatgtccgcatggccggcagcaggacgatcctgagcgcccttgtgggcagcagcctcgggatcgatggcgatgtccatggacagggggccgtccaccacgcagccggtgatcttgccttcttcgttcatcttgcgcagctcgtcggcgtccacggtgcagggcatcttgggattgacgacctcaacggcggccaggggcgcgaccttggggcaggcaacgccgcaggcatgggcgacggaaacggtgttctcgatgatatggaccttgtcctccagagtggggtaggtcatgaatgcgacgtcggtcaggaagagcagctgctcgatgccctcaacctggaacacggccacgtgggacagagtcttgccggtacgcaggccgacttccttgtccagaatgctcttgaggaaggtcttggtgtccagcaggcccttcatgtacatatcggcctcaccgtcgtgggccagcttgacggccttcagggaagcctggaccttgtccggctcgttgatgatgcgccagccggtcaggtcgatcttcagctcagcggcgatctcgcggatcttggcctcatcgcccaccaggatggcgtcggcgatgccctgctcacgggcagcgttgacggcttccagaacggcgtcgtcctccgcagcggcaacggcaacggtctttttctcacactctttgacacgggaaatcaaatcgtcaaaattcattgttactccacctcgtttagctgtttaccctgaaaaaaagcggctgacgcagatctgcgtcaaaaaaggccgctatctgttaaaagaataacacgcggcagggaaagggtcaagaggaagcagggaaaaatagcgaaaacccgcaatattgtatgcggcaaaacccggattttggcctttttgcaccccgcagcgccatatttcgccccagatgccattataaataggtaaaacaaagctttccccaggacaaagagcaaaaccgcaggaaacagggcataaaaagttatcggaaacaaaatgtataaaaagaacaataaaagtggaaaaaacacgagcataacaacgaaaaactgccaaggggacgccaaaaatcaaaaaaaacacatctttccattgacaaaaccttaacgaaatagtaaaactataaatgaggatggcgtaaaccgtccgtatcaggcaccaacctttcccacgtaatacccaaacacgcacggattgaacctcggtgccttaagattttgccctgacctgttacatttttaacagcgaaggcggcgactgtgaggtcgatcccaatgcccatagccatgtatcccggcagctttgatccggtcaccaacggtcatcttgacatcatcaaacgggcttcccggatgtttgacaaggtcatcgtggcggtgctcatcaacagcgccaagcatccgctgttcacagtggaggagcgcgtggaactgctcaaaaagtgctgcgcgtccatgcccaacgtggaggtcaagtcctttgacgggctgacggtacattttgccaaggcaaacaatgccgccgtcatggtgcggggcctgcgggcggtcacggattttgaaaatgagatccagcttgcccacaccaaccacgccatcatccccggcatcgagacggtgttcctggccacctccatccgctggagttacctgtccagcaccgtcgtcaaggaggctgcccactacggggcggacatctccaagttcgtggcgccctgcgtagacgcggcgctgcgggaaaaagccgcgcgcggcgaagtctgagcgcgcacaaccaaggtccacgccgcgcaagcggcttgcgataagcataggttctcgatagtcctatccatacattcaaggaggctgttttcatgaagaagatcgtcattgccagcgcctgccgtactgccatcggcaagttcggcggcacgctttccaatgtccccgcggcagaactgggctccatcgttatcaaggaagccatcaaccgcgccggcatcacgcctgagcaggtcgaccatgtgtacatgggctgcgtcatccaggccggtctgggccagaacgtcgcccgtcaggccagcctgaaagccggcctgcccgtcaccaccccggcagttacggtcaacgttgtctgcggctccggtctgaactgcgtcaacatggctgctcagatgatcgaggccggcgatgccgacatcgtcgtcgcaggcggcaccgagaacatggatatggctccctttgccatgatgaagggccgctacggctaccgcatgggctaccccatgggcaagagcgagctggtcgacaccatggtcaacgacgctctgtgggacgctttcaacaactaccacatgggcatcaccgctgagaacgttgccgagcagtggggcctgacccgtgaggatctggacaacttcgctttctccagccagaccaaggctgacgccgccatcaaggccggcgcgttcaaggacgagatcgttcccgtcgttatcaagaacaagaagggcgacatcgtcttcgataccgatgaaggcccccgtctcagcccgccggaagtcctggccaagctgaagcccgctttcaagaaggacggcatcgtcaccgccggcaactcctccgccatcaacgacggcgctgctgctctggtcatcatgagcgaggacaaggccaaggaactgggcatcacccccatggctacctgggttggcggcgctctgggcggcgttgatccctccatcatgggtgtcggccccatcgccgctacccgcaaggtcatggaaaagaccggcctgaccgttgccgatatggacctcatcgaggccaacgaggctttcgctgcgcagagcctggctgttgctcatgacctggagttcgacatgagcaaggtcaacgtcaacggcggcgctatcgctctgggccaccccgtcggcgcttccggcgcccgcatcctggtcaccctgctctacgccatgaagcatcgcggcgccaagaagggcctggccaccctgtgcatcggcggcggcatgggctgctccaccatcgtttcgatggactgagcacgtcataagcgataaaggagatacgcactatgtcttttgtgaataccgaagttcagggcgccgttgcggtcgtcaccattgaccgtcccaaggctctgaacgccctgaaccccgaagttctggccgacctgaaagctgcctttgagggcatcgatcagaacaccgtccgctgcgtcgtcctgaccggcgcaggggacaagagcttcgttgccggcgccgacatcggctccatgtccaccatgaccaaggccgagggcgaggctttcggcaagatgggcaacgacatcttcctcatgatcgagaacttccccctgcccgtcatcgcggcagtcaacggtttcgctctgggcggcggcaatgagctggccatgagctgcgacatccgcatctgctccgacaacgctgtctttggtcagccggaagtcggtctgggcatcacccccggcttcggcggcacccagcgtctggcccgtctggtgggcatgggcatggccaagcagatggtctactccgctctcaacatcaaggcggacgaggccctgcgcatcggtctggtcaacgcggtctatccccaggctgagctgatggacaacgccatgaagctggcttccaagatcgccaagaatgctcccatcgcagtccgcaactgcaagaaggccatgaacgagggcatcagcctgcccatggacaaggccgttgaggtggaagaaaagctgttcggcgactgcttcgagacccacgaccaggtcgagggcatgcagtgcttcctgtccaaggaaaagccgaagcccaaggcagtcttcaccaacaactgagatcttttgtacagctgcgtctgtgccggtaaagctgccggcacagacaatattgaaactctgccctccgcgggcggaatgagataacaggaggttactacaatgaaagttggcgttatcggcgctggcaccatgggccagggcatcgcgaaggcatttgcacagtgcgagggctacaccgtggccctgtgcgacatcaagcaggagtgggccgagggcggcaaggacaagatcgccaagggctacgccaagctggttgccaagggcaagctgacccaggagaaggttgacgccatcctggctgccatcaccccgggcctgaaagaggacctgtgcgcagactgcgacctggtcgtcgaggctgcttttgaggatatgaaggtcaagcagaccaccttcgccgagctggacaagatctgcaagccggagtgcatctttgcctccaacacctccagcctgtccatcaccgagatcggcaagggcctgtcccgtcccatggtcggcatgcacttcttcaaccccgctgaccgcatgaagctggtcgaggtcatcgccggtgtcaacacccccgccgagaccgttgagaccatcaagaagatctccgccgagatcggcaagacccccgttcaggtcaatgaggctgccggcttcgtcgtcaaccgcatcctgatccccatgatcaacgaagctgccttcatcaagatggagggcgtttccgacatcgccggcatcgacgccgccatgaagctgggcgccaaccatcccatgggccccctggagctgggcgacttcatcggcctggacatctgcctggccatcatggacgtcctgtacaaggagaccggcgacagcaagtaccgtgcctgcccgctcatccgcaagatggtccgcggcggcaacctgggttgcaagaccggtaagggcttctacgtttacaatgccgaccgcaccaagactccggtcgacgcgctgtaaaatataacgcgtttctcccgccgcctgcagggcggcaggagaaatttgtttgcataggaggttgcattttatggattttactctgtccaaacagcagcagatggtacagaaaatgtacaaggaatttgctgagaatgaagtcaagcccctggccaagaaagtcgacgccgaggagtacttccccgttgagaccgtcaagaagatggccaaactgggcatgatgggcatctacttccccaaagaggtcggcggcgccggcggcgacgtgctgtcctacgtcatggccgttgaggaaatgagcaaggtctgcggcaccacgggcgttatcatctccgcccacacttctctgtgcgctgctcccatctttgagaacggcacccccgagcagaaggccaagtacctgcccaagctgtgcagcggcgagtggatcggcgctttcggcctgaccgagcccggcgccggcaccgacgcccagggccagcagacctacgctgtggatgaaggcgatcactggaagctcaacggctccaagatcttcatcaccaacgctggctacgccaatgtgttcatcatcatcgccgtcactggcaccgtgctggacaagcgcggccgcaagcagaaggagatctctgctttcatcgttgagcgcaccgaccccggcttcaaggtcggcaagcccgaggacaagatgggcatccgtggttcctccacctgcgagctgatcatggaagactgcatcatccccaaggatcgtctgctgggcgtgaagggcaagggcttccagctggccatggctaccctggacggcggccgtatcggcatcgctgctcaggctctgggcattgctgagggcgccatcgatgagaccgttgcttacgtcaaggagcgcaagcagttcggccgttccatcgccgctttccagaacacccagttcgagctggccgagatgaaggcccgcgttgacgcagccaagtacctggtttacgctgcggctcagaagaagcaggctgtcatgaacggcgccaaggcccgttacagcgtcgaggctgccgaggccaagctgatcgccgcccgcaccgccagcgacgtgacccgccgctgcctgcagctgttcggcggctacggctacacccgtgactatcccatcgagcgtatgatgcgtgatgccaagatcaccgagatctacgaaggcaccagcgaagttcagatgatggtcatttccggcgcgctgctgaagtaaggaggcaagacgtacaatgaaagctatcgtttgtgtcaaacaggtccctgatactcagggcaaagttgccgtcaagccggacggcacgatggaccgtgccgccatggccaccatcaccaaccccgacgacctgaacgccgtcgaggctgctctccagctgaaggaagagaccggctgcgaagtcgtcgtcgtcaccatgggcccgcccccggccgagggcatgctgcgtgagctgatcgcccgcggcgctgaccgcggcgtgctggtttccggccgtgagttcggcggttccgacaccttcgccaccagccagatcctggccgctgccgtcaacaagatcggcgttggccccgacgacatcgtcttctgcggccgtcaggccatcgacggtgacaccgctcaggtcggcccccagatcgctgaaaagctgcatctgccccaggtcacctacgtcaccgagatcaagaaggacggcaacagcctgaccgtcaagcgtcagctggaagacggctacatggagctgaaggttcagactccctgcctgctgacctgcatcaaggagctcaacgagccccgttacatgagcgtgtccggcattttcgagtgctacgacaagcccatcgatgtctttgactacaacgctctgaaggacgatcccctcatcgagaccgacaccatcggcctgaagggctctccgacgaacgtttacaagtctttcgctcccccggtcaagggcgccggcatgatggtcgagagcgtcggccagctggtcggtatcctgaacgacaagcacctgatttgagagaggagagaaaaacaatggctgaattcaatgcaatggataccgccgctttcaaaggcgtatgggtgttctgtgagcagcgcgagggccagatccagaccatcagctatcagctgctgagcgaaggccgcaagctggccaacgacctgggcgttgagctgtgcggcgttgttctgggcagcgagctcaatgaggattacatcaaggctctgggcggctacggcgctgaccgcgtttactacatcgacagccccctgctgaaggactacaccaccgacggctatgccaaggtcctgtgcgacctggtcatggacaagaagcccgagatcgttctgatcggcgcgaccaacctgggccgcgacctgggcccccgctgcgcagcccgtctgcacaccggcctgaccgccgactgcacccacctggatgttgacgtggagaagtacaagaacttcctgcgcaccacctccaacatcgacgtggacaacaccaagttcgaggagaacaccaacctgaagatgacccgtccggctttcggcggtcacctgatggctaccatcatctgcccccgcttccgtccgcagatgtccaccgtccgtcccggcgttatgcagacccaggcctacgatgaggccggcgctgccaaggtcgtcatcgagaaggtcactcccgctctgaccgccgacgacatccatgtggagatcctggacatcaagaagagcgccaagaagctggtcgacctgatcggcgccgacgtggtcgtttccgttggccgcggcatcagctccgacgtggagaagggcattgccctggccgaggaactggccggcgttctgggcggcgtcgtgggcgcttcccgtgctgtcaccgatgaaggctggctgtccagcgatcatcaggtcggccagaccggcaagactgtccatccccgcatctacgttgctctgggcatctccggtgccatccagcacgttgccggtatgcaggactccgagaccatcatcgctgtcaacaagaacgagagcgcgcccatcttcgatgtggcttcctacggcattgttggcgacctgtacaaggtcgttcccgagctgatcaaggagatccgcgccattaaggcagctcagtaattcctgatccattcccttaaaagcacattacacagcaaacatcccccggaaggctttctcgcccctccgggggatgtttctgtttgtgtgggactttcgggctgcggtatggcagaagcgccgctcggcgtactttgctctgccgtgcaggggacacattggaacaggggagaaggactagctgtcccgggcagaaaagcagcatagcagaaaaaaccacacaaaaaggcccgtgcggtaccggattttccggcaatggcacgggcctgccgtccggcacagatgccggtcggcttatttcattttgaggaaattactgcatgctgtggccggcagcgccgatggtctcggggacccagcagctggcggtgtcatcaccggaagccgtcacaaaagcatcagcgatctgggcagcggtgaccgtctcggacagagcggtgtccaccatgatgagcatggcaatgttgccggcagcgccgacctgcaggtcatccgcttgggcgcagatccacttggcggggtcaatgccggcggccatctggttggcaacctcggtggcgtccacgccgtccttgacgcggaccaggaccaggctgtatgcctggctgccgatcatggcctcggaggcaacggcggcatccagattggaagcatcctccagaccggtgtagtaggtgacccaggaagcctggctcagatcaacgccgctggtggccaccatgatgcccgggtccaccgaagcgtagatgctgtcgatcagcgcggacaggtcggcgtcagcttccacgggctcggtgctcgtaccggaatcgccgtccgtggtctcgccgccctcaggcggggtggcaggctcctcgggatcgacgtcggtctcgggggtggactccgacgtggaggcggactcggaagaggaactgtccgaaccggtggagtcggagggcgcggagctgcatccgacgacggtaaaggccagcgcggcggcgcacagcagggcaatcagctttttcatcatgttgtttctcctttcaaaatgcgggaaatttcccgtctttcgacaaataaaaagggtcgggacctccggtcaggaggtcggcgggggcaaagcgggcgtcccaggcctcggcaggcaaggtgtcaaacaccagcgcccgggggcagaccagcacggcatgtcctcggaacccggcgagaaagcggtcgtagtatccgccgccccgtcccagtcgcaccccgtcacggcccgcggccagacagggaacaacggccagagcgcggcttcccagcgtttccggtaaaattaccgggccggagaccggttcccggatgcccagcgcgttggggcgcagtgtgtccagcgacaaaagctccaccagttccatcctgccgctgcccagcatccgggggacgcacagccgcttgccctggtccagtgccgcccgcagaatgggctccgtgtccggttcgctgggcagcgagacaaagcaaaaaacggtgtctgcgtcctgccagtcggggcgggtaaacagcttgtccgcgatttccgccccggcagcggccagatcctccggcgtcagggtgcgcaggcgtgcttttgccgcgctgcgggcttcccgtttggcctgggacagatcggttggggagtgtgacataggggagcacctcactcatgggagagattcccgcctattgtagcatgccgcggaggtttgcacaatacgcctgcaaggcccattgtctgtccgctgcccataaggacggaaaaatccccgggccgttacagtgaaaagagaggacgccgaaaaaatttttgttttttgtcggacaggaaaaaagaggatacccccgcgggaaagggccgcttacaatggttacaacctgtttgcagacgccggttgtgcttgcacagacggccaaaacagagtagaatatcactgtataagtagaagtatgcccggccgtgccggacttaataaagacagaggagcaacaaagatgggcaagttcaattttatccagaccgagatccccggcgtcgtcatcattgaaccgacggttttcggcgacgaccgcggctattttatggagacctaccaggcggacgagttcgccgcggcgggcatcgaccgtgcctttgtgcaggacaaccagagccgttccaccaagggcgtgctgcgcggcctgcatttccagaaaaaccatacccagggcaagctggtccgcgtcaccctgggcgaagtgtacgacgtggccgtggactgccgccccaacagcgccaccttcggtaagtgggtgggcgtgaccctctcggcggaaaacaagaagatgttctatatcccggaaggctttgcccacggtttcctggtgctgtccgacgtggccgagttcacctacaagtgcaccgacgtctacgaccccacctccgagggaggcatcccctacgacgaccccaccgtcaatgtccagtggccggactgcggctgtgagcacaagaccagcgccaaggacaagcagcacgagccttttgccgcacaggattttgcctggtttgccaagtactgatcccggcgtccagccgtcccaaccacaccaaaccggaaaggcggaacccgtttgcataccatcaaaaactattttgtcggcttttggcgctaccgctacctgctgcaaaacctcatcacccgtgacttcaagctcaaataccgccgcagcgttctgggcgtggcctggagcgtgctcaacccgctgctgacctgcctggtcatgtgggcggtgttcggctcgctgttcaacagccgcgggcaggggattgaaaacttcccggtattcctgatcatcggtcagctgatgttcaacttcttccgggaagctaccaccatggccatggagagcgtcctcaaaaacgctccgctgctgcgcaaggtctatatccccaaatatgttttccctctggaaaagacctgctttgccctggtcaactgcctgttcagctttgtggcgctgctcatcgtggtgctggtcacccgggcgcccctgtccctgtccaccgccctgctggcgctgtacccgctggtcatgctcttctttttctgcctgggcatcggacttttgctgtcggcgctgtacgtctttgtgcgtgacatcatgcacatctgggaggttttctgcacgctgctggtctatggcagcgccatcttctacgaccccacccagatgggcattgcctgggtgcagtatgccatcaacctcaaccccatctactggtatattacctctgtgcgcagctgcgtgatgtggggccagggtctgacggccaacatgctgctcatcgactttttgtgcgccgcgctcagcatgacgctgggactgtgggtgttcaaggccaaccaggacaagtttgtcctgtatatgtaaggagggcgcaggatggacagcaagaccccgatcatctctgttgaaaatgtctccatgcgcttcaaccttgccaaggaaaagcacgagagcctgaaagaatacttcattgccctgacccatggcggcatccgttttgacgagttttttgcccttaaggacgtcagctttgacatcatgcccggggacttctacggcctgatcggcctgaacggcagcggcaaatccacgctgctcaagatcatttctggcgtgtacaagccctcctccggcaaagtcacggtgcgcggcaccattgcgcccctcattgagctgggcgccggctttgacatggacctgaccgcccgggaaaacatcttcctcaacggcacggttctgggctatacccccaaatacatccgctccaaatttgacgagatcgtggagttcagcgagctgcaagattttctggatgtgccgctgaaaaactactccagcggtatggtggcccgcctggcctttgccatcgccaccatgaccaagccggatatcctcattgccgacgagatcttgtcggtgggcgacttcctcttccagcagaagtgcgaaaagcgcatggccgagctgatgagcggcggcaccaccgtcattctggtcagccattccatcgaccagatcgagcgcatgtgcaataaggtggcatggctggaccacggccatctgcggcgcaacggcctgaccgggcccatcgcccaggagtaccgccatttcaagaaacaggacagcatgaaggcggaaaagccggaatgacgctgccccgtccgagcctttgactgcgccccggcccctttgggcgggacgcataaagggtgtgccccggggcaaagcccgtccgctctctcaccgggagcggcggggctttgcctttttacggggctgcccatccatagaatgcaggagtttttatgcagcagaatccgcaggatcaaaaccggccggccgatgtggccgcaccggatagtgtcgggggaatggccaaacgcctgatggacccggcccatctcaaggacctggcaggccgcagcgtgcgtacgctgcgggagcagggcctggaacagctctggcgggatgtggtgttccgcgtggggctggcctttcaccatgacggctggcgtcaccgggcagacatccccctgcgccgcaccctccgcgcccagcgcgccgaaaatctgcagggtccctgcatttcggtggtggtgccggtgtacaacacgcccatgcggtttttccgccagatggtgcagagcgtccagcgccagacctaccgcaattggcagctggtgctgatggacgcctccgacgccgaacacccccagccggggcagctggcccggcggcttgcccaaaaggacagccgcatcgtctatcgcaccatcgaaaatgccggcatcgccgccaacaccacagcgggttttgcggcggcgacgggggaggcggtggccctgctggaccacgacgacctgctctatcccaatgccctgtatgagtgcgccaaggctctgaacggcggggcggacttcgtctattccgacgagatcgtcctgtcggcggacctgaaaaagctgggtgggtaccacttcaagccggactttgcccctgactatctgcggggctgcaactatatcacccacctggccgtctttacccgttcgctgctggacgcggtgggcgcggccgagtacagcgagtttgacggcgcgcaggatcacgagctgttcctgcgcctgaccgagcgtgccagaaagatcgtgcacatcaagcaggtcctgtatatctggcggggtcacgccgggtctaccgccgccggtatggaggccaaaccctacgctctggaagccggtgtccgcgccgtggatgcccagctggcaaggctgggcatgcggggcaaggccatgcaggcccccggtgcgccgggcgccttccaggtgcggtacgagctgaccggccgtccgctggtcagtgtgctcatccccaacaaggaccacgttgaggatctggaccgctgcctgcgcagtctgtacaaaaacgccggatacgataattttgaggtcctggtcattgagaacaactccaccgacccggcgacctttgcctactatgaccgcatcgtggccgacccggccatgccccggtgcaaggtggtgcgctatcacggcgggttcaacttctcggccatcaataactttggtgcgcggtatgccagcggcgagtatctgctgctgctgaacaacgacatcgagatcctgtcccccgactttgtgcgggagctgctcagctatgcccagcgggccgatgtgggcgcggtgggagccaagctctactatcccgacgacaccatccagcacgcgggcgtgctcatgggtatcaacggcagcgcaggccacagccacaaaagctatccccgcaaggccgtgggcgatctgtaccgcctggtcaccacccagaactatatggcggtcaccggcgcctgcctgatgacccgggcctccctctaccgccagatgggcggactggatgagaaggattttgccgtggcctacaatgatgtggactactgcctcaagctgtggaagcggggacttttgaatgtctacactccccgggccgaggcctaccactatgagagcaagagccgggggctggacaccaccggtgagaatgcccgccgctatgagcgggagaaggcggccttctacaacaagtaccgccagtggatcgacaactacgatccgtattataatccgcatttcaacaatctgtatgaaaactttggcctgaaataagccgatacaacgacaaacctgctccgcgtaaaggaggatatggtcatgccgcaatacgatgctccccatagccggatgcccgccgaaaaagtgcaggaactgttccgctatgcctgggcggctttccgcagtcagtttgccccgctggcactgatgggcatggggatcggcgtcctcaaccagacgatcgatctgatgcccaccgccctgcgcattgccgccggctttgtgctgtcccccattctggtgctgggcttttaccgggcctgcctggaagccctgtgcggcaaaaagccccgctggggaatgatgctgtgcggtgtgaagaacctgcgcaccctgggcaatgctctgctgatggggctgcctgcggcacttctggatgtgctgctggtcctctgcaatgtgggggcatcgggactgtatatggctgccgcccagaactccaataccatgctgctgagcgtctcggtgctgatcgcccgggtggcggtgcagctgtggtatctctaccggttcagcctgctggaatacacctggctcaccggacgggccgggagcctgcgtccggcggtagatatgaccatgaaaaagacccgggggaccctgggttacgcggtgcggtttgccatcgggctgctgttgtgctatctgccggtgctcgcggtgggcggggcggcaggcaacctgatcgtccgggccggagtggataccacggccgcgctgtcggcgggggtggcggtgaatatcctgctggatgccgtcacgccgttctttgtgatggccaggctgacctttgcggccagctattttgacacaatcaaacgggaattttcttccacagagggattggtatgaacctgaagctcaaacgtatgcgggaactgatgggttacgcccgcaccctgaccaaggaacagggggcaggcgccatgctgcagcgggcagcgggctttgctgcccggcggctgctgccccaccggggacggtatctgccctccaaaaaggcgctggccgcccagcgggaggaggatacctcggcctttcccgtgatctgcatcctgacgccgctgtacaatacgccgcccaagtatctggagcggttcctggacagtgtgcagggccagacctgcggcagctggcagctctgcctggccgatgcctccgatgacgcccatgcctatgtgggggagaccgtccgccgccgtgccggggccgatccccgcatccgctactgcaaaattgaaaacgccggcattgcggccaacaccaacgccgcggcagggctggccgacgggccttacctggccctggccgaccacgacgacgagctggcgccccatgctgtctacgccatgggccgggccattctggacggggaggcaaaaggggcaagaccccgctttctgtacagcgacgaagccctgttccgccgcacgcccaaagacgcccacgtgggccacttcaagccggactatgccccggagtacctcatggcctgcaactatatctgccatctggcggtgtttgaaaagtccctgtttgaggcggtgggcggggagcgtcccgcctgcgacggcgcccaggaccatgaccttttcctgcgcatgatcgacgagatgcagcgcactgaccccgccgccgcaccggtgcatctgcctcaggtgctttattactggcgggtgcatgcggcgtccaccagcgtcggaaccggggccaagccctatgtggtgcaggcggcccaaaaggcggtgagcgaccatctggccgccaccggccgcaaaggcgaagtggaggaaggcaagttctcggggctttgccatgtgcgctggcagctgcccgacccgcagcccctggtcagcatcctgattcccaacaaggaccacaccgacgacctggaaaaatgcctgcacagcctgtatgcccggaccaactacgaccggttcgaggtcatcgtcattgagaacaactccaccgagcagaaaacccgggactattacaagacgctgccccagcggtatgaggactgccgtgtggtggagtatcacggcgggttcaacttctcggccatcaacaacttcggacgcagggcggcaaagggcgacttcctgctgctgctgaacaacgatgtggagatcctcagccacgactggctgggggagatggtggctgaagccagccagcccggcgtggcggcctgcggggccatgctctactatcccgacgacaccatccagcacgcgggcgtcatcaccggtctgggaggctacgcgggccacagccacaagtaccatcgccgggacgccagcggatatatgttccgcctggccaccgtgcaggactactccgctgtgacggccgcctgcctgctggtccggaccgaggtctatgacgcgctgaacggcctggatgaggaattcaccgtggctttcaatgacgtggacttctgcctgcgcatccgggaagcgggctggcgcatcgtctggacgccctacgctgagctctaccactatgagagcaagagccgcggctccgacgaagtggaccccgtcaagaaagcccgcttcgacgccgagcgcgcccgcctgtatgcccgccatggccgggagaacatccttcgtgacccgtactataacccgtccctctctctggactacgaggatttccgggaaagcgccgacctgcgcaacctgaaaaacgccgggatgaagctgtgaaagtcccgcgctcggcggtatgccggtagatcgggccgtccgccggtctttacggttcagacagagcacccgtgaccgggctttctccggacagtttcagccggcaaatcaaatacaacaaacaacgccgcccgcggcaggggagttcccccgctgcgggcggcgttttgtctggatgaacggcggatgaacgggaactcagcgcttgatgtcgtagttcatgttcatcagttcacggatggagttggcgtcgtcggtgatgttggcgtcaccgtggatggtgtgcttgatggcgctgctggccaccgcaaagttgatcatgtccatgggcttgtagttgttcagcatggcgtagatcaggccgctggcaaaggcgtcgccgccgcccacgcggtccagaatgttgaaggtgaacagcttgctctcgaaggtatgaccctcataccacatgaatgccttcaggctgttttcagagccggaatgggcataccgcacatggcgggcaatgcaggtgaggttgggataccgctcaatgaaatgctggaaaacctcgtcctcctgctcgtaactgggctgcaggggaacgccgtccttccagtcgcccttggagtggtcgttctcgtccttccacaggtggtagggctcgatgccgaacagaacattgacgtaaggcaggcactgggtgcagtagtcccgggcatcctcccagctccacagggcgctgcggaagttgccgtcaaagctgatggtcagacccttggcctgggcaactttcaggcagtcggtgatgagctgacggcagttggggcccagcgccggggtgatgccgctcaggtgcagccagtcgtagccgtccagcagggcatccagatccacggtggagtaatcatactcggtgaaggcgctgtgctggcggtcgtaggtgaccttgctggcacggatgccgtagccggtctccagataataagtgcccagacgatgggtgggggtctcctccggggtggagaggatcatgggcgtgcagtgcacgtcgttggagcgcagccaccgtaccgcgctcttgcccaggctgttgttggggactacgctgaaaaaggtgctgtcgatgcccaggtttgccagggccagggcgatgtttgcctcgctgccgccgtagctggcctcgaaattgctggccatgcggatcttttcgtagttcggcggggtaaggcggagcatgatctcgccgatggtgatgaactttttggaactgttgcctcgcagcaggggattgtagtgctccatcaaatgtcctcctcaaatgtagaccgagacggtgcggcggcacggcaaacgggaatcggacaggtgccgcacggtgtccggatgcttgtttatgcatctttattgtaccgtttttgcactaatgtttcaaccggtgaggtaaaagtttcatgaatggaaggaggaagcaaaaaatcccgccggaactgcggtttgcagcccgaacgggatacaggtcatccttttgcggaggaactgccagagcgctccattttcaggcaggcggccaggtaggagatctgccccacaccccaggggatcagcgcggccagcaccggcagcggcccgatgggcagatacaggttgacaagcaccatggcgatccagacgaccatggcagtccgggaggtcacaagaaaactggaataggcggcctggccgatgcgctggcgctcggcctcgtcacagctggccagccactttttctggaacttgagatcgtagacgctgccctgcttttcggggttgatgcgccgggtcaggtcgaccactcgctgctgggagaacagaacgaggaaggtgaccaccagaagcccgacgatggccgccagcagagaaagatagtctgcatagcccagaggaatcagggataccaccaccgagaaggctgcaaaagcaaaaaactgggacgccgtcgcccagaggatgctccaggacagcagatgctcggtggactccagcacatcctcgtcctcgccattccaggaggcaaaggcggccttggcccggcggtagcagaccacgctgcccgcccaaaacaacagggcgcacagtacggaccagggcgaacaggcccccagagcgatgcccagatggcggatgacttcatcccgcgagggattttccatgatccaggtgacaacagtgcccagcgctccgcccgcaaacagcgcgacaatgagaacggccacaaatttcggccagtttttgcggttgtcccgggtgaccgggtcctgcgtgttaggttgtttcatccgatgattcctcctcatagcggaaaatatcctccacggtcacgccgcagagtttggccagcttgagcgccagcgtgaccgacggggagtaatctccccgttcaatctggctgatggtctgccgcgagacaccggccatggcgcccatctgctgttggttgactcccagccgggcgcggtgctccttgagacgattgtacagcggcatccgcacacctccttttgtgacaagcaattttgtcaaaatgacaatttttcttgtcatttgtatcttagcattgacaaggaaagttgtcaacatctgaaaacagaaacccgccgtaccctggtgtacattcaccggggatacggcgggtgcgttgatttatgaggaggctgcctgcaaaaccgtttacgctttgggggcgaagcggtagacgacggcctcgtaggggcgcagggtcatgcagggggcaaagggctgttccggccagttgccgatgagcagccgggcgtcctggccttcgggggcgggcagggtgacccgggcaggctcggcgtagaaattgcaggccaccaccagagtttcgccgcccagggtgcgggtgtaggcgtagacgttggggttacccggttccgccggagcataacgtccggactggatgaccggatactccttgcgcagttccacaaggcggcggtaatagttcagcaccgagtcgggatcggcagcctccgcggcggcgttgatggtctcggtgttgggattgacggccagccagggagtgccggtggtaaagccgcccggggcgctgccgtcccactgcatgggagtgcggccgttgtcccgggagcgggcgcccaggatggcgtagatctcctcgtcgggcattccctggtctttgaggatgcggtagcggttggtgctctccacgtccttgtactggcggatgtcggtgaagtgggcgttggtcatgcccagttcctcgccctggtagatgtagggggtgccccgcagcatatggatggcggtgcccagcattttggcggaaacgtcatgatactgcccctcgtccccgaagcgggagacaatgcggggctggtcatggttgcaccagaacaccgcgttccagccgttgtgagcctgcatgcccagctgccatttgtccagcaggcctttcagctctccaaagcggttgggctccagctgccacttgtcgccgtttttgtagtcggttttcaggtggtggaagctgaacaccatggacagctctccctcggcggggtcggtgtagcggacacagttttccaggctggtggaggacatctcacccaccgtcactacgtcggcgcatttgccgaacccccgggcgttgagcagcttgagatattcatggatgcggggaccgtcggtgtaaaagcggcggccgtccccggcgttgtcgtcggtgtaggtgtcgggcttggagatcaggttgaccacgtcgaaccggaaagcccggacgcccttgtcctcccagaaatgcaggatgtcgaacagctcctgccggacttcggggttctcccagttgaggtcggcctgggtgcggtcaaagagatgcaggtagtatttgccgacccgctcctcccactgccaggcggagccgccgaacttggactcccaattggtgggcggcgtgccgggcacaccgtccttccagatgtaatagtccaggtatttctgctccccggccagggcccggcggaaccactcgtggtcggtggaggtgtggttgaacaccatatccagcatgatacggatgccccgcttttccgcttcggcgcacagcgtctcaaaatcctgcatggtgccgtattcggggttgatggcgcggtagtccgccacgtcatagccgttgtcccgctggggggaagggtagatgggggtcagccacagatagtccacccccaggtcggacaggtaatccaggcggctggtgatgccgggcagatcgccgatgccgtcgccgttggaatcctgaaagctcttgacatagatctggtagacgaccttgctgcccaaatccgtctgggtcatatcagtgaactcctttctttttgccgatgatgagggtcagtacaaagggaaccacaatggcaatggccatgcagacaaagaacatgggcatatgctggggctggatggagaggaagccgggcaggccgcccacgcccaccgagaaggacatgacgccggtgcccaccgagatggtggcggcaatggcggagccgatcatgccgcagatgaaggggaagccatttttcaggttgacgccgaacagggcgggctcggtgacgcccatgtagccggagatgcaggcggggatggagacctggcgctcacgctcacccttctgcaggacgatcatggccagaacggcggaagcctgggcgatgttggacagggcgatcatgggccagagcatggtgccgccgaactggttggaaagctgggtgtcgatggcgttggtcatgtgatgcaggccggtgatgaccagcggggcatagaggaaaccgaagatgggggcaaagatccagcgcaggttggtggtcaggccgatgtagaccacgttggcgatggcgtcgccgatcttccagccgatggggccgacgacggtgtgggcaatgagtaccgacaggaccagggagaagaagggaaccacgatcatggagatgtattccggggtgattttcttgaagaagcgctccagatagaccagcacaaaggcggccaggatggcgggaatgacctgggcctgatagccgatcatctcaacctgggcgaacccgaaatcccagacggggatgctctcggcttccgccacgctgtatgcgttgagcagctgaggcgagaccaggcagatacccaggatgatgcccaggatctgggtgccgcccatctttttgaccaccgaccagcagatggccacgggcagatagtggaaaaccgcctcgccgatcagccacaggaagctgtaggtgccggcccagaactgggaggtatcggacagagtcttggtaccgccgtcaaagatggcgacctcaccgataaaactgcggaaacccaggatcagaccgccgacgatcagggcggggatcaacggggcgaagatctccgccaggttgctcatgaacttctgggcggggttctggttgctcttggcggcctgcttggcggcgtccttgctgacgccctcaatgccggaaactgccgtgaagtcgttgaaaaactcggccacatcgttgccgatgatgacctggaactgtccggcctgggtaaagctgcccttgaccgagggcagggcctcaatgcctttgatgtccgccttggacgggtccgccagcacaaaacgcatgcgcgtcatgcaatgggtgacggcgctgatgttttcctttccgcctaccagttccagcattttggtggcgtccgcggtaaatttccccatgatgatctctccttagacttgtacgtgttctttgtgttttgtacggtctacatatacgtatatgtctcgctgcacctgtatggtatcatatacgtatatgtttgtccataggccagggtgatctttggaacaacacacaaaaacgcgctgcccgttttgtgcaaacagacaacgcatttttgacggtatttcgataaaaacagacaagtggggcgggttgtatgcttttggccttcacatgcgggagcgccgggcaaagtccacaaagcggaagcggtcccagcggtggcgggattcggtatgctggaacaaagcgccgctttccaggtagacatagcttgacaccacgatcataatgtcgtttttgcccaggtcaaggtagcggcggtcctcctcgctggggcggcaggcggtgatctctttctgggcgcagccgatcttcaggcccaggtccttttccagatagcggtagagggaatcggcgcagtcggcctcggctagttcgggaacataccgtcggttgagaaaatccttgtccaggatgacccgctctccctcgatctcccgcacgcggtacagccgccaggcttcgtcctcccggctcaggtccagggccttcatcagttcccggcagccccgcaccgattccagcagaaccacgtgggttttggtctgatacccttcggccacggccagttcctgaaaactggtcagccccgacaccgggaacaccaccttgtcccggtccaggacaagggcctcgcgcccccgggctttctggatgtaaccgtcctgctccagcatggccagcgccttgcgcaaagtgtcccgggagacgccgtattcccggatcagaaggttctccgcaggcagacggcttcccgcagggtacatgccgctctggatgcgggtggtgatgtcgttgtagaccaatacgtatttgcttgccatggaaagtcaccagctcctgtacggaattattgatgaaattatcataacatatacgtataaattgtgcaacccgtcggatcggggcacggagagggaacgaaagggtccaaggcataaaaaaccggccccggtggacaggaccacgggagccggactttatggattcggttgcggggcaggggacaggcgcgggatcagtccttgcgctcgtcaccccagaagaacagcgccacggtgccggggccggtgtggctgccgatggtggtgccgatgttgttgatgaggaccttgccgtccagcttggggaagcgggcttccaccaggtcggccaccgcgcgggcgtcctccatgcaggcggactgggaaatgtagcacttgccggagtagttcaggccgtcctgtgcgtgctgttccatcttcttgacgatctcctcaatggcgcgctttttgccgcggcatttctggcgggggatcaggcggcccatgtagtccacgttgagcagcgggcagatcttgagagcggtgccgaaccatccggcagccttggtgatgcggccgccccgaacaaagaaggtcaggtcactggagaagaaccagtgatgcagcagcaggcggttgtccatggcccactggtacagggcatcgatggacatgccgccgtcccgcaggtcggccagcttgtccataaacaggccggaaccggaggacgcggacagggaatccacaatgtagatcttgcggtcggggaacttttccatcagttcctgacgggccaggttggcggagttcaccacgcccgaaataccgctggacaggcacaggtgcaggatgtccagcccctgttccagaaacggcgtgaagtattctacgaactcatccgcattgatctgggaggtcttggtggaggcgccgtttaccatggcggcatagaactgatccaggggcatggtctggcccagatcgtccgggtaggccttgccgtccagataataatggaagcaggtgtagtggatatcccgcgaacgaagatgctcggcgctcagatcggcggtggagcagcagcttaaaatataatttgccatttttcctctcactttctccggcgatgtacaccggttgatgctggccccggcggaaaacaccggagcgaaagcggtacaaaaccgcaattttgtccaataaaattagtataacacattcccgtgaaaatacaaaaggaatttgccgcggcttacaggagttttacaaggcaaagcgacagcctgcctgctgcggttgaaatgcggcccaaaatcggttatactattttgtaaccatatcaatggaacagcatccgcttttggggcggatatttttgaaaataaaggagcacaaacatggcacatacggttatggtcaccggcgcggacgggtttatcggcagtcatctgacggaggagctggtcaagcgcggcgagaaggtgcgtgccttctgcctgtacaattccttcgggtcctgcggctggatcgacaccctgccccccgagatcaaaaacgagatcgacatctttatgggcgatatccgcgaccccaacggcgtccgcaccgccatgcgcggccaggagcgggtgttccatctggcggctctcatcgccatcccgttctcctaccacagcccggacagctatgtggacaccaacatcaagggcaccctcaacgtgctcaacgccgcccgtgagctggacacttcccgcgtgctggtgacctccaccagcgaggtctacggcaccgcccagtatgtgcccatcgacgagcaccatccctaccagggccagagcccctactccgccaccaagatcggcgccgaccgtctggccgagagcttctaccgcagctttgacctgccggtatccatcgtgcggcccttcaacacctacggtccccgccagtctggccgggccatcatccccaccatcatcacccagctgctggccggccagaccgagctcaagctgggcaacctggcgcccacccgtgacttcaactacgtcaaggacacggcggcaggctttatggccatcgccgactgcgacgctgccatcggccaggaactgaacatcgccaccggcgtggagcactccatcggtgatctggccaacgaactcattgcccagatcaaccccaacgccaagatcgtctgcgagaccgagcgcctgcgccccgaaaagagcgaggtcaaccgtctgctgggcgacgccaccaagctgcgcaacatgaccggttgggcgcccaagtacacctttgcggaaggcctggccgagaccatcgagtttttgcgcggcaaccttgattcctacaaggtcggccagtatatcctgtgatgtctatgctgaacaaactgcgggcaagacccgctctctgctgggggctggccgccgtcgccgctgtggcggtgggggtggcctggtcctattactggcgggtgttctactacctggacgcgcgggtcgatccgctgttcgtcaccctggcctgcgtggtggccgccctgggggcggtgctggcggcgggggtgctgcattacggcgtgcgggacttcgcagccaagggggcggtgtgtatcgccgcctgcggactgctcttcgtctttgccaacccgcccatgcagacccccgatgagtcggaacattttctgcgtacctacgccatcagcatggggcgctttgactttgacgcccagcggggctaccccgatgacgtcagcgcgctgtacaatgcctttcccggggcgtgggtcaatgcccatacctcggcggggacggtaacggacgaggaatccggcgagaccgaatactacaccaccgccggaaacgccctcaaacagtacggcgaggacggcaaggtccagagcatcgccgacagctttgacgaatatttcaacgactcggacaccactccggtgtatgagccggtcagttttctgatcctgcccttcctgccgggggcggcgggaatgttccttgcacgtttgctgggctttggggcactgggctgcctgtatgccgggcgtatcgcaaacctgatcgtatacacgctgctgtgctggctggccctgcgcaatgcgcagaagttccggcctgcctttctctgcgtcatgctgctgcccatgtccttgtggatgggcgccagcctcagttatgacgcggcgttgctggcctgctattacctgatgctggccctgctgacccggcgcacctggaccacccgggatgctgccatctatgcggcggcctgcgtctgggtcaatgtggcaaagccctatatcaatctgctgtgggcactgctgccgctgattctgctgcggcaggccttctgtgccaagggccgacgctggatgtggacggcaggcatgctggcggcgtcgctggccgtgacccgcctgctggagatttacggcgtggtgttccgctacaattacggcgagatcggccgtatgggcggcagcgacgtggaccagatgggccagcttgttttccttttgaaaaatccgctgcgttatctggcggttctgatgggtacactgtacgagaatgactttttcgtcggccagctgggccttttcggctggaaagacctgcccatcgcatttttgagcctgaccggcccggtggtgcttctggcaggcacggtgctttcggcgggcaagggccagtccatcacccggcggcgcacggtgccgctggcattgttcgggctggtatacgccgtgggagccatgaccgccatgtatatcacctacaccccggtcaccatggtgcgcattgtggggctccagacccggtatttcctgccggtcattctggtggccatgatgctgctggccgcgcctttgcgccggatgctctccgccgagctttccccccagaaagccgagcgctgggccgcacggctctttgcgccctatgcggcctttggggcggttttactgttccagcactactttatcgggccgatcagcaccattccggtgtgaacggcctttgcaaacccaatgatttgccttgattgagagaagggagggcagtccatgacgcttgttggcggcctgttggttctggcgctggtctgcgccgtctcggtctgcgcggcggcggataccggccgggacgctgcggtgttcccgctgcccgtgctggccggcagcgtctgcctgctgctgtgcggcgggtatctgggactgctggtcccggcgctctgggtcaattatgctcttttggccgcgctggcggtggggcttggcgttcacgcggggcgtgaacgcctgaaagccgcactgttcagccccggctttttgttttttgccgcggcatccgtagtgttctgggtgatgttcgcggtgctgcagcccatgttcacccagtgggatgaattcaccttctggggggcggcggcaaaactgctgaaagaacacggcatgctctatcccgccgatcccgtcaacctcaaggcggcggcgggactgccggggctgggccttgtgtctttctttgtgcaggggctgtccccggtgtttaccgagtggcagtgccttgccgcctacgatatgctgttcatggcctgcattgccgcggcatcggcattgccccgccgccgctgggcgcacagcgccatggtgctggcggccggagtgctgctgccgttctttttcagcgttgtctcccagggaacggccagcaccgtctacgccaatgccatggccgacatcccgctggcactgctgtttggcggggtggtgagcctgtggttcgcggtgggccccggcaaactgggcctgctgctcaccgctctgcccctggcgcttctgaccctggccaaggacatgggttttgcctatgctctgatcgcggtattcctcattttcctggacctgatcttcggccaggaacacaaggacctgcgccctgtgcggatcttcggcggggcgctgtggcgtgccgtggtgctggcggtgccggtgctggcagcctttgtcagctggaaccgctataccgccgcctgcctgaactcgggcagcggcacggtgggcggggaaggcctgagttatggccaggtcctcaccggcggccttgcccagtttttcggcatcggccgtaccgaaaagttctccgatatcatgaacctgatgggagacgctttctttacccgggacgtctgcctgctggggcccggcgtccgggcgctggcggccatcaccctggtggcggctgcggcttttgtctttgcgggcaggggcgcatcccggcggcgggtcctggtgacctggctgggctttgccttctgttttgcggccttctacctgttccacctgattttgtactgctataacttctccgacgtggaagcctatatcctcaaggattacgagcgctacatcggcccctactatcagggctggatgctggccatgctctgcctgctggggcgctcggcggcggaatacaagggccggtggtatcgcctggcggacggcgccctgttgggggcggcggcctgcgtgatggcggtgtttttctggcggggcgttcccacggcgggcttctggtcaaaagcagacagcctgtacctgctgcgccaggacgtcaaggagcgcgccgccgcggccaacgaagtcctggactgggacgataccgttctggtcatcagccagggggacgacgccacccgctggtactactacaactatgaactgaccgcccgtgtggcgagaggctacggcggatacttcaacggcgaggatgcgtccagccgatgggactccgactttatgaacctggtggaaagcgaaaactggacgctgtacgactataaggcagtctgcacccccgatgccctggtggcatacctggaggaaaagggctgcaactatctgctcatcgaccgggccgatgattacctggaacgggatttcagcgatctgtttgagggcgggctgaccgccgacatgcccgccacgctctaccggttcgacccggatgccgcgacgcccttcacaccggtggccgtggcggaaagcgaggggtgagcccatgaacgagaccaaacggacgctgcggctgtttgcgttgtgctatgccgtggcggtgattttgtgggtggtgttctgcctgggcaagtgtgcggtcatgctgatgcaccgggcgtcgggggatatgccccacgctaccctgagtgcggaggacctgaccttcgagagctttgaatgctatctcgacctggaatgggacaccccgccggacgacgaccccaactggtatctgtccaccgacaacgacccccatatcttctatgacggcggcggctatctggaaacggtgcgcctgtacgccaaacaccgcttgcccccgggcagcgtggtattgtattacctcaaacccggccagaccgattacagcgaggcccagaaagtctacggctacgtggtggaggacggcgtgtatgagttcgacctgggcggcagggaagtgtccgggctgcgcatcgaccccgacagcgtgggcggcgtggcgacgctgtttaccggcatcgaactgaaccccgccggattctgggtctggcgctttgtgccggacggcggccagctgctgcttcttcttggcctgcccgccgtggcggctgccgcatggactttgctgcgcggccgccgggaggacgcctgacccccgccattacccgaaaaggaggacccctgcatggagctgctttgcgtgtttgcgtcaatggcggcattgtttctgttctgcgcgtttctgaccctgcggtgcgggctgcacagcgccctggcgccgctgaccgccctgtccggagcggttttgtggctgaccctctggggcatggccggcccgctgctggccggggcctggatcctgttcgcagcctttgccgggctgggcatctgggcgttgtggccccgcaagggggcaaagcccgactacaaaaaactggcaagccccggggcggtgctgttctggggcatgacggcggcctttgccgtttactttttcatccgccagcccatggccaccggctttgacgagctcaacctgtgggccacggcggtcaaggtcaccaaggtcgacaacagcctttattccaacgcggtgctgggcaccccctgggcggtcacccagaaccccggcctgccgctgctcagctatttcttctgctttttcggcagctatgccgactggaaaatctatctggcctacaatgcccttgcctttgcggtgttcgccgccgtgctgggcgggctgggcttctcccgctggcggctggcagtgccgctggcggcggtgctgtggtgtgtgccctacttctttaccacatacaaccacaccatctacctgaacaccgtgtacatgacctcctacggtgacatccccgctggccttgtcatgggcggcgcagtggccgcatggctggccctgcgcaggacgggaggccccaaatgggcggtgctgcccatcctggccctggctgccaacaccaaggcaaacacctttgtgctggcattggtggctgcgggcatcgtggcggtggacgcctggctcttgccggaggagcgtcctttccgcaagggccttttgcgccggaccggttttgcggcggcatcctttgccgctccgctggcggtgtactacctctggaacatccgctatgtggggatgctcgtctccaaaaatgccgagaccggcggcgtgggggaaaccagtgccgccctgtccgatgtggtggtcaacggcattaagatcttgctgggtcagccggtggagggattctttgccgagcgcaaagatcagttccttcgggccattgccgacatgggcaaccagttctggacggctgacggcaagctgagcatgatcggtcagggccgcaacgtggtggtgctgattttgctggtctttgtgctggcggccgttgtggcgccgggcctggccctgcggctgcgggtagcctgcgccgccgtgtgcagcactctgtgctttttgggctacaacctgatgctggcgctgagctacggtttcatcttcaagcccttccaggcggagagcctgaccgactacaaccgctacatttacagctattacatcggctggtttttgatcgctctggcctgcctggccctggccttgcagggcaggaccgtcccggccaaagcggagacggccctccccgcatccccgtgggaccgccgccgggcgctggcggggcagggggccgtgctgctgctggcctgtgccatgcttttgcgcctgaaccagatggtattgccccagctttcggtgctggggttctccgacagcgagtttgccgaccgcaaggccgagcgtgccgaggcccagctggtctgcagctacctggaggaggatgaccgggtcttttacgtcagccagggagacaacggcgaaggctggttctcggcggtgtttgacttttacccggtgctggtggactattccggcgttgtctccactatggagggcggcggcgggaccttcggtttgccggagctggaaccggaagaggaaagcaccaagaaatactactaccatccttacaccgcccaacgcctggatgccaccatccgggagaatggctgcaccgtcatttatctgcaaaccatcgacgagatttttgtggaaagctacgcggagctgttcaccgacggcctagccgccgcgctgaacggagagacgctcctttaccgcgtgactgatgcgggctatacccccgtggaaatggaggtgaccgcccgatgaaaaacgctctgcgcaagttttttgcccgccgcggcgcattgccggcggtctgctatctgctgacgctggccggctggctggtgctgggggcgtggaatttcggcagcgatgctgtatcccgcgcccagggaaccctgaccgaacagcagatttccctggaagaattccaactggtggacctggacgcgcaggaggggggatatacctccaccagcagcgaccctcagatcattctggaggatgtgtccgaccgggtggtgcgcaccctgagctatcaggcggagttcgacggcgaaccccgggagatgtgcctgtattacaccaccgcagtgggggaaccgtacagccaggacaagcgggtctttcccaccataggggaggacggcagctacatttacaccctgccccgtaccaccatcgtgtccctgcgcctggacccctgcagccccgacgccaccgaccccgtcaccgtgcagtttgcgggagacgccatcaccttgaacgatgccgacgccctgccctcgggcctggcctattggctgcccagctggtatcagctgttctgcttcctgctctatcccgcgctggccgcggcgattttgagctggctgcgcgccgtgtggcgggaactccgcacccgcggcaagtgacccgcagcccggcggccctgccccggtgcaaaaactgctttgaatccatcgcgccccgaacccgaagccccgggtcggggcgcaattttttttgcgaaactttgtaacactctgccgtcggacgggacagattgatcgaaacgccccgccccgaacgccggggaaggcccggggcgcaggctgcgcagccgaaatggaaaggagggagacgccgtgctgggaatcgaggaactgtaccgccgctaccggggcgacgtctaccgctaccttgccgccctgacccatgacccggccctggccgaggaccttctcagcgagacctttctctgcgcggtgcagaaagcggggactttccgggaacagagcagtgaaaagacctggctgttcggcatagcccgcaacctgtggctgcaatccctgcggaaaaaccgccccacggtggagtacaacgacctgctggggctgtacgtggaggaccgggtgggggaggcctacgatttccgccagctggccggccgggtggccgaattgctggacgccctgcccgaacgggaacgaaccatcgtgcagctgcgcgcccagggcctgccctatgaggagatcgctgcccgctgtggtatccggtcggggtcggcccgggtcatcgagtaccgcacccgtcaacgattgaaagaaattttgcgaaaggagggctatctgtgacagaagaaaccatgcaaacccgtcccttgcccgaagtacagcccggtatgccggacgatctgcccgacctgccctgcgatgtctgccgggacctgatccctctggtgcaggatggcgccgccagccccaccgccaccgagatggtccgccgccatatggagcactgcgaaagctgccttgccttctggcaggagggcgcccccgcccagcccgtccccgatgacggcaaggtgctgggcaaaatttataagcgcctgcgcctgctgctgttcgctgccctggcggcgggggcactgtttggcctgtggctgatgagctacggatttgcggggcagttcaacctgctcatcatgccggcggtgggggctgtgggagccctgctgctccgccgccgctggtacctgacgcccctgtgtgtggcggtgctggggtttgtctggcatctctcgctggaaagcaccggacctgtcctggggctgatctatgctgccttttacggcgggctctgcctgctgggcggagtggccgccctgctgttccgctatgcgttcggaaaggaggaccttccatgaatacccgtgaacaaaccccgcgcccgcgcacgaaagccaagcgccgccttgccgccgcgggcgggtttgccattgtgctgtttttgattttcgtgctggtggcttataccggcgaccctgtcagcaagcatctggccatgaatacggcggagacctacgccaatgagacctatcccggttacgacatcaaggcggtggccgcctcggcccggcactggttttgttacgaggtggttctggagtctgccgtcagcgaggacacccacttcctggtggaggtgaaccaggggcgtgtcaccgaagactcctacgatgagacggtgaaaaatggcggaaacacctgggaccgcattatcgtttccctgggggaggatgtggacgctgccctggcggaagcgggcatctcccatgccgggtttggcctttaccagggctactacctgggcagcactggcgagatccccgtccccgccgaaggccacccgtccctgacggtggacatgccctacgacaagggtgacctgccgccggtggcgctggcgctggacctcaacgcccctgatggcgtggatgatccccaggctgctgcccggcagcttgcccaacaggtcaaggacgccatggacgaggcgggcatcgacctggctgcctatgtcgtcacgctgtacggcatgaacaaccgtgtggtcgtcacaaccggcctgatccccgccgccgacctggcctgaatggggtggcccgttttggaataatgctgcccgccggtgcatatgctagcagcgggtgatcgcatatgaaacaaattccgtggaaaacctatctgttctgggtgctgctcgccgaggcggtgggcgcgctctccggctggctgacccgggacggcgccaaacagtacgccgagaccatcacgctgccgcccctgtccccgccgggcatcgtctttcctgtggtgtggacgatcctgtttgccctcatgggcatcggtgcggcccgggtctggatggcggcggcctcgtcggaacgcacgcggagcctgcggctgttctttgtccagctgggcttcaactttttctggagtatcatcttcttcaacctgcaggcttatggctttgcctttgtctggctggcggtgctgtgggtgctgattctgtggatgctgctctccttccgcaaggtggaccccctggccgggtggctgcaactgccctaccttttgtgggtggcctttgccgggtatctcaacctcggcgtgtggttcctcaacggatgaaaccgtcccgacaataaaaagatgccgtccctttcccaaacgggagagggacggcattttttgcatattgggatgtacggcaaaagctcaggtgattttcagcgcccgctggatgcggtagacgatgtaccggaacagcccggcgatcaggctgcattccacccacagatagttgggcagattgcgccagtaaaacttgggtttgtcgatcttgggcagggcgatcttggcctcggcgtagcctttggcgtagtcgttgccgaagccccggtggcggaacatcaccactttcagcagataccccagggccatggggatgaagttcaccaccagcatgccgatgggctgatttttgtagggcagcagaatgctgttgcgcccgctctggatgctcttgaaggggttgtagcgcaccgcgccggtggtagcgccgcagatgtggcggcagcgggcggtagggcagtaaacgtttttgtacccgaagttgttggcccgccaggaaagatccacatcctcatagtaggcaaaaaacaattcgtcaaaaacgccgattttatccaaaatggattttctgtacagcgccgcgcccccgcaggcggagaaaatgcggcagggttttgtgtagcggctggccttgaggccgtcgccacgcttgcaggcaaagcccaggatggtcacatagtctccggcgtcgtcggccagttccggctcatagtaccgcagcatcaggctggacaccgcaaagattttggggtcggcgtcggcggttttgatgagctccgccagccagtccggctcggcaaaggcgtcgttgttgaacagcaccgcatactcgcctttggcaatggcgatgccctgattcaccgcatgggagaacccggtgtttttgtcgttctcgatcagggtatagttggggcggccccggtagctgcgggcgatctccagactttcgtcggtggagccgttgtcgatgatgatgagctcaaaatcctgttcggtctgcgcccagatggactcgatggaatcgcgcagccagcccgcaccgttcagattgggaatgataacgcttgctttcaaaatgttttgcacctcatctcaggatatgccgtaataggcgtacagcatggcgcgctgccagctgcccagggcgatggtcaccagcaggatggcaatggagatcagcgccgcgatcatcagggtcaaaagcagacaggctcttgccaggttccgctgccgctggctgcatcccggcagaaaggaaaagcacagcatggccacaagccctatcaccggaatgacgaacaacagcaacatcccgaaataccattcgatggaaggcgtggcgtcagtctcctccggctcccggcaatagtggggcgtgggagtgccttggggcggggcagggggcagcggatcaggaaccggcggtgggcaagggggcagagacggctccggctgcggcacggccggttcgggatcgggggagcagggagacgcgtcataagcccggggcgcaccgcatacggtgcaccggtcggcgtccggcatcaggcgggcgccgcagtttttgcaaaaatccatgtttggtatcctccgcgcggggacgttacagcatcagcggccggtcggtctgggtgttcaggatgatctgagtgttggtggaccccattttctgcatcttggtcaaaagatgctccagcccgtcgatgctctcgcagctgactttgacgatgaagttgtagctgcccgtgacccgccagcactgcagcacctggggttcgctttccaccagggcaaggaagtcgtcccggctggaagcattggcggagatggagatcaaagcctgcacccgggaggcttcccccggatggtgcagaatgacggtgtatcccccgatgatgccctcctgctccagcttgcggatacggctggacaccgccggactggtcagattgacgttttcggcgatctccttgacgggcatacgtgcatttttaatcagtaagcggatgattttttggtcaagctcatccataacggcacctcgtatatttgatattttgttcaatgcgcacaaaaaaataaaattaaggaaaagaaggttgtgttctttcacaaaaaatgagaatcgcttatttcaaagggaaaatcgaaaaaaattaagcgatttctcaaatattataataaaaagaaaaccaaaatacaagctttgaatttgacatgttaagaaaaatgagtatactaaagacacattcaaagacaacttctaacctttatatactttcccacccctctatgcacaaaggcccgtccgcaaggacgggcctttgtgtttgtttttgtggtctgccatcccgcaaaaccgggtacggctgccgatactttattatagtaaagggcaggggacgggcttcgtcagagcaaaggctcctcccggtgtgctttggcgcaggcgatatacccggtggtgttctcggcggtgccggcctgctgctcgggggtgacattgccccgcacacggccgggtactcccatgaccacgctgcccggagggacaagggtaccctcggtgacaagggcgcccgccgccacgatgctgccccggccgatcaccgcgccgttcatgacggtggcgtgcatgccgatcagggcatcgtcctctaccgtgcagccgtggaccagagcgcagtgtcctaccgtcacgttgcggccgatgtggacgccctggccctccccggtgtgaagcaccgcgccgtcctggatgttgctgccagcccctacgaaaatactgccggaatctccccgcagtacggcaccgtaaaagacactgctgtccggggcaaggtgcacatctcccaccagaacggcgttttccgccacaaaggcagggctgtccagcacgggctgcttgcccccgaatgctttgatgagcgccatatccaaaccctcccgctgaattttgtcagctccattgtactacggcgggcggggctttgcaaaagggggaaaatcttgcgccgcaaggggggatatggtacaattttacccgatcgaacggttgaatttcacaggatatgggggaacgacaatgatccgaatggtatgcagtgacctggacggcactctgctgcgctatgaccagcaggaactggaggacaggattctgaaccagatccgcgcgctggcggcccatggcatccggttctgcccggccagcggacggcagtatgccagcctgaaacgcctgtttgccccggtggccgagcactgcgtttttctgtgtgagaacggcggcgtgctgtatgacaatgaccgggtgctggccaaaacgcccatgccccgggcgctggcggaggagatcgcctgggatttctggaatgacagcgacggcaagggagaagtcatgctgtcgggcgaaaacacctcctacctgatggagcgcggtttgggcatgaccgaccgcatccggtttatcggcaaccattattgcagcatccaggatcccgcccagatccccgaggacatcgtcaaggtgtcggtgtatctggaggaaggggtggaaaactacgtggaccgttttgtcccccgctggaagcaggccaacgccgcggtggcgggacctaaatggatcgacaccacctttgccaacaagggcatcggcgtgagcaagatgtgccaggccctggacatccgcccggaggaggtcatggctttcggtgacaactacaacgacgtttccatgctggacatcgtcggtgtgccctacctgatgcagactgccgctcagccgctgctggaccgctaccccaaccacaccccctgcccggaggataccatccaggcactgctggataccctggaaagcggcaaataaaagaggacgattcctgtataactgcaaaaaagaacccctgcgccccggctgtgcaaaagcagccggggcgctttggcatagaaagttccaaaaagttgtcaaatcttgtctgaatgcacaaaatgcccggctgtgcccgggttttgagttgacgttctgtgagaaaaatgctaatataactatgttaaaactttggcttaatctggtttaagcctatgattcgggaggttaccatgaaacagttcgtatataccatccaggaggcggtgggtatccatgcccgtccggccggcctgctggtcaaggaagtcaaaaagtatcagagcaccgttaccatcaccaagggcgacgcttctgtcaatgctctcaagctgatggccctgatgggcatgggcgtcaagtgcggcgacactgtcaccgttaccgttgagggtgccgacgaggataccgctgctcccgctctggaggcattcttccacgagcatctgtaagcggaacgacatccgttgatctgacgcaaaacagcggctgcccgctggcttacggcgactgcggctatgctgccgcgtcccaccgggccggggacagccgtttttggcgtccggcgtccgccggagtgtggacaagcaagtaaggagagagtagaaatgatcaccattcagggcaagggggtctcttccggggtcggtatcggcccgctgtatttttatcaccgcgccaaaaccaccatcacccgttatcaggtagaggatgtggatgccgagtggcagcgcttcaaggacgcgcagaccaccgctattgagcagctgggcgagctggccgagaaggcccgcgccgaggccggcgacgaagccgccatgctgttcgagacccatcagatgatggccgaggacctggactacgaggaagccatcgaggctctcgtcaaggagcagaagagcaatgccgaggctgccgtcaccgacgtggcggtgcagtttgcacagatgttcgagtccatggacgacagctatatgcaggcccgtgcggctgacgtcaaggacgtttcccgccggatcctgtccattctgaacggcactgtggagggcggcatcgcctctgaggtccccgttctgctggcggccgatgacctggccccctccgagacggtccagctggataaaaccaagatcctgggcttcatcacggcgggcggttccggttccagccacaccgccattctggcccgcaccatgggcatccccgccatcgtgggtgtgggcgacgccctcaagccggagtatgagggccgtcaggtcatcatcgacggcgccaccggcaatgtcgtcatcgatcccgacgacatgacccgtgaccgcctgctgaaaaagcgggaggagcagctgcgcctgcagcgcctgctggaatccctcaagggccagcccaacatcaccaaggacggcaagagcatccgcatctactgcaacatcggcagccccgaggatgtccacgccgttcaggtcaacgacggcggcggcatcggcctgttccgcagcgaatttttgtacctcaactgcgacgattatcccaccgaggatcagcagtttgaagcatacaagcaggtcctttccgacatggaggacaaggaagtcatcatccgtacctgcgacatcggcgccgacaagcagatcggttacttcaacctccccaaggaggataaccctgccatgggtatgcgcgctctgcgcatcagcctgacccggccggacttcttccgcacccagctccgcgccctgtaccgtgcatcggcttacggcaagctgggcatcatgttccccatggtcaccagcgtgtgggaagtccgtgaagccaagaaactgtgtgaggaagtcaagcgcgacctcaaggcagagggcattccgtacagtgaggacgtccagatcggcgtcatgatcgagacccccgccgcggccatcatgtccgaccgcctggccaaggaagtggacttcttcagctgcggcaccaatgacctgacccagtacactctggcctgcgaccgtcagaacaacgacctgggccgcttctatgacccgcatcatcccgccgtcctgcgtctgctgcagatggtggtggagaacgcccacaaaaacggcatctgggtcggcatctgcggcgagctgggcgcggacctgactttgaccgagaccttcctggccatcggcatcgacgagctgtccgtcagcccccgcgcggtcctgcccctgcgcaatgcggtgcgcatgaccgatacccgcgagagcagcccccgcattctggaggcgctgaacaacgagtatcaggcgacctgatccccgtatttcatgagatatggccgggagcccggaccgcggtccgggctcccgctttttgtgcctgcatgccgcgggaggggcggcaaaagataaagatttgccgctgtacggcaaaaagtatgcaaatctcgccataaaaaaatgggactgaccgcagaaatccggcaaaacgacagtaggaatatttcctcggaagtgctaaaatgattcaggaaatttagttataaatccggaggcatccgggaacattgataatgcctgaataccggggaggccatgtccatgaatatcgttaaaaaagtttactgccgtaccttccagttcgtcatgcgcactgcgctgccctttctgccctaccgggagcccaagctgctggacggcgtgaacggcgtggccgagctgctgaaacagaaaaaaatcgcccgggtgctgctggtcaccgataaaggcatccgcagccaccacctgaccgagccgctggagcaggctctgaccgatgcgggcatcggcgtcagcatttttgacgagactgttgccaaccccaccgttgccaacgtggaagccgcccgccagatgtatctggacgacggctgcggcgctatcatcgcctttggcggcggctcctccatggactgcgccaaggctgccggcgcccgcattgcccggccccgcaagcccctctcccgcatggagggcctgctgcaggtcctgctgccgctgcccctgctcatcgcggtgcccaccaccgccggtaccggcagcgagaccaccctggccgctgtcatcaccgacggtgagacccatcacaagtaccccatcaatgactttgccctcatcccgtcctacgccctgctggacccggaggtcaccgtgggcctgccgcccatgctcaccgccaccaccggcatggacgccatgacccacgcggtggaagcctacatcggcggttccaccacccgcggcacccgggaagctgccgtcaccgccgtgcggctcattctggaaagcctgcccgtagcctgggagaacggcggcgacctgaccgcccgtgccaagatgctgcgggccgcttacctggcgggcaccgccttcaccaagagctacgtgggctacgtccacgcggtggcccattccctgggcggccagtacggcatcgcccacggcctggccaacgcggtgctgctgcccgaagtgctggaagcctacggtcccgccgcccataaacgtctgggccgcctggctgtggaggttggtgtggcaagcgtcagcgataccccggcggaggcctcggccaagttcatcgcccgcatccgggagatgaacgcccacatggagattccccgcacgctggaaggcatccgggaggaggacctgtccaagctggcccgcaacgccgaccatgaggccaatcccctttaccctgtgcctgtcctgatggacgcccaggaactccaggccctgtaccgcctggtcatgcccaaaacggaggaaaacaccaatgacagaacaacagatcgcgcaggtgctggaaagtcagcgcagattcttttcgacgggcaaaacgctgcccagagcctttcgagcaaaggcgcttgaggaccttcagaacgccatcctccgccacgaggaggagatcaacgccgcgctgaaagccgacctgggcaagggcgctgtggaaagctacatgtgcgagaccggcatgaccctgtcggagctgagctggatgcgccgccacttagcagggctgatgcgcggccacaccgtcatgactccgctggctcagtttgcggcccacagcttccgcagcccgtcgccttacggcaatgtgctcatcatgagcccctggaactaccccctgatgctgacgctggaacctcttatcgacgctctggccgccggcaacactgccgtggtcaagcccagcgcctatgccccggctacctctgccgtcatccagaaactcattgccgagtgctttgaccccgagtacgtctttgtggtcaccggcggccgcgccgaaaaccaggccctgctcaaccagaagtttgacaagatctttttcaccggcggcaaggcggtgggccgggaagtgctgcgccacgcggcggagtacctgacccccgttactctggaactgggcggcaaaagcccctgcatcgtggacgctaccgccaacatccgcctggcggccaagcgcattgtctttggcaagtacctcaactgcggccagacctgcgtggctcccgattatctctactgtgaggcatccatccgggacgagctggtccaagccattcgggaggagatcaccgcccagttcggtgccgatcctctccagaatgagaactacggcaagatcatcaaccagaagcattttgagcgtattctgggcctgatcgaccctgccaaggtggtcgcggggggcaacgccgatgcccaggccctgcgcattgcccccaccgtcatgaccgacgtcacctttgacgatgccgtcatgggggaggaaatcttcggacccatcctgccggtgctgacctggaacagcctggacgaggccatcgcccaggtggagagccgcgcccatccattggccctttatttctttacctccagcagcgccaatcgaaagcaggtgctgtcccgctgccggttcggcggcggctgcatcaacgacaccatcatccatctggccaccagcgccatgcccttcggcggcgtgggagagagcggcatgggcggttaccacggcaaggccgggtttgaggaattcagccacacccgcagcatcgtggacaaaaagacctggatcgacctgcccatgcgctatcagccctataccagcctgaaagaccggatgatccgcatgttcctgcgctgagcccgcggacacagttcggacgaatttgtattctatcatacaggggaggaggaaagcccgcccgggccggaatcctccccttttgtgcaccctgcggcgttggggtgcggaaaatgccatgggaagaaccggagggatcaccatgaaacgaatttgtgctgctatgaccgtgctgctggcggcggggctgctggcaggctgtaccgtgtccatccaactgcccggcggggaagcgacccccgcgtccgaccccacccccgaggcggtgacggaagctacccccacaccccagccggtgcaggcgacccccgccccggagccggatcccacgcccacgcccacccctgcgggggaggaagtggacagcccggaggtctttctgaccaccgaacagtatgacgtctacacccgggcggacaaggcatcccagccgctgtacggggataccttctcggtcatgtatcagtacggctgggactactccgatcagccggaggtggaaaggcaggcggacaccggcactaccttccgctaccagatcctggagggggagaacgctaccctggaatactatcgggagcagcttctcaccgtgttcaccccggaatttctggaggagcggggctttgactggcggttcatctccatcgacggtaagctggccgcggcggacatcggcatcggcggcaacagcgagctgtccgatgtgcccgataccttccagctcatctcggcggacgacaatacagtggagttttaccgcattgcccattacaccatcccccgggaaggggagagcaccgaggattacatcgaccggcgggcggtgagctatgacaaggtgggacaccttaccatccgtctggtcaacaccgaaaacggctggcgggtggacgcctacggccaaccgtcctttgcaggccccgacaatgaggaataaaccggaagagacaaaacagcccccggcaggagcgatacctgccgggggctgctgcttgatatgggtaaacgggtcataaaggagcaatcagtgtttttggggcaccgagagcatccgcatggcgttgagcaccgccagcaccatgacgcccacgtcggcaaagaccgcccaccacatggtggcgatgcccaccgcgcccaggatcaggaaggcaaatttgatgcccagggcaaagatgatgttctcgtagacgatgcgcatgcacttgcgggccaggcgcatggcgtcggacagcttggcggggtcgtcgtccatcaggaccacgtcggcggcctcgatggcggcgtcactgcccagcgcgcccatggcaattcccacatcggcgcgcatgaggacgggggcatcgttgatgccgtcgcccacaaaggcaaggctggaccccggccgtttggcggccagcagggcttctactttctccaccttgtccccgggcagcaggcccgcgtggacctcgtcaatgcccagctgggcagccacatgctccgccacggcgggagcgtcaccggtgagcatgacggtgcgcacgccctgctgtttcaggctggcgatggccccggcggaagagggtttcagctcgtcggcaatcaggatggaacccaggaaggtcccgtcgcaggcaacgtagaccacggtgcctacgccgtcgtcgggaatgtacgcaatgttcagcgcttccatcaggcgggcgttgcccacggctacggcatggccgtccacgttggcacggatgccctgcccggcgatctcctgcacgtcggaggtacgcttggggtcgggctgttcggtgcaggcggcccgcaggctcttgctgatggggtggttggagtagctctccgcctgggcggccagctcgatgacctgggcctcggtgtgatccccggcggggcggactcgctccaccgcaaagacgccccgggtcagggtgccggtcttgtcaaagacggcagtctcggtgtgggccagggcttccagatagttgccgcccttgatgagcacaccctgccgggaggctccgccgatgccgccgaagaaggtcagcgggatgctgatgaccaaggcgcaggggcagctgatgaccaggaaggtcagcgcacgggtgaaccagaccatccacccgcccacaaacagcggaggaatgacggccagcgccagggcggcaatgcagacggcgggggtgtagtaccgggcaaatttggtgatgaagttttccgcacgggcttttttcaggctggaattctccaccaggtccaggatcttggccacggtggattcgccgtagggcttgcgtacctcaatgcgcagcaggccgtccccgttgacgcagccgctgatgacctcgtccccggggcgcaccgtgcggggaacgctctcgccggtcagggcgctggtgttcaggctggactcgccggacagcaccgcgccgtccaggggaacgcgctcgcccgggcggacgacgatcaccgcgcccaccggaacttcctcagggtctacggtgttcagactgccgtcggcctgttccaggttggcgctgtcgggacggatgtccatcagcgctgcgatgctgcggcggcttttgcctaccgcgtagcgctggaacagttcgcccacctgatagaacagcatgacggcgacgccctcgcggtattcgcccacgcccatggcgcccacagtggcaatggccatcaggaagttttcgtcaaagacttcgccgtggatgatgcccagaaaggccttgcgcaggacgtcccagccgatcaccagataggggatcagatgcagcgcaaactgtgccagctgcggcatgggaacaaactcggtcagacaggccacggcgatcagcagcgccgcggccgcaaggatgcggtacagggtctttttctgctttttggtcataggtgattgcccctaacttgatggtgtcagaacagatgttacagctcgatctcaaaatccggctcgatctttttggccgttttgacggcatccttcaaaatgtcggaaaaccgctcgtcgtcggcatccagcaccagtttctgagtcatgaagctgacgctggcccggttgacgccctccatcttgttcagggcattttcgattttggcggcgcagttggcgcagtccacttcaatgttgaatttcttctgcatgtcaaaacactccttaatataaatgataaaaaccgtttattcttccacgtgctccatacccaaagcgatcatgctgcggacgtggtcgtcgtccagggaataaaaaatcgctttgccttcccggcggaacttgaccagcttgctgtttttcaaaagccgcagctggtggcttaccgaactctgggacaggttcagaagctgggcaatgtcgcccacgcacagctcgctctcaaacagagcgtacaaaatcttgatgcgggtggagtccgcaaacatccggaacagctcggccaggtcgtacaggacctcgtcgtcgggcagatcctcccgcaggcgggagaccacgtcgggctgtgccgccaggaattcgttttcggtgggatcaggctgggcaggtgcgcctctggcatcttcaaagggaagcatttgcatcatcctttcatatgaatgattgttcatatgtttatactatacctctgcccggggtgtttgtcaacaggaaaaacagtggaaataaaaataactgtcaaagctatggaaatgatttgcatttttggcagaagagcctataatggatttttggacggagcagtttttttgccgttccgttggaaaaagcagcaggaaaggcgcgagtgacataagaaaacaaaggttctgaaagaactgcgaagcattgcaaaatcgctgcaaggcggcagatgcaaggcagagggctgaagcactccttggtggaatgcaaggcccgataacgcggcagatgccgccttgcagttagaattttgcggttttgttttttatggaaccgcgcagaaacaagcggaattttcccgcttcaaatcacttggaactgtgaggaaaacaaaatgaaaaagcggcacatccttttccaggcagtgagcctggggttggccctgctgatggccggctgcggtgcggtacagtccggcaattctgccacaggtgagacatccgccggcgccggtccggccgatgccggttcagccgaaaccacggcggcgcctgcctataccgggcctttgtatgaattgacgtttgaaaacctgaacgagcggctgccggagctccagaatattttttggggagataacgaagcgaaacttattagcccttatgatgggatggctttgtggtacaactttgcggaaaacggtaccttccagatcgccagagaaacgaagtccctgccggacggccggacagcagtgtatcgcaaattctgtgacggggattttcagctgttgcctatcgagggttaccgggaacttttgtgcggctataatggctaccgtatgtttttgctgcgggacgaaaaggatgtacagggctatgaacttgaggtatatgactcccagaacaacctgatctttaccacagaaggcaagtatttctacgacacgacatgggtcaataagacgccgatttttttgaaaacaggctggctccccgtgaaagaactggcgacctcccgggcaggttttgtaaatgtctatacccaggaatggcatcccctggaaagcgatgattatgtcctttatggcacgggaatgctggagctcaccatcggaaccatgagcaacagcttttactcggatggcctggcctttgtggcggaggccgaaccggcacgccaatacgcatggaatgtcgaccgcaagatcgagggctttattgatgaaaccggagaatttgccttccggtttgatgatctgcccgattttgacggcctgatggtgacgacggtcaccggttatctggacggcagctgtatggtcgcaggccggatcgacgatggcgtgaaaacaggttatagcaatgatgcccagatccaggccgttgacatcaactttttctaccgcattgataccagcggcaacattctggaagaagtggattacgaaacctttgaggaattccagcaaaaggtcctgtgggaacttggcgtggcggatctgtccagaggcagctacacctttttccaggcggacagcctgcaggtggccgacggtctggaactgcgggtgaaaaatcccttgacggaggacagcgttcagaatgcctatgacgcgggcggctacgaactggtggatgccaacggcacggtctattctttggacgactacaatgtggtcagtgtgctggtaggggacgacgggaccattctgctcaagtgtaacagcaattaccgggaaaactggtctgcggatttttggaacttgccttcgtccacatcggtgtggtaccggctgaaatatgattggatcgctcccgatggttatgtcctgcccgagggagagaacagaaatctttccgtcgagggcctgacgttggtcacggattatcgcaatcaggaacaggtgatacaagtcactctcttcggtgtggaggacatcaatgatctaacccttcactttacgggggaggacttcacgtccgactatgtggtgaaagaggaagattaccagtataagaattcgtcggcagtcggtccgtacaaagaccttggcatacaatttgtgaccctgagcgacgacgagatcaccatcacctgcgactggaccgacgatgcagggcaggcacaccacggcagatatcaggattactccattgtggaggatgcagcctgacctgcccgcccaaaccaaatgctgttacggtcaaaacgaccgataatggaataaaagcattcaaaaaaggaagaggagaacaatgaaacagatgcacaaagcagcagcttttggccttgcggctgtcatggcggtttccctggccgcctgctccagcgcgccgcagagcgaatccactgccgagaccaccccggtggagaccgccgagcccaccccggctcccacccccacgcccgaacccacccccacgccggaagcggaaaagacggtggcttcggtcagcgacctggcctgggtcaagagccatgacaaggccgacttcaatctggaggacctgttcctggccaactcgaccacgctgctggccccggccggttccggcaaggccatcaaggtgacggttgaacagtatggcgtcagcattcccgagggcggcatgaacgcccagatcgagagcgaacccaactatgtgggcacgttctactcctggtatgacgaggaaggcaacctcaactggctgcgggacagcatgccctacgccagcaatgcctacaacacagtcaatcccgacagcgactacggctggagcatggtctggaatgacggcggcgcgacgatgtgcaaggtctataccgagacgtcctaccagatggcagcgtgcgataccttctatccgctctatacgtaccagggcatcagtatccccatcaattcgtactcccgggcggaagaacaggaattcggaatgaacaaagaatacgccccctatgacgaccagctggcccaggctacgtactatgttttcctgtccgattccgagggcggtctctacgaggtatatctcgacgacaacatggcagttcaggcgattatatgctccgacaatttcggggtgcgtgaggtggctatccccaccatcgtggatatttcggaagttcccaccatgcctgactttgccgaccagaccatcgagtgcacggtggtggaaaacggcaagcagtacaccgtccccatgatgaccggtgtcaacaacaagatcgataccagcagcgccgacgccacccccgatgatgtgaccatcgaggcggacaccgccgtgacgatggaggagggctcttccaccagcatccccaacaataccgcgtttacgatggatggtcccgtgacctttaccatcaactacaccgcgtaagagacacagatccataaagaataagcctcccgggaagggttttatcccgggaggcttattttttctgtcggcaatctgtttcttcttttcttatctgaactgcccggttcagaaagcagtttatccagggggagtttgtactgagatttttgcatagacaggacttatattgcgatacgctcaaaaaatggcttgccgggcaaaaggggactttacttcctcgcagtcgaatcctataatgaaggagcgcgatacctaagatgaattgctgaaactctggcaaaaacagggatgtttttgctgtccaatgattcagcgctgcgttataatgcctaaagcattacccacgatagggatgcctaaatacaggaggaatgtacgatgaaaaaatggatcgctgcggtagttgtggttgtcattgtcatagctgctgcggtttggtacaaagcgggatctgcgcctgcagcggttgagaccccggagacagcagccacccctgcccctgctgctgccctggtgcctgctgctacccctgctcctaccgcgaccccggaaactgttgctaccccggaaccgacgcctgccgctgccgagaccacatccgatacaggtgagaaatatgaagtttcccctggagtttataacgatggtaccgttagagaggtaacccctgaagaaatagagaatatgacaatagaagagcggagagcttatgcagaagctaatgcaaagcagctcggtggcaagtcttgggatgatttaggtcatgttactgaggaagaagctcaggacgcaatagacagtttcaatccagacaatccttatattcaagacataatcaattctggcgttttggacaactaagatgcttgatatgccttccaaaattaaatggaacatcgcaacagtataaatgccactacttggtgttcttttttgcggtgttcagggatgaaattaagagttttttcatttcaatacagtgctcaagaactgcggtatcgctataatagttgctttcaatcagtaattccagccaatattcgctctcggaacattccttcaatgcaatttggagtttggcgatgaaatcagaccggctatgaccatagaaagcctctcggatattggcgccaatgctggttcccgagcggatgagttgattggtcaagatgctttcccgtttggaacgcttgatttcattgcacactttgatgatttctaaggcgaaagatttagacttggatagaagaggactgttcacggttgcaccccgttcctcacttattccttattccctattacttattactttccaaaaatcccgaaaacaaggagaggaaaggaagagggaatagtgaagaagtaataagtaataagtaaaaatcccgaacgctgtcgcattcgggatttttggtgccggtggtgggggtcgaacccacacgctgttgccagcaacggattttgagtccgtctcgtctgccaattccaacacaccggctgatacccgataagtataccatgccaccgcgggaaaatcaagacttttctgcccgcagccactgcccgaaacgagagcgggatgcatcttcttgacttttttttcacactgtgggataatgcctctggacaggaaaggtgatgaagtttgacggttttggtcattgacggccagggcggcggattgggccgccagctggtcgcggcgataaaagcacagtgccccggcgtgtgggtgctggccgtgggtaccaacagtacggcgacctccgccatgctgcgtgccggcgccgatcaggccgctaccggtgaaaacgccatctgtgtctgctgccgcaaggcagatgtcatcgtgggacccgtcggcatcgtcattgccgacgccatgctgggggagatcacccccaaagccgcggcagcggtggggcaaagcgccgccgcaaggatcctgatccccgtcaatcaatgcgacaacatcgtcgccggggcgcgggatctgcccatgtcccgcttgatccagagcgcggtggacgcgctgcaaaccatttgtactcccggtcacacggcaggaagccggtgatccgcggccgaagccgcctggggagcaaacgcggctgcgggccgcaccctttgtcctatcattacgaacgatttggatgccaggaaggcgtctgctttcagcaaggaagcggacgcctccttttttgtctcagccattcgttaacaaaataaatcaatcaaaccgctgcggctccacggcccggcggaccggagaggagttaccccatgaccctgcaacagttttttgcccaggtgcccaaggctgcgctggccttttccggcgggacggactcggcctttctgatgtgggcttccagacagtacggctgcgccctgcgggcctactacatcaagacggctttccagcctgcctttgagctggcggacgccagacgcctggcggaagagctgggcgttcccatgaccgttgtggaactggatgtgctgtacgttcccgaggccgccgaaaacggtccccgccgctgctactactgcaaaaaggcgctgttcacccggctgcgtcaggcggccgccgccgacggctacaccgtgctcatcgacggcaccaacgcctccgacgacgcgggggaccgtcccggcatggtggcgctgcgggagctggaagtccgctcccccctgcgggagtgcggcatcaccaaggcggaggtgcggcggctttccaagggggcagggctgttcacctgggacaagcccgcctacgcctgcctggccacccgcatccccaccggcactgccgtcacggcggagatgctgaccaaggtggaaaacgccgagtccgccctagcggggctgggctttgtggatttccgggtccgggtggcgggcggcgcggcccgcctgcaggtgactggggaccagatgcccatggtactggaaaagcgggaagaaattctgaaagccctggcgccggatttttcggcggtgacactggaccttgcgccccgtcgggcgtctgtataaaaggaggagcaagatggataacaagcatgacatcctttgccttttgcgcagtgttgcaaatggcgagaccaagcccgaggacgcactgctggaactgaaagaagccccctttgaagatctgggctatgccaaggtggatctgcaccgcagtgtccgccagggctcggcggaagtgatctacggggcgggcaagaccccggagcagatcgccggcattgcggcggccatgggggagcggggctgcaagaacattctcatcacccgcatcggcaaggaagccgccgactacgtggcccaaaaagtccccctggaataccatgaaagcccccgcctggccctggccttccccggggagcggctgagcctgggcaacatcgtggtggctacgggcggaaccagcgacatgccggtggcggaggaagccgccctcaccgccgaggccatgggcaaccgagtcacccgcctgtatgacgtgggcgtggccgggctgcaccggctgctgtccaacctggatgtgctgatgcaggcccgctgcgtggtggcggtagccggcatggagggcgcgctggcctcggtcatcggcggcctggtggactgcccggtcattgccgtgcccaccagtgtgggatacggcgccaacttcggcgggctttcggcacttttgtccatgctcaactcctgtgcgtcggggtgcagcgtggtcaacattgacaacggtttcggggcggggtatctcgccagccgcatcaaccaaatggagggtctggaaacaaaatgaaaacgctttacattgaatgtgccatgggtgcggccggagatatgctcatggcatccctgtatgaacttctgccggagaaagaggcgttcctgtccaccatgaacggcctgggtctgcccggtgtggcgctggaagcaaagcaggccaagacctgcggcattgcaggtacccacatggcagtgaccgtccatggcgaggaggaggtcgaacccggtgctcccactgctcacagccacggcgaaccctgcgaggaagcctacctgcacagccatccccatgaccatatgcacggccatgaccatgagcaccaccatgaccacccccacggtgaaggtcacgaccatgcccacgcccaccatcacgccacgccggggcatatagcggagatcatcaacggcctgcccctgccggaggaagtccgcgccgctgcccgcgctgtctacgacgacattgcaaaagccgaggccaaggcccacggctgcccggtgggggacgtccactatcacgaggtgggcgctctggatgccgtggctgatgtgaccggcgtctgctacgccctgtatctgttgcacccggacaagatcgtggtgtcgcccatccatgtgggcagcggcacggtgcgctgtgcccacggtgtcatgccggtgccggcccccgccaccgccaacctgctggcaggcgtccccacctatggcggcagcgtcatgggcgaactgtgcacccccaccggtgcggcgctgctggctcactttgccgggagcttcggccccatgccggtcatggcggtggagcagatcggcgtgggcatcggcaccaaggatttcggccaggccaactgtgtgcgggctttctggggcgatacccgggaggaatccaacggccagatcaccgagctggtctgcaacattgacgacatgaccccggaggcccttgcctttgcttgcggccgtctgctggagctgggcgccctggacgtctacaccgtccccgggactatgaagaaaggccgccccggccatctgctgacggttttgtgcgacgccgataaggtctccgacctggcgcgggaagtcctgcgccataccaccagcaacggcctgcgggtgcgccattgcgaaaagtatttcctggagccctcggcagggaaggtacagactcagtggggaccggtgcgcgtcaagtatgcgcagggcttcggcatccgccacgcaaaacccgagtatgaggacgccgccgccctggcacgcaggcacggtgtgtcctatcagcaggtgatggagcaggtgctccgccagatcgacgctgacaaaacctgaacgaatacggcttccccgcggccaaaacggcggggtctatgacagaaagggatgaatacaatgcagacaaaacggatcttttctctgatgctggcggccgccatggcggcaggcctgctggcaggctgcggcggacaggatacctccgcgcaggccaccgccgaacagacggaggccaaggactcggtggtcattgccatggggccgacctcggagccggaagcgggctttgacccggcctacggctggggcgcgggcgagcacgtccatgagcccctgatccagagcaccctcaccgtcaccaacaccgacctgaccatcggctacgaccttgctacctcctgcgaggccagcgaggacggcctgacctggacggtcactatccgggacgacgtcaagtttaccgacggcgaacccctgacggcggaggacgtggctttcacctacaataccgtcaaggcgtccagctcggtcaacgacttcaccatgctggactatgccgaggcagtggacgacaccacggtggtgttccatatggcccatgccttctccatctggccctacaccatggccattgtgggcatcgtgccggaacacgcctatgacagcgccacctacggctccaaccccatcgggtcgggccggtacatcctgaaacagtgggaccggggccagcaggtcattctggaagccaaccccgactactacggcgaacagcccaaaatgaagcaggtgaccatcctctttatggaggaggacgccgctttcctggccgctcaggcgggacaggtggacgtggcctatacctccgccacctactccgaccagaccatcggcggctacaccctgacggcttacgacagcgtggataaccgcggcatcaaccttcctgcggcggaaccctcggtcaacgccgacggcgtggccaccggcaacgcggtgacggcggacattgcggtgcgccgggccatcaatatcggcatcgaccgccaggagatgatcgacaatgtcctgaacggctacggcacgcctgcatacagcgtctgcgaccagctgccctggtacaatccggcatcggaagtggaatacgaccccgaagccgccgcccagatcctggacgaggccggctgggtcatgggcagcgacggcgtgcgggaaaaggacggcgtcaaggcggagctgaatattctctactccaatggtgactcggtgcgccaggccctggcagccgacctggccaaccagctgggcgaactgggcattcagtgcaccatcgagggcgtgggctgggataccgcctatgaccgcgcccagtccacaccgctggtctggggctggggtgcgcacacgcccatggaactgtacaacatttattactccccggaggataccggtacggcggggtactcgccctattccaacgatacggtggatcagtatatggacgaagcccttgcctgcagcgacctggaacggtcctatgaactgtggcagaaagcccagtgggacggcaccaccggcgtcacccaggacggcgacatcccctgggtgtggctggtcaacgtcagccacctgtactgggtgcgcgacggcctgcaggtggccgagcagaagatccacccccacggccacggctggtccattgtgaacaacgtggaccagtggagctgggcatgaccgtttccgttcccctgtacgtgggaatgtgatgcggggcacacgggagacctgccagaaccgcagccgcacaggggcgacggagcgtccgcctttgtgcggctgtgccgcgggcaggaaagtccctggaaacgcaaggaaaggatgggattttgttgaaacaccgcctccggtttgcagcgggaaagctgctcaggatggcattgctgatgctgggggtcagtatcctgacctttgcgctgatgaccgcctcccccctggacccgctgcagacaaatgtgggccaggtggctctgggctccatgagcgccgaacaggtggccaagctggaagcctactggggcgtgggtacgccgccggtggagcgctacctgggctggctgggcgacgtgctccacggtgacttcgggacctcgctgctttaccgccagccggtgctggaagtggtgggccagcggctggcagggtccttgtggctgctgctgtttgcctggatcatctcgggcgtgctgggccttgtgctgggcgtgacggcgggggcgacccgcggccgtctgcccgaccgactgatccgcggatactgtctgctcatttccagcacgccggcattctggctggccctgctgcttttgctgatcttctcggtctggctgggatggctgcccatcgggctgtcggtgcccatcggggcggacgccgccagcattaccctggcggaccggctccagcacgccattttgcccgccctgaccctgagcatcaccggcgtggccaacattgccctgcacacgcgggaaaagatggtggatgtcctcaacagcgactacgccctgtttgcccgcgcccggggagagtccgacctgcgcatcgtgctgcggcatgggctgcgcaacgtggctctgcctgccatcacgctgcagtttgcctccatcagtgagatcatcggcggctcggtggtggtggaacaggtctttacctatcccggcctgggacaggctgccgtcacggcgggcctgggcagcgatatgccccttttgctgggcatcaccgtcatcacgtcggctatcgtgttcggcggcaatctgattgccgacctgctgtacggcgtggtggaccccaagatcagaaggggggcggccagggaatgaaagtaaccaaccgcagacgcagcacgctggtgctggtcctgcttgccgtggcggtgctggccgccgtcaccgtggccggaatgctcctgaacagccgggccatggagacggattttgcccgtaagaacctgatgccctgcctggaatatccctttggtaccgactggatgggccgggatatgctggcccggacgctggcgggcctttccctgagcatccgcatcggcctgctgaccgcggcggtcagcgcctgcatcgccctggctatgggcgttgtctcggccactatgggccgctgggcggaccgggccgtctgctttgtcattgacctggtcatgggcatcccccatatcctgctggtcatgctcatctccattgcctgcggcaaaggctttgcgggcgtggtggcaggcgttgccctgagtcactggacctctctggcccgggtcatccggggcgaagtcatgcagctgcgccaggcgccgtatatcctggccgcgcagaaactgggcgtccgcccgtggcagatcgtccagcggcatatgctggtgcatctgctgccccagttcctcaccggactgattttgcttttcccccatgccatcctgcatgaggccagcgtgacctttttgggcttcggcctgtcgtcggagcagccggccatcggtgtcattttgtccgagagcatgcggtatctcaccacggggaaatggtggctggcgctgttccccggcatttcgctggtgatcgtcgtgctgctgtttgctctgctgggggagcggctgcgtctgctgctggaccccgccagcgcacaggaatgaggaggccgaccatgcagccgatattgcaaatcgaacatctgtccatccgttttacccagtacgccaagggcctgcaccggcgggaactgccggtcatcaaggacttgtccctgaccatcgagccggggcaggtggtagcggtggtgggcgccagcgggtcgggcaaaagcctgctggcccatggcatcctgcacattttgccccgcaacagccatatggagggccgcatcctgtacgacggcagcgacctgacccccaagcgcgccgccaaactgcgcgggcatgagattgtgctggtcccccagggcgtgacctacctggaccccctgatgaaggtgggggcacaggtgcgcggcgacgatgcaagccccgccgcgaaacagcgagcccgggaggcactggcccgttacggccttgcccccgagacagagcagctctatccctttgaactttcgggcggcatggcccgccgggtgctgattgccacggcggtcacccagtcgccccggctcatcattgccgacgagcccacgccgggcctggatgcaaaggccgcgggccgtatcctggggcatttccgggaattggcccagggcggcgcgggcgtgctgctcattacccatgacctggaactggccctgaccatcgccgaccaggtggcggtgttttacgcgggccagaccattgaggtggcgtccgctaccgattttgccgaccccgccgccctgcgccatccctttacccgggcgctgtggcgggccatgccggagcacgggttccagcccatccagggggcgcagccctatcccggcaccatggccgcgggctgtccctttgcgggacagtgcgcccgcagcacgccccagtgccgggaagccggggaagtccctctgcgttcctggcagggcggcatggtgcggtgccttaacccgcagacggaggaatgatcatgaccctgcaagcaaacaatgtgacctttacctaccgcggcaggcacggcgcgccggtgctgcaaaacatcagcctgaccatacagtccggcgagcgggtgggcctcaaggcgcccagcggccggggcaagaccacgctctgccgcctgctggcgggatatgaacgcccgcagtccggccaggtgctgctggacggccagccggtgtggggaatgtggggcgtctgcccggtgcagatgatgtggcagcaccccgaaacggtggtggacccgctgctgcgactgggagcgaccctggaggaaagcggccccgtcgaccaccgcctgctggcggaactgcacatcgaggatggctggatggagcgctacccggcggaactttccggcggagaattgcagcgtttctgcctggcacgggccttgaacccggccacgcggtttttgctgtgtgatgagatctcggccatgctggatctggtgacccaggcgcagatctgggatttcctcatccgggaagccgaacgccgggaactggggctgctcatcgtcagccatagcgacagcctgctggaacaggtctgcacccgcatcgaaactctgcctgtctgaaacgccccacccgaggatacccccatccgcagcgccgggattttcccaaaaagcaagccgggatacctcaaaacacaaaacagccgcgcccgtgtcaggagctcaaaaggctcccggacacgggcgtggctgcatttgtatggagaaaagcagcgcgccacccgcggccctgtggccgtatgggtggcgtcgcgctgatctatataatggcccgctgtatggggaccgtgccagtcgttgcatcaggcaggtccggcaggggccttattggttgtctgctcctgaccgggcggatgccctcgcatggtcaggggacagtgaatgcatcgagcaccggcgctccggtatctcttgctgctgtatatacaatacgctttaattttgaaaagggtatagaaactttttgaagaatctccaaacaatgtttgaacagattgtgacagagctgtttgaacttgcttggccttgaggaaaagccgggcgtggctcctgaaccttgctttgaaaaaggggaggacccggtcagaaggctgctgtaacttgccccaaaaggagagagcggcaaaaaagttcagatatatgactgcatttccttgttgacaaacacggcttcaagagatatgattaacgacgttaactatttgcgagggggcaatccatatggagtggacggatatggttcactatcagcagcagatgcaaaaagtcatgcgggcgctgctgcctgtgcgaaagtctgcgctgaccgtcagtgaatgtgaactgctggcgcacctgtatttgcagccggaacaaaacacgccggccttgctcagccaggggagcggaatgaaaaaggaagccgtgagccgctgcctgaaaacgctctatgaaaaaaactgcatcagcaaacagcggaaagagaccgacgagcggagctaccagctgtttattaccgagaccggccttgccgaattgaagaaaggctacgaaagtattttgcagccgttttatgacctgtggcgcagttccggcaaagattttgagatgtttctgtattatgcggataaacttgccgcgcagatggagaaggggaagggacctgccgatgaagatgaagttttatgatgcactgcaaatggacccggccatcctcaaacggaaaattgcagcctgcgatacaaagcgggataagctgtattattggaccgctatggcggtgcgttcggtgttgatcgtggcctttgccattgtgttcatcagcttgctgtccggcgtgttcggctctgataataccccgatggccgtagcattgttttgcatcatgctgggcattcggtttgtcaattttgaatattgcatcggggactcgcttctgaccttggcggccacgctggccattttggtgctggcacccagtgcggcggcggtgcttccgccggtttttctgatcccgctgcattttgtcagcttctttttgatcctttatatgacgacccagcggccggagatgggaaatggcgggttatacaacttcgcttatatttaccttacgggaaatccggtcgcaggggaggccctcattcgccgcgggcttttggcaacggtggggtatcttgtctgtgcggcgatcctggtggccaagcaccggcatcagcataaagcggtgcgattccatcatgtggtgcggaagttcgacctgacaaatcccgtttacatgtggcagctgcgtatggcccttggggtaagcctggtcatgacggcgggacaggtatttggcgtggaacggtttatgtggatgggctttgcctgtgcctcgctgttgtcggagtatccttattccggcagtaccgtcgtccgtttccggcagcggattctgggcgccgtcgcgggctcctgcctgttttttgtgctgtatctggtactgccggaatccatgcattcgctgctggggcccatgggaggcctgtgcctgggcttttgcaccgattaccggtataagacggccatgaactgcctgggagcgctcatgctgggagcagggatctacggactccagggtgctgtgatcctgcgtgttgtcgataccgttctgggggtgaccttcggcctggtgtttgccatggtttttcaccgcctggtggcgactcgtttcctgcccgcagcgaaaacagagtgaacacttgcattgcaaaaccatggaccgccgccggaggcgtacggttcaaaaattatccccactgattttgcagcgttttctccgacgtgcgcggcggggaaaattgtggtgaatctctcccggctcatcaacgaaaaggggaagaatatccgcgcgagggggcatctgcttcttttatggtgcgaaggtagttcaaagaagagaaaattccggatttgattcgggcggctcgcaccagtgtgaatccaaaagtttggaaatggttttgtgtgacttgcagttgaacatttacacgaagggagaaaaagcgtataatgaaaccataaaacaggcgatgcgcataagcctaagcgagtgactttgtgcacatttgccaatgagctctataccccgcaaggggactgtaactttagaatagaatcatatagattttctccccagaaaatgtgttctacaccccgcgaggggactgtaaccaatgattggtgattttgacatccaaacagttccaatgtgctctacaccccgcaaggggactgtaacggtgatggtgaaatcaatgtacatcatgagaagcaatgtgttctgcaccccgcaaggggactgtaacagctgtgcataggtcgtgagacgccacacgcgcagaatgtactctacaccccgaaaggggaccctatcatttactgcaacagtaaatgaacaaaaacggcaaacaccgcccacctccacaagacaaaacaaacacatcgcctttgtaaaaaagcacacccccggttccaacgattttggtcggctggaccgggggtgtgcttttatttacttgctgagatgcatcagatgctggtgggctgtttccagcggttcgggcaggttttggaaatcctttaatttcatataccgtaccgtgtcggcattatccttggtatggatgcagcgcttcatgtccaaaaagtctcgtatgtggggaagtttattcagcggctgcttcttcttttgggtctccggatactgccgcgccagcatctcctccgcctgggtctgataggttttgatcaactcctgaagtcgggcttccggcgccgcagcaggcggtgcgggtgcaaagctgcggtacaatgcagcgcagtctgtttcgcaaagctggattgcgatcctgacgcggccatatccgtacggtttccccatgccaagattctgccggcagtctgttccgggctgcagacaccaaagcagcagccccaattcatccggatgcaggttgcggtaacgcacggttccggtaaacacagtgccttccggcaaggggcgcagggtgctggcaacattttttttgatggactcagccggaagtgtttgtaccggtttgaaccagtattgcttgacgcctcgcagtttgaaatccgggctgttatagtgctgggctgtgccgggtccgggctgattggcgtcccgcttgggtgtgacatatccggcaaaaaaggtgggctttggctccgccagcatcaggctgacgggggcgccgggtttggggtccccccgggcggtcaaagcgcccaccgatatccgggaccgatacccgacctgcccttcttgaatatgcgaacagcccatcactgcactggggtaatccagaaaacggcaggaggcttcttttctttctttctgcgcagccggaagcccgtcttccagcgatcctccgtacagaacacgcagataccgggaaacaccgaagctgacggcattgtgatgggcttcgccgcctgcctgtgtgaccccggccgggccattgctgccccggtttatgtaaaatacaggcttggattgtccgtccttcggcagcgcccagtgatcggggtcagccttggaaatgtttgtgccgactaactgattctgtcgcagttcaaagtcttctttgtaatagagtacttcttccgcactcagtgagatcggttccccggccttttcatatcggaacagatacagcgtattctgcttgttcatgcggcccacacaaagcagatcccctttctggccgtccggcagctcttgctctgacaaggcagtcactctgttgccgtttgctttataccagaccggtataatccgggcccaggtatcgcgataagcagcggcaacagggcttttgcggcggatcatcagcggtgcggataccggctggataaaatattgatttcctttacagcacagatatcctgcctgaacgttgcgcgggttggaacgatttttgccgtcctcgcatcgctcggaacgaatgtccagcaatttcgagtaatcggaactcaggtccccgcctacagaccggcgggcatttgcaaggctgcgatagtacatccgcagattggcaaagtcttcctccggacgaaccagaccaaagcccaaaatctgcatattactgcggatcaggcctcggagggtggaacctggaatctggtactgaccgtctgcaccacggaaaaaatcaggcgggatgttatctccggctttgtagccattggagatgaaaatcggcgtttccgcagtcagggtcaccttgatttctccgctgagcaggttggggtcgagccggtcgtgaccaggcagatcggcggaactttcatagcggcgcagcggatatggacagaacggcacaaagttatagggggccgtcgggtgaaaacggccggattttccggcgggcgcagagggggagcgtttgccttgctcggtgtttttttggctgtcgtcaaacagcgcggcaagttgggcgagtccctgtttggagcgtgcaggcccgccggcagggcgatgcggtttttggctcatttgcttgaacctccctcccaggacagcatccgggtagcggctacggatacctggccatcctcatcatagtccagaatgcggcgcaatgtcagctgtctgccaaaacccggcagaagaggaacggtatgatccagcacatcatcgccggtttcggtcagccagaaggcttccagcctgccgtcatcacagcggatgaaacgcagttcgccttccggcccaaagaagcgtgcttcgcgccaatcctctgcggggaggtctggcagggcaaactggtcggtcctgcccaggtatacctgactgtcctgcaggacccaggcgtacggcagggattttgcctgttccattgcatcgggaatgtctctttcgcaaaaattcatgcctggtcacctcccaaaacctgcatccagttctccagcagcgaatctgggtcctgtacttttgtgatctgtccgtcggcacagcgaaaaccgacggaacgcccgtccacggtgcagatctccacttccatttcctggacccgtccccagccatgggaactgccgctgcccagttcgtactggcccagacccagatcccgcagggcgaccaggagcaaagcgcagaaaacaggagaattctgtgtcaaagttacggtaaagtcacaccaaccgctgtgaggctcttcgctgaacagaatttttcgcatgacgccgccggtaaaacggttgatccggatacgggtcacttcctgtgctgtgccgccgggccgcagaacggcgtcggacacctgcaggcggccgggtttcccgggcgtttctgcggaagtcgggcagccgaacagagcttcctgtgcggtttcggtggccgaaaggtatggcagaatgcggtgcagatgggcacgcatagcacctttcagtgcagagccgggaaggatgatgcggccatggtcggtcaggttgactgccacagaccgcttgtcgatggttctgggcgaggcgtcccggaccagaaattctttgagccggcagtgaacagaaaaagtggtgcgagcaggcagaaatgccgggagcgtaagggaaacggccgcagcgggaatcgtttcgtccgtgtcttccaaccagccgctgcggtcgtcggcacggaacaggtcatagcggcgaatgtgcacgtcggtcagctgtacctgcccaaagccattgcttttttgcccgcccagccggatcgcaccatgatccagggcagtcagcagggcgttcagatgggattcggcgtcaccggcttgttccgccgtgccgcgccagacaagggcaaaggaaaaacggctaccgctttccagatgggccatgtcgaatttgaagccatccgccgcacagccggtgccgggatctatgtgcagccggggacgcataacgatcctggcatcgggctggaacaaaaggtcggaaacaaggacggaaccttcctcttcctgggaaccaaacaagcggcagcgcatttcatcgggaagcgcttcccggagagctcctgccagtgacgatgcctgcagcataggccgtccatccgcacggtgcaggacctgctggggatcattctctgtgttgccggtccgaagcggtgtacggcagcagccggtgacccaataacgaagggcataagtaaagatcatgatactttttccccctttcggctcagatcaagcaagtcacacagaagctgcagcttgaaacgggtggtgtcggggcaatcggatacctgcagatcgggggaggccccatggagacacaaggtatcgtgcagcggttccagcaaaatactgcgtaccatatcggagagtgcatcgaagcgtgttccgtggaaggcgccgcgctcgttccggttatggtccagatacgccagaacggaatcggcagacgccgagtctccgcgctgcagttcctgttcgcagcaggcctgcaggctgccgagctgactgggggaagcccctgccgggatctttgtttccagcagccagcggcagcgtgcccggcgaagccggtcggaaggggtatcactgaccgggatcgcctggttcccggtggagacaggaacaaactgctcgtattcgcgcaagaacaatacctggccgaagccttctccgcgggcgctgcccaaaccgtgctcctgcaaggcggccagcgcctcaaattggggagcaggccggcaggtgagccgaaagacgctgccgccgcggtacactggatattccggtagacggcagccccattggcggttgtagccggtatgccgatcgagagacgcggcgcaccgttccagctttacttcttccacccggagcagggcagccagcgcccggaggtccagcccgcagggctccccgtgctgtgtcatggtcatgggggtcaaaagcatcatgtacaatacctccgggacaggagtttcggaggtatatcccaaactcatccaggcaggagcatccacggcctccacacactgtacttcacaaaggccgctgccggcataccggtcggcgccgacagacaaaatgccgggaaaagcggtggcaatcacaggggcgagatcggcgttttccatccggatatacccgtccaacacaatgccggcggaaaggcgctccacggtaaaaagctttttctcttttccccgttggattcgggcagaatgttccactgcaggggagaaggggatcatccttctgccgtcgatccggcagaagtctcccaatccggcacgtttgtcgcccggttccacatcctgaagcagtacactgtaacagcgggttttcgctttgtcctgataaaatcccatgggagccgggatcacaggctggccatcggccaggggaaacgcatccagaaagcgtgtttcatcccccaaaagttctgttttgtgggccgcaaaccaggcgggatctctggcattcagggcattcgcaaccaggccgcgcacggcggagccgggcagaaaacgccgggtaggggaatggttcagggcaatgttgccgtctggggaatcctcaatggcgctgctgttaaagcaggggatggaaaggggcgttttcagcagcaggcgatagtggagccagtggcagggagcgaccgggacaggggctgcaatgggatgctgctccgtcacactgaacttcacacgcccaaagccgcggcttcgcatcataccggcccacttgatgccgcgcagtgcatcccgcagaagtgctgcgtcagcttcctcgcaaagaagaagtccggaaaagaccagaccggattttaagcaggccgccatgcgcagactgcctgatttagccattccgtcctcgacttctgtgaaggcgcgcagggtaaacaggtcgtctgctgtaccgctgcttatgtcgggcatcaggtcgccgggaatgatacgccggtcggtggctgtaccgtgccagtttccttcgccgaacagttcccggatcgtttgccggggagaggaggcgccggtccagtgcagcagctgctcggtgctttccagcaaaagacctttcaaagtggagccgggcaaaatgggccatccgtcgggggacaggcggagcgcaatatcttcaccgccgggaatgctgtcgcctgagctgaaaatggcgtctgaaagcaattccatgcgcaaatgcagacaaatccgagccattgattattcctccttccacaatttcgtgtggtccatcagctccactgcgtcaaagtacagacagcggcggatgtggcggccggattccgaaaagtcggcaaatgcaccgcgctccatggtatgcccctgcaaaagttgcttccaaaaatcgggataccgtgtttccagtcccatttccagcatggcattcatccccatgcttcgcagtgccagcttggtttccagttcgccctgccgcagggcgtcccgcagctgcttgaatttgctgcgtggaaggtcggaagcctttttgcccatcaaagcgatcagcgtgcggaagtaggaataacttcttgcttccaggcccggctgcaaggtttcatccggctggcagacgatgacagggcgcaaattgagcagtgcaccgtcccgcgtctggtaattgcggcgaatctgggaaagactgcccgtcatggagccaaactctatatgccaatccatggcgctgatacggctttccgggtccagcgcagcgccgaacctttttgcattggagcagagctcttcgctcaggtcgtaggcggcacggaacggatcttttttgtgaatcaggacgatgccggcacaggcggcgtagggctggccatcctccgcattgcggcggctggcaagttcctgcagaaaatccgcggcggcctccagcgccaaggcaccggaaatcacaaaacagacatcatcccccgcaccgatcacttttcgtaccggcaggatgtcggtgtcacgctccgggtacagtgcggcagccaggtgatccagcatggtgttgtatgcatcggtaaaatctttgtcgatggaagtgctgaaccgccgcagtctgtcaacgcaggtttgccagtcatggccggcgtcttgatatatgtgctgtacccgcttgcccatggcattgccgtcaatgtgaacgaccgcgataaaattgtccttgccggccaggtcatccgtctgagtggttgtctgccatcccggcggacagtaggggaccgatgccagatccgggcagtacgttccggtgttgctggcaggacgttccattccgaaagaaatcttgcggaaagaggcttcccggcgggattttttcttttccaattcctgagaaagcctgttcaggttttcacccggcgtgagagtatccgcatagggcaggattttctgatatagctccatctgaggaaagcgctgcaaggcggcgcggctgaccgcccggccaaatgcacgggcagtttccaggtcggcaaattgcagcacggtatgtccgccgccgctgtagacaaaatgctcggattcacggtaaagctccggtgcggcctgtgcaaaaaaggcactgcttgttgcatagcggatctcgtccgaacgctgcaaattgatgcgcagcttgttgctgccgaatatgtatgcctgtttttgagatacttccagaatcatcagtacgcggctcattcaatcacgctccttcaactttgggattccagggcatttcttccgtccaatgtacggcagttccgcccattcccagggaggttttaattcccaatccggcaaatccggcaaaatgcagcagggcacaagccagctgacgatgaaatccgttcaggcgaagttccgtttccacacagccgcaaacgcccggaatggaggtgtttttcagttggtaggagacggtctgcagctgaacattgcggtaaaccagcccctcggccagtgcctgtaacccgccgccctcgtcctcaatggcgagatcggggaaattcaggttccaacgccggagcagactttgcatcaccagttcctgtgtgggcagaagctgatagacgccatgacttttgaaggcggtaggcgtccggaaggtcagataaatactgcccgcagagggcgtttccagcagctgcgcggcgtttacctcccggcgtctatgatgtttgacaaacaggttgggataaccgttcagacggacgtgtctgagttcggccaggatggggtccaaggcagcgctgacctccggccggaaggaggtgatgacccactgcgtcccctgcacccactggctgataggaaaatccgacgcgtcatggatgtcggcggcagatttcggaggaagctgctgtaaaagaaatgcatatagattgtacccggctgaaacaggcagcggtgtttgaaatgtaagttggtattggatcataacactctccccggcataaggcgaagttcttcaggatatggcttgtgctgttccgaaatggtgcggttactggccttggtatgctgtatctgtgcaggtagacaatcggtacgttggcgggcagccgcctttgttggagtgtacaggttctccggtacggcacacgatggcagtcaacagggggtaagaaatccggatgcgcagtctgggccgcttcaagcgaccgcttttcattgccggagcgatccggctgacgttcgatgcgcagggaacggatctcatgcggtaaggtgtacattggctcgggcattggaaaaatcggatacgggctgtggtggtctgtggccacaggggaacaaacggaatggatcttttcatagtgatctctgctttgtggtacgggggttgataggatcgcgtatgtactgtaatccataacgaaaatgggcgtttcggagttttcagaaaaaattgaaagttgagaagattctctgtatactggaaacaggcaaataaaccctgtgtggggaggactgtttatggataatgagaacggggcaccccgggtacttttgttttatatgagcctttggacgcagcgcgagcgtccgcagacaaatgaggcggcgctggaatatctggtccggagcgggaaaaagccgggacggattctggctttgtgcagtgagaaagtgcggaaccagacctttccgggagatgcagcccacaaggaaacgacgctggagtattaccgcggcagcttcctgaagcgggccggatacgcccaaccggagcaggtactgacaagcatcgatgtcccggacaccatgcaggacgcagaccgtctgcgcgccatccgccaggtggcggagctgctgccggaaaatacacagctgacgatcgatctgaccggcggaatgcgggataccgccgccttgctggtagccattgcccgctatctgcaaagcttcaaaaagctggcctcctgcgaggtactttataccgaactgggaaatgccgggagcggcggcagcacctgccggaacgtgacggtcctgtatgatgtttttgatctgattgcggccacagaactttttctggagaccggttctgccagaaagattgatgaatttttcaaaaatcatgccaacctgaacaaaatggcgaaaaagctgattcgggatgtgggcgaattttccgacagcatctcgctgtgccagtttgaccacctggaagaattgacgaaagggattcatcagcgccttgaaaactggaaagccaaccaaaccggagaaaactccctgaacaggctgtttttcgactatctggcggcccgcttcgaccaggagtttgctccgtttcaagacaggaaacagagcctgcccgaaatcgtaaaatggtgtgcggatcgaggcatgtatcagcaggcgctgaccctgcttacagaagatatgccggcgtatgtctgctgccataccggcctgcagccgggcgcagggctgaaagcggcctggaagggggaaagcaatccgattgcatgtacatggccttattatctcttccatgcccatatccccaaggttacgggccgtggacccagcctggattatctggaagcgcagaagaaaagcagcaaaccggcaattctgttcccggaagcagaaataaagctgctggccgaggggatggactgttataagcaagtgcacgatatgcgcaacaggatcaatcatgccaatggcgaccaggacagaatcagtgtggatcaggtaaaagagctgctgacgaacgtggtacttgttttacagcggctgcggtcaaacccgaaatccatggcagtgaccggcacagtgtacgctgcaactgtttcgatgcaggacttgaagtggtaagccgaagcagtagaaacttctatcattatacaacacctcttttcgattttctatcccaggctccaactgtaaggaaatcaacaaaccggtgcgaaggcccgcagcaggctcgcccgaaatcgccattttgtggcggttcgcacttgggacagcgcaaaagcatgggtttttcttgtgaatatggtacaaagttgctttacacggaaatccggactatgctataataaaaaagaaaacagcagaacgacgaaaacaagcaataagtgtttgtgcagatttgctgaatcaatgacgccccgcaaggggactgtaacgtgtaggccatgcggcgaaccgtcaagctttctgaaatcaatgacgccccgcaaggggactgtaacggcgatggatttgacttccatgtgataaccgtcgggaatcaatgacgccccgcaaggggactgtaacagaaccatttcggcctcatcatagatgtctgcgggaatcactgataccccgcaaggggacggtaacagctgcccggccagagccttgcaatcgtcggcggaaatcactgataccccgcaaggggacggtaacgatgtgtcaagcccgtacaggtcgatattttcgcgaaatcactaataccccgtaaggggactgtaacttagaactctctttctatttataaacttttgaccaaaaccaaccccgtaaggggactgtagtttaacaacgccatgcttgccattgcgccacacgcgagggtattcggcacctgatggcagtcggcagtgggctgctgccggcaccatttgattatgcagccgcatacggatgtattgagaaagatgcagcccatatcgggagattgccttctcaaacggcttttttctctggtgtcacccgtatgtttcactgcacgtttcgaatccacatcgcgttgaccttatcaagcaaaagaccgggcatcactgcccggtctttatattattgtgcggtcggattgcatggggcatagggaatatacccgttttcaacgcccggcgccggggcgacgtatggcttgcaaaagctatacaaagccagtgttcgttattaactctgcggaccctttttggcacagactgaaagaatcacgccggtacagccttataaagagggttccgcaatacctcttcctcgactgtgttttcaagcacattcgttgtcctgctcagtccaacgaatcgtgaaccgctgaatgctgcatccgcgccttgctggtggcccacacggatgatggcatcctccgccgtttgccggactgtggcatccatctgaacgcgatttcgcgccaaattgacacgacgatgtttatctgatgcgtgacggcttctatcttcatcctataggaaaacgctttttcactgggcaggttatgctctcgctggatgatactgtccatttgagtgtgaactagtgttttgaaaaagggcgctttgtgcccccaaatgtatacgaaaaaacgggtacattttcagaaaatcaagattttccggaccccaaatcgccttctgaacaaaaagtagacataaaaaatccccctgctactgaaatcagtagcagggggattggcgtattacaggtagatctccaagtcgatatcacgccatcaacttggctttatcacgctgttgtgtgctttttggaatgcttgcgcatcctctaagctgagcgtgagctccaagagtccaacgtaattacttgcgaggattcttgatagcggcctgagcggcagccaggcgagcgatgggcacacggtagggagagcaggagacgtagtccaggccaacgttgtggcagaactcgacgctgctggggtcgccgccgtgctcgccgcagatgcccagacccaggttcgggttggcagcgcggccatcctcggcagccatcttgatcaggcggccaacgccgacctggtcgaggtgctggaacggatcgctctcgtagatcttggtgtcgtagtaagcggtcaggaacttcgcagcatcgtcacggctgaagccgaaggtcatctgggtcaggtcgttggtgccgaagctgaagaagtcagcttccttggcgatctggccagcggtcagagcagcgcgaggaatctcgatcatggtgccgacctcgtacttcatgtcaacaccggcctcggcgatgagcttgtcagcagtcttgacgacgacgtccttgacgtacttcagctccttgacctcgccaaccagggggatcatgatgtgcggggtgatcatcttgccggtctcagcagaaaccttcagagcggccttgatgacagcattggtctgcatctcggcgatctcggggtaggtgacagccagacggcagccgcggtggcccatcatggggttgaactcatgcaggctctcgacgacgttggtcagctcttcagcggtcatgcccatatcggcagccagctcagcgatgtcctcagccttggtgggcaggaactcgtggagaggcggatccaggtaacggatggtcatgggacgatcgcccatgatcttgtacatggcggtgaagtcagcctcctggaagggctcaaccttggccagagcagccttgcgggcctcaacggtacgagcgcagatcatctcgcggacggccttgatgcggtcctcagcgaagaacatatgctcggtacggcacagaccgatgccctcggcacccatatcgacagcgttctgagcgtcggtcgggttgtcggcgttggtcaggaccttcagctggcgagcctcgtcggcccagcccatgaagcgcttgaagttggtgttctcggtggaagcaacggtagcgatctggccctcgtagatgttgccggtggagccgtcgatgctgatccagtcgccctcatggaagacatggccgttgacggtgataaccttggcatcgtagtcgatggtgacatcgttgtcgttgccgcagccggagacgcagcaggtgcccatgccacgggcgacgacagcagcgtggctggtcatgccgccgcggacggtcaggatgccctgagaaacctgcatgccgacgatatcctcggggctggtctcaagacgaaccaggacgactttcttccactcggcgtccttgaccttctcctcagcatcctcagcgctgaagacaacacggccgcaggcagatcccggagaagcagccaggcccttgccgatagcctcggcagccttcagggcagcggcgtcgaactggggatgcagcagggtgtcgagctgcttgggctcaacgcgcaggacagcctcacgctcggtgatgacgccctcgtcgaccaggtcgcaggcgatctgcagagcagcctgggcggtacgcttgccgttacgggtctgcagcatgaagagcttgccatcctcgatggtgaactccatatcctgcatgtcgcggtagtaagcttcgaggcggccggcgatctcgacgaactggtcgtagacctcgggcatttcctcatgcagcttgctgatgggggagggagtacggatgccggcgacgacgtcctcgccctgagcattgatcaggtactcgcccatcagcttcttctcgccggtggcggggttacgggtgaaagcaacgccggtgccggaacgcatgccggagttgccgaacgccatctgctgaacgttgacagcagtgccccactcgtaggggatctcgttcatcttacgataaacgttggcgcgggggttgtcccaggagcggaaaacggccttgacggcgccgatcagctgctctttgggatcctgggggaattcgctgccctgcttctccaggtagatggccttgaactcggcaacgagctctttcaggtcgtcagcatccagctcgacgtcctgagtgacgcccttgcgctccttcatggcgtcgatgcgctcttcgaagaagctcttgcccagctccatgacgacgtcagagtacatctggatgaagcggcggtagcagtcgtaagcgaagcggggattgctggtcttcttggccaggccctcaaccgcctgatcgttcaggcccaggttgaggatggtgtccatcataccgggcatcgactgacgagcaccggaacggaccgagacgagcagggggttgtcgatgtcaccaaacttcttgccggtctgctcttccaggatgcccatgtacttgaagatgtcagccttgatctcttcgttgatctcacggccatcagcgtagtactgggtgcaggcttcggtggtgatggtgaagccctggggaaccggcatgccggcatgggtcatttcggccaggccggcacccttgccgccaaggatgttcttcatgctggtctgatcgccgccaaaggcgtcatgaccttccttgaacaggtacaggaactttttgctcatagttacctccatacaaatacggtttcttcccggtgtgccgcgcacacccgcgtcgcatgtatcatgttcggcaaaatccattataacagactcttgcgggaatttccagcagattgttaaaaaaatgggcaatgatttgactaaaaaatgccgattttttacagcggcagggttgcaatttgtataaaaaatgctaaaattataatgggcttaaagttcggttcataaacatttggcaggaaggtgtaccgctaaaatgcggcacgccctgcttttgtttgtccggaaaatctgctataatacgcacgataccgggcggccgccaacggctgccccacacgcccgaacgggcagggaggctataataaggtatggaaaacatgactgcacgccagcgctttgaatctgcacagcgcagctttgccgaaacctttgagaaacatctggacaacggcgtcgagtttatcagccgtgacgtttatatcgacccggaggtggagatcgcccccggcgccgtaatcctgccgggctgcatcctgcgcggcaagaccaaggtggaggcgggctgcgtaatcggccccaacaccctgctggaaaacaccacggtgggggagggctccaccgtcaatgccagccagtgctatgacagctgcctgggcaaaaacaaccgcatcggacccttcacccatgtgcgtcccggaacagtcacccaggaaggcgtccatctgggcgcttacgtggagaccaagaacgtcaactttgccgagggcaacaccgtcagccatctgacctacatcggtgatgccgacgtgggcaagtactgcaacttcggctgcggcaccgtcacctgcaactatgacggcgagggcaagttccgcaccaccatcggtgactacgccttcatcggctgcaacaccaacctggtggcaccggtcaaggtgggtgaccacgcctacaccgctgccggttccaccatcggccacgacgtgcctgccggtgcgctgggcattgagcgcggcaaacaggccgccatcgagggctggggcgagaagaagctggagaaatacatcgccaaaaagcagaagctggaggcggaaaagaaaggctgagccccagacaaaaagcccggggcgggccattcattataatatagacaggaatttatcccaatgaatctgatcggaaatattttgtggtgtctgcttgggggcctggtcagtgcgctgagctggttcctggcagggatcttgtggtgcatcaccattgtggggatcccggtggggctgcaatgcttcaagtttgcctccctcagcctgttcccctttggcaaggaggtcgtcagcgggggcggtgcgccgtccttgctgctcaacatcatctggctggtggtcaccggccttccgctggcggcggcccatgccctgtggggatgtgttctgtgccttacggtgatcggcattccttttggcctgcaattcttcaagatcgcccgcctggcgctgacccctttcggaagccgcatcgtcccgagctgctgagtgcggccggataccttaaaataaaggagaactctgcaaatttatggcatttttcagcagcacatcgggggcagactggctcattgccggtctgggcaaccccgaacccaaatatgacggcacccgccacaacaccggatttgccgctctggattacctggccgaccgctggggtgtcagcgtgagcaaatccaagtggcaggggatgtacggcgtcgcggaggtggacggccacaaggtcgttctgctcaaacccctgacctatatgaacctttcgggccagagcatcgcgcccgccgcgaacttctacaagatcaagcccgaccatgtcatcgttctgtgcgacgacattgcccagaaacctggccatgtccgcatccggccctccggttcggcgggcgggcataacggcctcaagagtatcattgcttccctgggcggggacggcttttaccgggtccgcatcggggtgggggagaagcccaacccccagtatgacctggcggcctgggttctgggcaagttcccagcggaggacgccaaagcggtggccgaccgtctgcccgacattgagggcgcctgccgcctgctgatggacggcaaactggcggaagcccagaacaaatacaatcactgactctttcccggttgggaaaacagccgggcgattgctttctcataccgccggatgaccagcgcgtaaagcagatagcaggccacgcagcagccgacagtcaccgccagttgcattccccagcgcatccagccggaagcgtcggcggaaagaatggggagcagtcccaggagcatgggatgggcaagatagaggaaaaagctccctgtactgagaaagtgcagtgcccctgtgacccgggacgaaagccgttcccggccgggccattgtatggccagaagaaggagcacggtgaaggcaccctcgtatgccatgcgctcaaagccaaacacagcaggcagcagcaggcagaaaacgccgtagaaaagctgatacccttcccgcacggcccaatataaggtcgtgccgaacaaaaaggcgtacaggaccatcagcggcatcttagcgctgaattcggaaatctggtccacactgccctggggcagtgtggaaagcgatgcttcgatccggctccccaaagttcctttgccagcgatgcacagcaacagcagtataaagctggcggcaaaccggctgcggaagcgttggacaagacggtgtatccagggggccgccagatagaaaaaggcgaacgcactcatggtccacaggacgttgcggttgttccagagcatccagtcgtcgctgggaatccacatctgcaggaaaaaaacataccgcagccatcttggtccgcagacgccctgcagggaaaaaatctcggctgcggggacccctgtggccagggcaaaaaccatgtcgtagagatagcggacagccagagtcaaccagtacagcggcagaatgcgcagggcccgccgccggtaataggcggaaatatcggaagttcgttccagggaaatctgtgtcagatagccgctcagaataaagaacagaatcacgccgttggctccgaaagcggtttgatcttccagaccggtgagctgtccggtatgtacggtcagcaccatcagggcggccagaatgcgcagaacatccagcgcgggctgcatggtacgggaagaggtcggcttcatgattcggattcccccttgtagacggatggacggcggccgggtgtgccggctgtcgggctgcaatatcgatttcagtataagcgatggaggacaccagcgcaagcaggcaggaacctatgtttcacaacctatttttacagacaagtgaatatcagcgtctggccggcgcgctggggactcccggtgcggcggccctcttcgggctgcccggggcaggccgcgcccagatgtacgcggctttgcagaaagaactgggccgcccgctgtgcatcgtcacccccggcgaggccgaagccacccgctttgccgccgacctgaacacgctgggcgttgcggcggcggtgttcccggcccgggactacgtcctgcggcccattgagagcaccgcccgggaatacgaataccgccgcctgggcgtgctgggcgatattgtgggcgggcggttggccgcggtctgcgtcccctgcgagggcctgacccagtacaccatgccccggcaggaattctgcgccaacacccgcaccatccgcccgggggatctgctgccccgggacgatttggcagccgccctgtatgcggcgggctacacccggcgggaccgggtggacggtcccggccagttttcggtgcgcggcgacatcgtggatatcttcgccccggatatgaaggcccctgcccgtatcgagtactgggacgacgagatcgacagcctgcacagctttgaccttgccacccagcgccgggaggacgagctggaaaagctctacctcagccctgcgcgggaggtcctgttcggcgcgcctgccgacgctgccgccctgctgcggggggcgctgtcccatcgccgcggcaaaaagaaaaccgccatggccgcctgcatggagcaggacctggccatgctggacggcggcgctctgcccgaggccatggacaagtatctgggtatccgttacccggagccggcgaccctgctggactactttgatgagcccatcctgattttggaggagccggcctccctccacgaagccgagcgggccaatcagttccgccgggaggaggaagccaaaagcctgtacgaggacggcgtcctctgcgacgggctggatgtgctctacgccgagcctgcctggctctgggcgcagacggggaactatcccaccctctgtgcggagaattttgcccgcagtatgccggacatccggctgaaggagatcgtcaacgccccggcccacaccctgcccgcctggggcggggaggtggcctccctggcggacgacgacctggcgccgctttgccgtcagggctatgcggtcacggtgctggccggcaccgagcgtgccgccaaaggcctggcccgggacctgcgggaccgtggcctcaataccaccgaatcccccgacgtggaccctgtgccgggtatggtgcaggtgctgccgggacatctttcctccggctgcgagtatccctttgccaaatatgcaatcataacggggcgggcgttcggggaatcgtcggctgccaaacagaaaaaagcgcgcaagagccgggatgctcttgccagcctgaccgacatcacccccggtgatctggtggtccaccagaaccacggcatcggccgctatgcgggcatccgccgcatggaggtgcagggcgtcaccaaggactatctgcgcatcgagtacgacaaaaaagacgtgctctatgtgccggtcacccagctggacctcctctcccgctacaccgcccccggcgacagtgagaaagtcaaactcagccgtctgggcggcgccgagtggaccaagacccgcaaacgggtccgggctgccaccgagcagatggccaaggaactcattgagctgtatgcccgccgccgtcaggccaagggctatgccttcccgcctgacgacacctggcagacggattttgaacagcgctttgcctacgaagagactcccgaccagctgacctgcgccgccgacatcaagcacgacatggaacagcaatggcccatggatcgcctgctctgcggcgacgtgggcgtgggcaagaccgaggtcgccctgcgggcggcgttcaagtgcgtcatgggcggcaaacagtgtgccatcctggcccccaccaccattctggcctggcagcacttcaatacggccatctcccgcatggaggcgttccccatccgcatcggtctgctcagccgttaccgcagcgccaaggagcagaaggagaccatccgcggcctgaaagacggcacggtggatatcgtggtgggcacccaccgcctgctttccagcgacgtcaagttcaaggacctgggccttgtcatcattgacgaggaacagcgcttcggcgtcaagcacaaggaaaaactcaaggagaacttcatcggcgtggatatgctgaccctgtcggccacgcccattccccgcaccctcaatatggccctgtccggcatccgggatatgtccaccatcgagatgccgcccaccgagcgccgcccggtggagacctacgtcatggaatacgacgacggcatcgtgggggaggccatcaagaaggaactggcccgtggcggtcaggtctactacctgcacaaccgcgtcgagaccatcgaggagtgtgctgcccacgtgggcaagctggcccccggcgcccgggtgggcattgcccacggcaagatgaccgaggagcagatctcctcggtgtggcagcagctgctggacgccgagatcgacgtgctggtctgcaccaccctgatcgagacgggcgtcgacgtgcgcaactgcaacaccttgattattgaaaacgccgaccgcatgggcctgtcccagctttaccagatccgcgggcgggtgggacgttccagccgcaaggcctacgcctatttcaccttccagcgggataaggtgctgacggagatcgcgtccaagcgtctgtccgccatccgggagttcacggccttcggttcggggttccgtattgccatgcgggacttgcagatccgcggcgcgggcaatctgctgggccacagccagcacggccacatggaggccgtgggctatgaactgtatgtcaagatgctgggccaggccattgccacggccaagggcgaaccgcccgccccggacaagagcgactgcctgatcgacattacggcggacgcctacctgcccgagcgctatatccccgacgcggcaggccgtatcgaggcctacaagcgcattgcggccatccagacggcggacgacgccaccgatgtgctggatgaactcattgaccgttacggtgacccgccccgcagtgtgcagggcctggtggacatctccctcatccgtgtcacggcggcccgtgcgggcgtggccgagatcgcccagaaaggcgacaagctgctgctttattccgatgtcatcggcccccggcagctgggcgcgctgtccgagaatatgcccggccgggtgctgtacagcggcctgggacggccctgcatttccctgcacgtggcaaagggggaggaccccgtggtcattctgcgggacgcggtggccctgctgccgggaggaaaggcggcacaggggtaaaggggcggttctgccacacaatttacacaatcccgccgaggcgtccggcttgaaatgccccggcaaaaaagctataatggctttatatcatgcgttttcgcatcgaaagctatataaaggagagaacccacatccatgaagaagaaattcatcagcctgggtctggcgctggccatgctgctcggcgtcgcgggctgtaacatcaccaccccggccaccgtcggcagcatcggcggcgttgagatcccggccggcatttacctgctggcacagtacaatgcctacagcaccgctgcttccaatgccgaccttgccaccggtgagacttccaacgatgtctccgccgtgctcaaggccgacgtcaccggcaccatcggcgacgaggaagtcaccaccgacggcgccgactacatctcccgcctgaccctgcgcaccattgaatactacgccgcagtggaagccaagttcgacgagctgggcgctaccctggaggacgccgccaccgccgaggctgccgagagtgccgattccatgtgggagtccaacggcgatctgtacgaggccaacggcatttccaaggataccctggagaagtacctcctcaacgcccagaaagcccaggtctgcatggaaatgatctacggcgaaaacggccagcagcctgtgaccgatgcggagtacgagaccttcctgcaggaagaatgccgctacatcgacagcgtctacctgcccctggtggattacagcacttacagctttgcttccagcgaacaggcagcggccatcgatgccattgccgaccagtgcctgagtgatctgcaggccaacgcatccgcggatgtggattctaccgatgcttactcctccatgtacatggctgcatccgaatacctgccccaggtcatggaagtgatggggtccaccgacttcgatgcttcccagtcggtctactacattggttctcagctgtacaccccctccaacctgtccagctatgacgacggcgagggcggcaatctgctgaccgacgctgtggacgaggccggttacggcaactgggtcaaggtcgacctgggcactgccatcgcgctggtccgcaaggtcgagcctctggaacagggcagcctgtccacctataaagagacttacgatctgctgagcgaaatgaagagcgacgccttcatggacgaactgtacgcggaaggcgcagctatggagcatcagctggacgagggagccatgaacacctacaaggcgtccaacatcaagcgcgaagtctgaacttcgccaggatctgaatgacaaaatgcggagccgcaacaagcctgcggctgccgccgcggacccgggcggtccgcggcaaaggccggggcatctgccccggcctttgcttgtcttactggatgtgccattttaattgggaagagggacggctgcagccaccccgaaaaaaggagggaaccctatgaaaccgatccgatcccgtttgctcagcctggtgctggcggtctgccttgttctggcagtggcagcctcggtcccggcgcagaccgtgtatgcggtgcagcccgccggaagcgtgctggaaaccttgatggatgtaccgatcctggggaatattcttcgcttttttgcaggggaggatgagcaggaaccggccacctcggaggatgcccagacgtcggaggacgccgccaccgccgaggatgccgcaacctctgaaaacgcagccacctccgaggacgccaccccggaggatgccgaccgcacccagtctgtgaccgcggaaagctggcccgacagctggatgatcggcgcggtctctcccaagggaaaatatccggcgggcgatctgcaggccgaacgccagctgacggtgagcagcccgctgtgggcctcggtcagcgtggggaacagcgcggtgcaggtgtccaaccgggaggagaccaacttcggtgacctggtggcggatgccatgtcctacgcagcggcgtccagtacggtctggcagcagaataccgagctgtacggcctgccgctggtctctctggtggacggtgcgtccttcctcacgacggtccccgccggtacgacgctggacgaaagcaacctgggcgagtatctggaggatgagaccctctctctcgtggtcattacgggggacaagctcaacgatattctgaacatggctctggccgggacatcttccgcccagaatgagaattacggcgccttcttccaggtcagcggcctgcgctttacctaccagaccaccgacggcgacttccaggtccgggaagcctggctggccggtgaaaacggcgagacccccgtggacctgcacggccagacgacccgcctggcgctggtcctgccttccgacctgctggaggcatgcggtctggataccgaagaatacaccgactattttgctcccgcggatacccaggccgcggcgctgggagaaaacggcgcggaggagacctggcagcctgcagaggatcttttgaccctgcacggcgcgttgctggatctgcccaaaacctgtgacgccgggaccctggccctgctgctgggacggcagggaacgtccgggcgcattctgccggtcacggcggggaactataccgtgaccctccagaccgacggcaaagtcacaaactgcgttgtggtggtctatgtggatggggtgcagatgcgcggcaccctggacggcaacggcctgctgaccattgagggcctgtcagccggttcccataccatccgcctggcagagggcggaacggcctggtatgtcagcagcgtcaccgcgcttggcagccagggcggcgtgcagatctcggtgggagcgctgccggaaggcaccgtgaccgagccgctgcccacgcccaccccggcgcccactgcccctcccacacagaccgtgacggcggaaggggagacggagaccgacacgacgcccacgcctacccccaccccgacgcctgccgtgagccagacggcaacccccactcctgcgccggcccgcacagccgcaccggtggatgaccccaccgcagggaccatcatcggggtgacgcctgcgccgaccgtgaccccgaccccgacgccctcggctacgccggaggccaccctctctccggaagagcagcagaaagcggaggaagcgcaggaaatgtccagccgtctgccgctgtatgtgggcatcggcgtgctggcggcgggcgcggccgtggtggcctttgtgctgatccgccgccgcatggaggaaaagccccgcagccgcagaaagtacaagtccaacagacactgaccgcggggagtagatctgccccggcataacaggaacaaaaagggacgctgttttcagacagcgtcccttttcctatggatggattcttgccgttttgttccggcaggcgggctggccgccggtttcaggttcggtcggcacccgggcggaccggcaggctgaccgtgatggacagaacggaaccgtcggaactttccgctcggatcttgcctttatgcgcagacacgatacttcgtgcaatggaaagccccagcccgtatccgccggtttggctgttgcgggaagcgtcggtgcggtaaaagcggtcaaacagatgggaaagctgttcccgctgcaccggctcggcggtggtgttggtcacagtcaaaagcagactgcgtccctgtttttccaggctcagggagatgtgaccgtccggcggggagtatttgagggcgttatccagcaggatggagaccagctgccgcatggccttttcgtcaccggtaaatgccagcatgggctggatgtcggacacaaaatcttttccctgacttttggcaggaccggcaaaggattgtgccatctcctccaccacgtcggagagaggaaagtcgatgggctgcaggcggggctgttcctcctccatgcgggacagatagatcagatcgttggtcagaccggtcaggcgctgagcctggcggcggatgtcggtcagccactggttttccccgcattccatctcggccagatcagcgtccgcactgatgatggtcatgggggtcttgagttcgtggccggcatcggtgataaatcgcttttgcttttcatagctttcggccatgggacggacgatgcgctcggacagaatcaacagcagggccagcaccgcggccagtcccgcggtggccagcaggacgcttgtcaccagcgtggcccggaaggaggaaaggctccttccgcagtccagaaagatcacccgggtgccggtatcttccgtacagaccagatagcggtagtcctcctgaaagccctgcacttttccggcggcgatgatggctttcgcccaggcggcggcctcctcgtcgtcaatggctgcgatctggtcggtatcggtctgcaatacctgcccgtctgcatccagcaataccgagaaaaagcgggactcgtaaggcgtctcgggagaaaattcccttgcccccgggaactctttccggtcggccggggcgggaaggtccgtcttttccccctgcccgtcccgcagattgggaaaaacgccgtcgtttgccgccagtaccgccaggacgccgtcggcatcggtcaccgctttatggtagctcatcagattgacgccgcccaggatcaccagcagaacaatggccagcgacgccatgcaggcggcgatcagtttgcggcggagacgtttgatcatgggcgttcctccagacaataaccagcgttgcgggcggcgcagatttgaatgttggcctgcagggccgccagctttttgcgcaggtaggaaatgtagacccacacgacattgagttccacctcgctgtcatagccccagatccgttccagaaaccgctcggtagggatcaggctgcggggattgcgcagcagaagttccatcatctgatattccttgtttgccagccggaagctgcccgtgggggaggaaagctcaaacgtggtctgatccaatgtgatgttgcccagggtcagccggctggacatctggcccccggcctggcttcgggtcatggcccggatgcgcgccatgagttcggcggtggagaaaggtttggtcaggtaatcgttggcgccggtgtccagccctgcgaccttgtcctccacctccgcccgggcggtgagcatcaaaaccgggatggcgttgccctgctgccgcagccggcgcagcacctccagcccgtccatcttcggcatcatgatatccaggatcagggcgtcatagttgcccgcttccagatatgccagggcatcctcgccgttatagaccgcgtcggcggagtagttgttcttttccagcagagcgaccacggcccgcgacagggacttttcatcctcggccagcaaaatacgcattccaatgccacctcctgtctgtaatggtgccagcataccgcaaagtccttaattctaattaaaaggataccaccggtcgccaaaaatgtcagcaaaatatcattttgatttttaagttcagttatggttggcgctttacacttgcgttaccatctccgaacaaggaggcagatcgccgtgaaaaatcaaatggtttttgaacgccatgaattgaaatatctcatcgaccgcaggcggcaggaggcaatcctggcggcgatggaaccgtatatggtgccggacgagtacagccacagctccatccgcaacctgtatctggatacgccggactaccgcctgatccgccgcagtctggaaaagccggtctataaagaaaagatccgggtgcgcagttacggccgggcggacgccgatgcaccggtgttcgttgagctgaaaaagaagtaccgctcggtggtatataagcggcgcatctccatgccccagcaggaggcgctggcctgtatccgggacggccatccctggccccaatgccagatcggccgggaactggcctatgccgccgggttttacaccgaccttcagcctgttgtgtttttgtcctacgagcgggattcctaccgcggcaggcagcaagaggaattccgcgtcacctttgacagtgccatccgttaccgggaagaccggctgactctggactcggatacccaggggattcctgtcctgccggagaacatggttctgatggagctgaaagccgccggggccgtcccgctgtggatgagccggatcttatcggggctggggatctatcagacttccttttccaagtacggcaccgtctatcaaacaattttttgtgagcagatgaaaggaaaaagacagtatgcttgaatcgatttttcgcgggatctttgacacgaccctgaccgagaccattgccccggcggattttctccgctgtgtgggggtatcgctggcgctgggactgctgctgtgcgccatgacgctgtggcgctcccattacagccgcagctttgccgttaccctggcgatcctgcccgcggtggtctgtgtggtcattatgatggtcaacggcaatgtggggaccggcgtggcagtggcaggcaccttcaatctggtgcggttccgctcggcacccggctccgcccgggagatcggcgcgatctttgtggccatgggggcggggctgatcaccggaatgggctatctgggatacggcgtgctgtttacgctggttttgggcgcggccatgatggtgtataatgtgttgagccagaccctgaacagcgagacgcgctaccgtacgctgcacatcaccatcccggaggacctggactatgcgggcgtgtttgagcccatcctgtccgagtacgcccgcagctataccctgacccaggtcaagaccaccaacatgggcagccttttcaagctgacctatgacgttgccctcaagcgccccaaccaggaaaagcgactgatcgaccgcctgcgccagcgcaacggaaatctggaaatctcgctgtgccaccgggaaacggtggcggaaagcctgtaaaggaggggaaccttcaaaatgaaacgaaccatgttcagagcggcgatgccgctgctgtgtatgctgacggccctgaacggctgtacggcgcaggggagcagcgacagcgtcagcctttccacggcagaaaccgcggcagacaccgaccagaccaccgccgcatccacaacggtcattgacgtggacggagcgttcagcgaccgcgatctggacggcagctatgacgaaagcacggcggtgcgcattacgctgtcaggagacagcgcgtcctgcgacgccgggaatgtgtccatccaggggtcacagatcatcatccaggaggaaggagtctacctggtcacggggacccttaccgacggacagatcgtggtgaacgcaggagacaccgacaaggtccagatcgttctggacggcgcccagatcaccagcagtacctccgccgccatctatgcgctggaggcggataaagtctttgtcacgctggccgacggcagccagaacacgctgaccaacggcggggaatatatcgccattgacgacaacaacatcgacgccgtgatttttgccaagaccgatctgaccctgaacggcaccggctcccttaccattgaggcggcggccggacacggggtggtgtccaaggacgacctggtcatcacccagggcagctataccgtgaccgctgccagccacgggctttcgggcaaggacagcgttgccattgccggcggcatgttcaacatcacatctggcaaggacggcatccattccgaaaacgccgacgacctgtctctgggaacgctgtatattgcggacggtgactttaccattcacgcgcagggagacgctatcagtgccgaaagcaccctgcgcatcgacggcggcagctttgacctgactaccggggaaggcagcgcggcggtggaaatgaccaccgatctgagcgggttcaccggtggacggggcgccatgcccggagaaatggcagccgataccacatcggataccaccgcggataccggggaagagacctccgacagccgcaaaggcatcaaggcggagggcagcttcactctgctgggcggcagctatacggcggataccgaggatgactgcttccatgcgggcggcgatctgaccattgaaggcggaaccttccagctttccagcggtgacgacgccatccactcggacagcaacctggtcatcagggacggtaccttcgatattccttattgctatgagggaatagaaggcctcaccatcaccatcgacgacggcagcttcaacatcacctctcaggacgacggcctgaacgctgcgggcggagcggacagctccggtttcggcggccggggcggcgacagctttacggcacagaccggcgttgacatcaccatcaacggaggcagtttcgtcgttgtatcccagggcgactgcattgactccaacgggacgatcaccatcaacggcggtacgctggacctgacctgcaacggaaacggaaatacggcgctggatgccgaaggaacctacaccaacaacggcggcgatgtgaccaccaatgacggctcggagaacagcctcggccagatgggaggcggccagatgggcggcggccaaatggggggcaaacagggcggcggacgtcagatggacggggaactgcccggcggccagcttccggacggtgcgcagcctcccgatggcacagaacccggtacggaagcacaaacatcctctgaaacgtaaaacaaaaacgccccggtgtacttttgtacaccggggcgttctctctgtggtttgccgggggatgcgttcaaattatcagcgcccgtgggtggtggtgaactggaccgccatacccacaaggcccagcaccagggcgcagaccagccgaacattgccgcccggcagaggcaggcccagcagggccaggctggacagaatgctgcttgctcccgaaagtcccgtcacaatgatgagcaccggccgcacgaactgcagcgccaggacaccgatggcgataaaggccgccagcaggatgaccagttccagccaccagatgagagcgaactgttccagcagggaagagacgaacagcgcgccgcaggccccgcacagcacaaagatgcccgcatcgtacagccaggaacacatcagggccagcagtaccgcaatgaccagggcaaggagcagggcggtggagggcgccatgtagcgcacggcgatgttgtgggtgatggtgtagcccagcagcgcgcccgccagcatgatgcccgccttgcgcaggcggtaccccataaagcagatcagcaccgccaccaccagcgagatgaccgcggagggaatgttgccgatcaatgtcgtaagatccataacagaaaagacctcccgtaaaacagtcagaccccgcgcacggcaaaccgggcgggggagaatatgcccattttagcacggcgggcgctgccttgcaacaaaaacggcggcacgacaggttgccgtgccgccgaaaacggttgctatgaaagaacggatgctcagtccgccttgcggaagatccgcggagcagctttgtacagcagcagcgcgcccaccaccgtcaggatggtttcgggcagcatatagctgaagttgtaggcaaagctgtagaaccagcacagggcgtcctcgcccaggttggaggtgaaccaggcggcccagctgaagttgttcagccattcaagggcatagtcgtaatctttccatacgatgtagccggagaagaagctgcacaggaaacgcagcaggcagaccatgaccgtgcccaccgcaacaccggcagcgctggtcttgagggcgcgggccggcaggcaggccaggcccagggcggtgaacgccagcaggtagtccagcagcacgcagccgatctgggcggtgagcgtctggcagtaagccagattgttgatgcccatgacaaactggatcaggctgaaaatgaaagcagtgcccaagccccacttgggaccgttgcgcaggctcatgagaatgatgggcagcatggacagcagggtgacggaaccgccatgggtccaggccagcgggaactccactttggacagaacgctagccagggcgatcatcagggcggcttccaccagggtacgggtcttggaataggtggcagacatgaaaaacgctccttcaacgatacatagtacataaaaacaaagaaaaacgcgcctgcataaaaacatgcaggcgcgcaaagtcgtctatctggcaaagataccgcaaacttcctacgccggcattacccggatcaggttcaaggcgacctggggctgcaatttgccccaatctcagccgagaagaactctcagcgcccctgttcttatgtccaaaaacagtatagtcattttgtgcgaaatgtcaagcactgtccgcatttattcccaggtcagcaccgcggcgcaaaaaccgggcaggtccagggtcagccgtccgtcctccacccataccggcggcagcggccgggccgccccggaagcaaacacctcccgcatccggccccgccacccgcgttcccccaggtccagcgtcacgccggggcggtcccagggctccagatggaacaggcacagcagcatctccccgtgggcagaacgcagccacgcccgcaccggcccgttggccacgatgtgccaccgggcgctgccgtcctgacagaacagggcagggtgcgcggcgtaaaactgccccagcgccccgcaataatcggccaatgcccggtggtcctctccggccagcaagtgccagtccggctcgcggccgggatcaaagggggactgctgcccgaactcgcagccggaaaaaagcagttgtttcccgggcagggcggcctggtacagcaaaaacagccgtgcctgggcaaactgctggtccgggctgccgtacatgcggggcaaaagcgcacctcccggcagggcgcagtcgtcgtggctgaatgcctggatgcagcgtccgtcctccggggccaggataggacccttgccccgggtgccgaagggctgagacaaagttccggccagctcgcgcaggggagcggcctcccatacatagtcaaagcccagcccgccggcttctatgggagcggcggaggggcatccgggcaggctgtcctccgcaatcagtaccaccccggggaaccgggcgtggagggtggacgtgagcagccggaaaaaggaggcggcctccccgccgggccagcgccgcaaagcccagcccaccgcgtccacccgcaggccgtcgcagccgtagtcgcctacccagcggcaggccgcgctcagcagaaagctgcgcacggggccgctggccaggtcaaaggcaaggctgccccagtcgcttggcccggcctcgtacagcggggaaccgtcgaaccagacaagggcgccgtcgtccggggcaaaatgggcgggaacaaagtctgccagcacccccaggcccgcctcatggcagcgctccaccagatgcacaaagcgctccgcaccgccaaaacgggcggagggggcaaagtaccccgtcagctgatacccccagctgccgtcaaagggatattcggcagggggcatcagttcgatgtgggtaaagccctgcccggtaacacaggggatcagccggtcgcccagggcgtcaaagtcataatagcggccgtcccagtgccgctgccagctgcccgcgtggagctcataaatgcgcaggggactgtccgggccggccgggcggctccatggtgggggagggcagggcaggtgcatcagccgggccgccgccacggcggaaggctcatacccggcggcaaaggggtcggtgcgcagccgccagcagccgtcggcacagagaatgttgtatttgtacagctggccttcccgggcgtcgggagccttgccccgccagagcccgtcctcgcagcgggacagttcagcggcagagtacaggtcccagccgttccagtcgcccagcacctgcacccggcgggcattgggggcgtagacacagaacagccagccctgcccgctgtccgagggcgccggacacagcagccggggcgcgccggtgctgacgccgttataaaaatccgcgatatccggccgcattgcccacacctcccccatgacagaatctctttgtatgatagcacatctgtacaaaaaacgcgagactgccttgtgcagaatctacgctcccgtgccctctcagaccgttgcgccgggaggaaatctcaggtatactattcacaaggttgcctatgtgcaactgccgggaggtgtggcgatgcaaaggatgctgcaatattgccgcaggcattgggctgcggtgggcctgctgctggccggtggggcggggctttgtctgttctgggcggcacggggccgccgggactggatggatgcctggctgcagtatgtttccatgcctttcaaacgggcggtgtcggcgctggtggacccgctgcctttcagcgtgtgcgaggcttcggtcacggtgctgatcctgtttgtgctgttcatgatcggccgcacggtgtggctggcggtgtgccggagcagattccgtttcggcgtgctggcgctgcatttctgcacggcgtcggtctggatctatctgctggtgtgcgctttctgggggacccagtattacggcaccacctttgccgaaaaagccggcatgaccggcggcgcggtggaggtggaggacctggccgcggtggccgaatattttgcccggcaggccaacgccacggcggacacggtcccgcgggatgaggacggcgtgtttgccgtcagcgtggaggaaatcctggccgacagtgccggagtatatgacgctgcagcggcggaatatccctgcctagacggtccggaacgcagtgcaaagcctgccttttactccaagctgatgagcgcggcgggctttaccgggtatctttgcccgttgttcggggagagcaccgtcaacgtggattgcccggcggtgtttctgccggtgaccatcgcccacgaatttgcccaccagcggggcgttgccgcggaacaggaagccaatttctgcggcatttatgcttcggtgaccagcggcaaggcggcgtatgtctactccgggtggctgtacggttatgtccatctgttcaatgccctgtactcggcggacaccgagcgggcaatggagacctggcagacgctttgcccagaggcccgggcggacatcgcctgcaatgactcctactgggcatcctgggaaggcccggtggagaccctgggagagacggtctacgagggctttctgcaaagctatgaccaggagctgggaatgcgcagctacggggcctgtgtggaccttctggtggaaaaatatctgcctctggccggctgaagcaaaaaagtttttccggcgccttgtggatgccggtggcggacactacaaaatgtagatggaaccgtcgatacagcgataagatttacaaatgtttccaggccgtgccccttgaaccccgcaaaaacagggtatataatgggtactgtattttgggatacgtatgaggttaaggtttgccgcgccgacagcgcggaaaagaacaggagcaatcaaacggaatgaaaaaacgtgaagtcatgaaatatttctccggcagtacgttccagcgactgccgctgtataaagtggccatgggcggcgtggctgttctgctgagcgccagcattggtgtcagcgttatggcgtcggcatttttgagtgccgcgccccaggagatgcctaccaccgcccccacggtggagacggcctccacccccacgccgacccccagtcccacgcccacacccatccaggatgtgctgtgtgacgtttcggtcatccagcaggacatcggcatccagctctatacgctggatacgctggccaatgtttcggagggcgaagcggacggcgacaccgataccgatgcggcaaaggacaccgacaactccggcaccgacacgcaggccaaggattccgatacggatacccagtcggaagataccgtcaagatcccgctgaccggtgtcgagatggatgtcaccgtcactgacgctgagggcaatgccaccacctaccccgtggacaccgagtccggcaccatgctggccgaaaatgtggaaccgggcgactacgtggtcagcttccccgacgtggagggctacaacctgcccgatgacgtggaagtgaccgttgaggaaaaggtcgaatacaaagccgacgtggaagcggtcaaggataagatcgtccagtcgtcggatgttgtggaaagccaggaagactccagctattccggttctgtggtccaggaagagatcgccgacaccgtcgcttacgccgagtccagccagaaagagatctcccgcgtcaccgtctacaccgccaagctcagctcggacggccatctgatgatgaaggacggctccacttcggcgtacctgcctgtctacgataccaacaccaaggatctggtgggcgccaagcgtgacagctccgccacctactccgccgcgggcgcttctttccaggggctttccctgatgagcctttccgcgttgacgacccgtcacggcaccaatgagccggatgcgtcctccgatgtgcaggtcctggatgagagcagcactcccaccaccgagcctgaagtgaccgctaccccgacccccgaagtgacccccactcccgcgccggaggtcaccccgacgccgactcccacggccacgcccacccccaccccgacggcaacgccgaccccgacgccgacggctacccccactcctacccccaccccgacgccgactcccacgcccacccagaaacccagcgatcccacggcgggctggcccaccgagatcaaggcatcggagctgtccggctacggctttgatatttcttccagcgagcgcattacatatgagtataccggctggcagaacatcgacggcaagaactactactacgatcccgcgacccatcagccggtcatcggcacccaggtcattcagggcaatgtctacaccttcggcgcggacggcgttctgaaccagacggcccgcggcatcgacgtttccaagtatcagggcaacattgactggaacgcagtggctgcggacggcatcacctttgccatcatccgcgtgggctaccgcggttacggcagcggcgctctggtcgaggactccaccttccgccgcaacatccagggcgctaccgccgccggtctgaaggttggcgtttacttctacagccaggccatcaacgaggccgaagctgtggaggaagccagcatggtcctgagcctgtgcagcggctacagcctgcctctgggcgtctactacgacaccgaaaaggtcgccggtgataccggccgtgcagacggcatctcggcagcccagcgcaccgcctgcgccgtggccttctgcgagaccatccgcaatgcgggctactccgccggtgtttactcctacgcaagctggttctacaactccctgaactacgcaaacatcagcaagtaccgcatctggatcgcccagtaccgtgattcgctggacttcaagtaccgctacgatatctggcagtacaccagcaccggcaaggtcaacggcgttcccggcaacgtggatatgaacgtcggctgatcgcccgttcctcataaccaataaaaagccctcacgcatgtgaaatgcgtgagggctttttgtatgccgtatttgatgggcaggcgccggttttccggtgctgtgccgtatccggtcagcagcagggcgtctgcaatttggcggaggcaccgccgcgggtctggccgctgccgcggatgatgtatttgtaggtgcacagctcggccaggcccatggggccgcgggcgtggagcttctgggtggaaatccccatctcgcagcccaggccgaactctccgccgtcggtaaagcgggtggaggcgttgacatagaccgcggcactgtccacgcaggcggtaaagcgtgccgccgcggcgtcgtccgccgtcacaatggcgtcactgtggtgggtggagtgggcagcaatgtgggcgatggcgtcgtccaggctgtccaccacgcccacagccagaatgtagttcaaaaactcagtgtcaaagtcgctgtccgaagcgggcgtgccgggaatgatggccgcggcgcgggcatccagccgcagctccacgggggtcaggtcctcggcggcgcgggcatccaccagggctgcccgcagcatgggcaggaacttgtccgccacatccttgtggaccaggcagacttcctcggcgttgcagacgctgggacgggaggtcttggcgttttcaatgatgcgcaccgccatttccaggtcggcggcagcatccacgtagacatggcagatgccggtaccggtctggatgcaggggacggttgcgttgcgcacgcaggcggagatcagccccgcaccgccccgggggatcagcaggtccaccagcccgtccgcggtcatcagctcgttggcggaggcgtgggtggtgtcctcaatcaggctgactgccgtctcgggcaaacctacggccgcaagaccccggcgcagcgcagcgacaatggcgtggcagctctgccaggcgtcgcggccgcagcgcagcacgcaggcgctgcccgctttcaatgccagcgcggcagcgtcggaggtgacgttggggcggctttcgtagatgatggcgataacgcccatggggacggcccgcttttcaatgaccaggccgttggggcggacaatctgacgcagcagcgtacccaccggatcgggcagagcggcgacttcccgcatgcctttggccatgtcggtcaggcgcagcggggtcagggccaggcggtccagcatgacctcggacaccttgccccgggcggcttccaaatccttgcggttggcggccaggatctcatcggaggcggcggtcagggcggaggccatggcctccagcgcacggtttttcgtgtcggcgttggccagcgccaggggctgacgggccgcctgggctgcaagcaggatctcatgtgtcgtcatgggaaaatcctccttctttgtctgcaaaacgcatttggaaaattcggaatggttcggtatcctgtaaattcagtgctttttcttgcccaggaaacgggtgcccaccggtttgccctccacaatatcgtacagcagggcggggtaggagccgttggcaatgaccatgtccacccccgcacccgttgcaatgtgggcggcggtgagcttggtggccatgccgccggtgcccaggccgctgtgggtccctccggccagagcgtcgatctcgggggtgagttcctccaccagctcgatgcgtttggcctcgggatgagtgtgggggtcggcagtgtacagtccgtcaatgtcgctgagcaccaccagaaggtcagcccgggcgtatttggccaccagcgcgcccatggtgtcgttgtcgcccacggcgatctcttcggtggcgacgctgtcgttttcgttgatgatggggatggcccccagctgcagcaggcgatagacggtgttctgcaggttttccagccgggtcacccggtcaaagtcctcccgggtcaccagaatctgggcaacggtgtggttgtaggcggaaaacagccggtcgtaggtgtacatcagttcgcactggcccaccgatgcggcggcctgtttggtgggcatatccttgggccgggcaatctgcagtttgcccgcgcccatgccgatggctcccgacgagacgacgatgagctcatggcctgcatttttcaggtcgcttaaggttttgaccagctcctcggtgtggcggatgttcagccgcccgccctcgtgggccagagtgctggtgccgatcttgacaacgatacgcatgttactttcctcatccctctgcgcggggcatcagcctttgcccatctcgcgcgttttatcaaaggcggccagcaccgcatcggtcactgcgccgcggaaggcgtgctcttccagcacgcggacaccctggatggtggagcctcccgggctgcacaccgcatctttcagggcgccgggatgctggccgctttccaacacaaggcgggcgctgcccagcagcatctgggcggcgtacatctgggccttggcccggggcagacctgccgccacaccgccgtcggccaaagcctcgataaactggtaagcccaggcggggccgcatccggaaacacagctggccgcgtcgatcagatgttcctcaatggggtccagcagcccggcgggggccatggcggtcaggaattcctgtaaatcggcatcgctcacgtccagcgagcagtactgcaccatgccggcccccacagcagcgggggtgttgggcatgatgcggatgacagggtatttgcccccggccatctcccggatgcgggccatggtcagcccggcggccatggtgaccagcacaaagctgtccttccgttcggccagcaccggggcaatatccgccagcatgccgggcatcacctgaggcttgacgcccaaaaagataaaatgacagtccgacgccacccgcaggttgtccccggcagagcagcccagctcggcggccagggcctcggccttggcgggggtgcggttggccagcagaaccttttccgctccggctccgcggcacacggcccgcgccaccgcgccgcccatgttgccgcatccgataaaaccgtaacgcatatacaatccctctcagtcagtgctttgccccgtggggcaaaaaggtttgcatttatggtatcgcacgggggcggccttgtcaattcgcggggaacaaaaatcgcgggcgcgcgcaggaaaccggcggataccccgcggcgcggatgccgctggctgccgggacggtggatttttgccgccgacctgctataatggtatcgtgaatcaatggaaaaggccggggtgcggctgtcacccggcccgtcaggagaagcacggcggaaatacccgtgcacaaacagggaggaaagaactatgcagtatgttatgctgggcagtaccgggctgaaaatttcccgtctgggctttggcggcatccccatccagcgcatcgaccagccgggtacccgcgccatgctggaagctgcccataaggcgggcatcaattatatcgacactgcccggggctataccgtcagcgaggaatggatcggtcaggccctggaggaaagcggcctgcgggacgagttcgtgctggccagcaagtgccgcgccatcaccaaagaagagatggaacaggaacttgccgccagcctgaagaacctgcgcaccgaccacatcgagctttaccagttccataaccccagcccggcggactttgacaagatcctggctcccggcggcgccatggaggccctcaaggcggccaaggcggcgggcgtcgtggggcatatcggtgttacggcccatctgaccgccacctttgaaaaggctctggactgccccgatattgagacgatcatgttcccctataacgtcgtggagcagcagggcgcggacctgatcgcccgctgtgcggcatcgggccgcggctttatcgcaatgaagcccctggccggcggcgcgctggaggacggccgccttgcagtgcgctatgtgctgagcaaccccgacgtcaccgttgccatccccggcatggccgcgccggaggagctggaccagaacgttgccgctgccgccgatacctcccccctgacggaggaggaactggcccgctgcgacgaggtccgccgtgccctgggcacccagttctgccgccgctgcaactactgcgcgccctgcaccgtgggcatccagatccccaactgcttcctgttccatggctatctggaccgctacggcctggaaggctgggcacgggagcgctatgccacgctgagcgtcaaggccggtgcctgtgtggagtgcggcgcctgcgagacccgctgcccctatcagctgcccatccgtcagatgctcaaaaaggttgccgccgacttcggcgcgtgaccgctgactctccaaaaactgccgcccgccgggacgcagggatctcccttgcaccccggcgggcattttgtacgcggtacaatatttttcactctgcgcatccttgtgtttgcttcggcaaacgtgtataatctattctgtattggtttgtacatttttaagcgccggaacgctgtccgccctgcggaaggacccggtgcaatcgaggggaaaagaggaaccgcaaggtatgcgaacaaacgccgaactgcattatctggacaacgccgccaccaccatggtggacccggcggtggcggatgccatcgaccgcacggtgcgaaactgctgggccaacccgtccagcctgtatgagccggcgatcctggccgagcagcagctggcctccgcccggggcaaggtcgcccgcagcctgggctgcgccgcaaaggaaatttatttcaccgcctgcggcagcgagagcaacaacattgccatcctgggcgcggccatggcccgcagggcctggggaaacaaaatcgtagtcaccggctttgagcatcccagcgtccagcgccccatccgcgcattgaaagaccagggctttgaggtggtggaaattctgcccgaagccgacggccgcctgaacgtggaccgcctggtcgccgccgtggacaaaaacaccgtgctggcctgctgcatggccgtcaacaacgagacgggcgccttgcaggacatcaagcgctttgccgacggggtcaaggccaagaacagccggaccgccgtccatgtggacgcggtgcaggcgtggctgcgcatccccctcaacatgaagagcctttcccatgtggacaccctggcggtgtccggccacaaggtccacgcccccaagggcatcggcgcgctgtacctgtgcgagaaccagcgtcagcatctggtgccgccctacctgggcggacatcaggagcggggcatccgtcccggcaccgagaacctgccctatgtggtgggcctgggcgtggcggcagagcagggcgccaaaaagatcgccgccaacgccaaagcggcggctgtcctcaatgcccggctgcgggcgggtctggcggagctgcccggggtgaccatccactccccggaggacggcgtgccggaggtgctcaacttctccaccaactgcgtcaacagccagaccttcatcacctatctcagcgaccgcaagatctatgtgtcggggggcagcgcctgcgataagggcgaacccagccacaccctgcaggccatgggctgcgacgccgcggccatcgccacggccctgcgggtcagcttctgcgccgacaacgacgaagccgatgtggacgctctgctggctgcgctgcgcaccggcctggccgaactgcagcatatctgaacacaagagtaataaaagaaaaggtagttgccaattatgaaagagatcattctggcttaccagggcgaaatgaccctgaaaggcctcaaccgcggaacctttgaggctaagctgtccaaggccatccgcggccgtcttgccgacctgggggagttcaatatccgtcaggcccagagcaccgttttcattcagcccaagtcggacgacatcgacatggacgaggtgttccgccgcgtgtccaaggtgttcggcatcgtcaagctcagccgtgccgccgtctgcgacaaggactttgacagcatctgcgccaccgccgaggcctacctgggccagaccctgcggggcatcaagaccttcaaagtggaggccaagcgctcggacaagaccttccccatgaagagcccggaactttgccgggaactgggggccttcctgctgtccaaacacccctacctgcgggtggatgtgcacaatccccagctggagatcatggtggagatccgggacttcggcgcctatatccacggccccaaggtccccggcgcgggcggcctgcccgtggggaccagcggccgtgccctcaacctgctgtccggcggcatcgacagccccgtggcggcctggtgcatggcacgccggggcctggcgctgcatcacatccactttgcttcgccgccctataccagtctgcgtgccaagctcaaggtggtgtctctggcccggcttatcagtgagtataccggcaactgcgtgctgtttgtggtgccgtacaccaagccccaggagtatatccgggacaacgctcccgatgtgctgttcaccgtcctgatgcgccgcagcatgctgcgcattgccaagcgggtggcggacaccaccggcatggaggccctcatcaccggtgagagcctggcccaggtggccagccagacgctgcccgccctggcctgcaccgacgcggcccagagcctgccggtgctgcgtccctgcatcggcatggacaagactgagattattgcccggtcccgtgagatcggcacctttgagacttccatcgagccgtacgaggactgctgtaccatcttcaccccgccccatcccaagactcggccttccctggcggagatcgaagccgccgaggcggccatgcccgggctggaggaactggaggccgaagcagccgccaatgtggagaagatccccatccagatcggggacgaaccggaattttaacagggaggcgggcgtattttgaacgccgagatcatttgcgtaggcacggaactgctgctgggggacatcgtcaacaccaacgcgcagtttttgagccgggaactggccgagctgggcatcagcgtgctgcatcagcatgtcatcggggataacgtgggacgcctgcgggacctggtgagggaggcaaaggaccgcagtgagctgctggtcttttctggcggccttggccccaccgaggacgacctgaccaaggagacggtggccgaagcctttggcgatgccctgcgctttgacgaggaagaatggcagaagatcgtggatttctttgcccggaccaaccgccgtcccactcccaacaaccgtaaacaggccatggtgccggtgaaagggcataagctgcccaacgcccacggcactgcccccggcgcctggtttgaggacgaaaacggccattgtgccgtgctcatgcccggcgtcccccgggagatgaaagctatgtgggcggaacagatccgcccccggctggaagcggggcagaactgcaccatccgcagccggacgctgcgggtgctgggcggtgagagcagcatcgcctccaaggtgggggagctgttcgacagcgaaaaccccacggtggccatctactgcaaggtaggggagagtgagatccgagtcaccgcccgggaaccggacgaagcatcggcccaggccgcctgtgacgccgcggtggcccgcctgcgccagcgtctgggggacaacgcctacgacgtggacgtgccgggactggaatacaccgtggtccgcgccctgcgggagcaggggctccacgccgccacggcggaaagctgcaccggcggtcttattgccgaaaagctgaccaacgtccccggctctagcgaagtattcggttacggcttcgtcacctatgccgaggccgccaagaccgccctgctgggggtggacccggcgttgatccaacgtttcaacgtggtgtcgggacctgtggccgcggccatggccctgggagcacagcgggcgtccggtgccgagctggccgtgggcatcaccggcattgccggccccggcggagccctgcccggcaaaccggtgggaaccgtctacctggcgggggccgatgggcgcagcggcaaagtgtgggtcatgcgcctgacgctgggcggctaccgggagcgggccatcatccgcacccgcgccgcattgtatgctctggatcttttgcgccgcatggcgctggggctggaagtgccggatgcggtcctgaccgattccgactgtatgacctgccccgagaccctggatttttgatgaatacttcccgccgttccatgggggcggcggatacccgaacccaacccaagcaatgactttggaggtgttaccatggtgtcgacacaactgcgtattctgcgcgtgttcggcctgacctcggcggaggtcacgtccattctgcgcgcggcgcaggacgacggatgcccggggctgcgcctgctggagcgtgacggagaatttgccgtctgcgtgcaggcatcggcccccacacaggcaatggcggacgaacactgcgacaagtgggcgcaaaagctgcgcgcccgtttcggcgatgccttttacggcatgggggagatcagcctggcccaggccgcgctggacgccctggtcaaaaagcgccgcctgatcgttgcggcggacgagaccaccggacgcctgctgggcaatctgctgcagccgctggaccacagcgaggcggtgtttgatttcggcacccagacctatgccaacgcggcagcggcgcgcaggatcaccacgccccaggctctgatgaaaaaattccccggcgatgtgcttcaggccgccgccgggcgtgcccaggccgctctgcaggtgggccaggcggactacgccgccatgtatatgcccgccacggtgggacaggccccctttgtccttttgtgcgacaagcggggcgcagtggcctgtgccgtcaccccggaaatgagtgacgccgccatcggcaacaacatccttgacctggcgcgccgccgcgcgctgggactcaagttcagccaggggaccatccagttccgccccgggcatgagcggccgctgctgcttgtgtcccaggcggggcagcaaaagcccggagataccacccggttctccctgcggcggcgttcccggtccaataccggaacgaaagccgactttgaacccatgctggactttgataccgcccagatccccaaagccgccaaaatggctgccgccgctgcggtgggagcttcggcggcgcgtgcagcgtccaaggcggcgtccaaacgccccacgccggacaacgcagcctcggtggcggcgtccgcctgggctgcggcggagcaggactggaacgacaccgccgaccgggcagaacccgtcatggcgggcgcccggactgccgcccctaccgggaccatcacctttgagacgcccacggacattgatgcatcggtaccccgtccccgggcttcggcttcgtcccagactcccggcgacgagggggagacgccgctgaccttcaccactggcggcgcacagaatgccgcggcctaccgggcggcccgcgcgggccagacccgttccgccggcacggcgcgccctgctccgtctcaggccaccggcaccgtccagatccccaccggagtgaccggcgcgggtcaggatgcctcccgcacccgccagcattccattctggatgacgacattcccgattttaccgcctccctggacccggagaccatccgcgccgcccagcaggcggacgacgcccaggaaccccgcagcctggaggacttccaggccgcagccaaacagctttatgattccggttctcccgacgacgtgctggacccggccaaaaaccgcagcttggccgccattgagcgggcggagcgcaaacagcgccggaccatgaccgttgtgttcgtgctgttccttgtgctgattctggcgggggctgtggggctttggtactatttcagcaaccatatcggcagcaaaccgtcccccaagggctacggcaccgcccagtttgacgagagtgccggggaatacctggccaacgcccagcagaagaaagaaaacgtggtaggctacctggccttcccgggctgggagggacagctggtctacaccaccggggctacctccgaggacgccgccgaggcccgtccccagatccaggggaccagctatctgggctccgcatcggcttccaacacggtgctggatctggacagtgtttccatcgcggacatcaccagtctggagaccatgcgggacaacgccggcttcaccctgtatctggctgacggcacctaccgctacaaggtcatggccgtctactatcaggacccggcggaggacggcggctttgaccccgccggttacagcgacctgtcctcctattccgactacctgtcctttgtactgggggcgcatatgcgttctctgtacgacaccgacatcgacgtggaggacggctccaagttcctgacgctggtcgcagcgttggatgtggacggcatcaacctctgcgtgacgggccgcctcatcgaggaaggggagaacgcccagcttgcggcggctcccatcaaaatgcaggaaaatcccctcctgaccgccgcccagtatgcggcatccgggcaggagatgcccgacacggcatccctgctgcaggcccagctggaatggtacgccggtgtcagcaccatccgcacggcaacggcttccggtgaggaggacggcgccgagggaagcgagacggtggcccccaatcaggaaggccagccggggcaggacaccagttccgttgatctggggcagagcattgaggatctgcagaaccagaccgataacctgatcaccagcgcggacaagctgctggccggcctgaccgacaaggcaggcgaggcgggcgcttccgagtccgacctgaaccagggcgccgaaggttccctgcccgagcaggaagtccccattgacagtattacgggcggcaactcgggcggaagttccgacagcagttccagcagctccgacagcagcacggggggcgactcctcctcttcggacggcggttccagcagttccggcggggattcctccggctcgggcggcggtggctccaccgagggtgagaccatcaacgttaccatgaacggcacccagcagaccatggacctggtgacctgcctggccatgatcgcacagaacgagcttggccccaacgcccccgccgaagcctacaaggcacagtgcgtggcggcccattgctggatcttgagccagggcgggtatccgtcggttgcaggcaccacgcccggtgcggcagccaccgccgccgcccaggaggtcgcgcacgttctcattacatacaatggcaacgtctgctttaccccgtactttgcatcggcatccaagggcaccgcatcctccgccgatgtgtggggcggtgagcgcgcctggcttcaggccgtggaaagcccctatgacgagaccacggcgaccaactggcataccaacggcgccacttccggtacggcccgcttctcccgcgccacggtgcagcagcgcatcctggatgtgctgggcatcgatctgtccggggtggaccccaacaagtggttcaagattttgtctaccaaccagtacggctgggtcaccaagatgcagatcggcccggacgaaggccccaacaccacctgccgcggcacctggttccgcgagaccttgctcgcccgccagagcgtcgacggacgcagcctgcgcagtcagtgctttaccgtgacctacgattccaacaccgactgcttcatctttgatgtgtacggctacggtcacggctgcggcatgagccagtggggcgccatcggctatgcccagaacggctggagttatcaggacatcctgctccactactatcccggcaccacgctgaccacctactgatctcagcaagtcagacccataaacataagacggcctgccgccctgttcccggggcgtgcgggccgtctttttgctgtggaaaaccagaacaaaagaaattgtccgatctgtgaaaagtacctcattcgcccggcaaggcgactaaaactcccgccccccgcgtacaatagacaggacgatctgttgcgggaagggaggcggacgccatggcgcagatgtcaaagcgcagacctctgggagacggcgcccttgcggcagcaaggcggcgcattgcggaggctcccgcgctggatattccttttcttgtgattttgctgctgcttttgtgctacggcctgatcatgctgttttccgccgggtacgcggtggcactttaccggcggggggacgcctatacctatatccgtccccagctgctgtttgcggtgctgggggtcattgccatgtatgcggcgtccttcatcgattatcacatctggcacaagctggcctggccaatgatgggcgtttccctggtgcttttgaccatcgtgctgttcatgccggaatacaacggctgcaagcggtggatcgtgctgccgggactggggactctgcagcccagcgagatcgcaaagttttcggtggtgctggtgttttcccacatcatctccctcaaccatgaccggatgaaaaccttttccaccggggtgctgcccttcggcatcattctgggcgtggtcacggtgctcatgctgctggaaccccatctttcgggaacgctgctgattttgggcatcggggcggtgctgatgtttgtgggcggcaccggactcaagtggttcggcctggcgggtggagcggcggcgggagccatcgcggcggcggtggtgttgctacccgagctggtcccttatgccaccgaccgcctggaatcctggcagaacccttttgccgaccctctgggggagggccaccagaccatccagagcctgtacgccattgcgtcgggcgggctggccgggctgggcctgggaaacagccgccagaaatatctttatgttcccgagccgcagaacgactttatcttctccatcctgtgcgaggaactgggctttgtgggggcagcgctggtgattttattgttcctgctgcttttgctgcgggggctgtccatcgcggtgcgggccagggaccggttcggcgcactgctggtggtgggctttgtggtgcaggtcatcctgcaggcggtgctgaacattgccgtggtcaccaacaccatccccaataccggcatcagcctgccatttttctcgtcaggcggcaccagcctgatgatgctgctgggagagatgggcattgtgctgtcggtctcccgtcaggcagattagccgcggttgaagccggcatggttttcctttataataagagggcagcggagacccgcctgccctctttgcttttggggccgggccgccgcgagtttttccctgacggaaaaaaaggaggggcctgtatgcccattcccaaccggccgcgccatgctgccctgcaatttgcggggcgggcagtcctgtccgcggccattgccctggtgcttttgtttttgctgcttctgggggcttatgccctgccgggagagccggtgcgcgccaacattgaacggtcggtgccactgctccaggaggaaggcctttacccggaatttttcggcttcaagctgttccagatggacaactacaccgacaccatcatgctgtttgaggcggccagtgccgacgagacttcccccctgcaggccatgatgacctccaccgcctacaatgtggataactttgaaacactgcccgatgaccttgccgcctatctggacgcccgtgccgagggcaagaccggcgcggacaccgggctggaacccttctcctatgcccggtactggcacggctatctgatctggctgcggccgctgctgctgtttttgacttacggtcaggtgcgtgttgccaactatctgctgtttgcggcgctggcctgcgtgctgctgtggcagcttgggcgtgcctgcggatggcgggcggcaatctggtttgccgtcagtcagattttggtgtcctgcttttttgtaccccgtcagatacagttctttacctgctttgcagtggcctatgcggcctgtatctgggtgctggcccggccccgcaccccggattccctggctgtggggctggtggtgaccggtgtgtgcacggcgtttctggacctgctggtcacgcccatcctcacgctggggctgccgctggccgtctggctgctggaccgccgtgtccgggaggacacccccctgcgccgctgcggcgtggtctgcggcggagccctctgctggggggcagggtacgccctgtgctgggcatccaaatgggtgctggccagccttgtgaccgggcaggatatcatcggggatgccctgcatcaggcctccgtccgcacctccgccgatacctggcacggcatggagctgacctggggcaacatcatccgctttgtgtgggatacgctgtcctcccacggcctgctgatcccgctgcttctgctggcggtgatctgcattgcagcctttgtgctgtgcctgcgcagcagggaagccctgctccgcgccctgccccttgccctgacggcgctgtccgccccggcctggctgtgcctgctgcgcacccactccatccagcacggctggtttacctggcgggcgctgggggtcaccttgtttgcgggctttgcctttgtctggcaggcctgcagcctgaaatccggcgccaatcgggtggggcgtctgctccgccgctgagaccggacctctccccatcaaaaacaaaaaagaaccccggacgggcagtctgcatggggctgctcatccggggttttgttattttaagatgtggcagggaatcagacttccagctctttgccgtccaggaccgccctgaccagggtgtcgccgtcataaaagagttccaggtggaaaaattccgcaccccggtccagcaggtcaaaaaagagtttgtctccctgccagatgggcagagactggaccttgtccttggctacccagaccagatcgccctcgttgcaggggtggggcgtgccggtaaaggtatcgcaggtgtacaggtgcatccgctcgggctgccagggcgggcagtaaaagtccacaatggcccggtagcggggggcctgcatggtgtagccggtctcctcctgcacttcccgcatgacgcaggtcagggcgtcctcccccggctcaaacttgccgcccacgccgatccacttgtccttgttgacgtcctttttctttttgacgcggtgcagcatcaggtaacagccatcctgttccagatagcacagcgttgtctgcaaaagctcttccatggggcaaagcctcccgtgtgtgatctaccgctattatacctgtcagcgaccgccttgaaaagccccgccgatgaaccgcccgaaaccacaggtatattttggctgtgccacggcacactagaagggaaaccaaactcccggccgacagaccgggctcatccaaagggagggtaccatcatgagagcaacaggcattgtgcgccgcattgacgaactgggccgtgtcgtcatccccaaggagatccggcgtacccagcgcatccgtcagggcgacgcccttgaaattttcaccgaggcggacggcaaggtgatcttccgcaagtattcccagatggccgagctcaacgagctggcgggcgtctatgccgaggtgctggccaagcagctcagcgcgccggtcatggtctgcgaccgtgacacggtggtggcggtttcgggcgggacccggggcgagctgctgggcaaacacatcactccggaactggaaaagctgctggcggcccgaggcgtttacaccgcgccccgtgaccccgaccgccgtgtggctgccgtgtcgggggtggaaagccggatgctgggctgcgccgcgcccattgtggtgggcggtgacattgagggcggcgtctgcctgctgggcaacgccaaggccgacccgcccgatgagacccagaccggggccatgcgaattgccgcggcctttctggcacgctggatggaggaatgacagccagctatcctgcgcgtcccgatttcccataactctgctcccgcaccgcggcaaagccgccggccgtgctgccgccccaaaggtccccggaccttctgggacggcccggccggcggttttgctgtttgcggcgagctttgcggcggatggggaactttgctaatcgggagcctgtgcaagaccggggcagagcagtcaaaaccggggacagcccgcctttgtgacgaaactgttaaactttcaaagatttttgcaaaaacccttgacagcgccgaaggttggaatataataaacttagcactcgggaacatagagtgctaaaaacaccgaaaacatgagaacaggaggcgggtaagatggcaatggatgcacgcaagcagcggatcctggaggccatcgtcgccctgtatgctctggacggcgagccggttggctcgggactgctggcaagttactttgacatggcagtgtccagcgccacgctgcgcaacgagatggcagcgctgacgcggctgggcctgctggagcagccccacaccagcgcgggccgcgtacccagtgccaagggctaccgctactatctggatcatctgctggaaggccccgaagccaccacgctggaggacatcgaccgtatccgcatcgatgagctgttcgccaccatggacgtggaaccggaaaagctggcccccgcggccgcgagagcgctggccgattacaccggctgcgccgctgccgcgaccacgccccgggccgacgacctctgcatcgcccactttgaggtggtgcaggtgggacgctactcggcggcgatcctggcggtgaccagcgccggcggcgtgcggacccgcgtggcccgcgtggacacgggactttcccgcagcgacgcggcagcgctggcacagctgctcaaccggggactgacattcgtctctcccgaggatctgacccccatgctcagcgcaagcctgcgcatggcggcaggggaacggctggcccccgttgtggcggcggccgaagccctggtccgcaccggcccccaggcatacctggaaggcgcccagtacctggcacaggatgaggatgcccgccagaatctcggcacgctgctggaagtcttttccgacaaccgggcggccaccgaactgctgcagccggaaggcggacgcatcaccgccaagctgggcgaggaccttgaccccgagatgccgggactgtgcatcgtctgcaagcggtatcttgcaggcggcggcctgaccggtaccatggcagtgatcggttccagccggatgccgttcagaaaactgattcccattttggattactttaccggcaagctcggacagagcatgtccggcaaaagacaggaggaccaagaatgagcgaagaaaccaaggcacgcggcgcccaacagccggaacccgacggaaagcccgcaccggaggagcaagcgcccaccacggcacaggaaaccgaagctgccgccgagacctcccagaaggaagaacccgctgataacaaagctgacaacaaggctgatcagtccaagagctccggcaaggagaaaaaggattggttcggcggcaaggctcgggagctggaggccaccaaggccaagctggaagcagcggagaaaaagtccgccgacctgcgcgaccagctgctgcgcaccgcggccgaatatgaaaactaccgcaagcgctcggcacgggaagccgaccagaaattcaacgacggcgtctcccacgccgtgacccagatcctggggattctggatactctggatatggccgccaacgcgccctgcaccgacgataactataaaaagggcgtcaccatgacgctggacaaagccaccaaggcactggaaactctgcatgtggtggagatcgaagccctgggcaagccctttgaccctaacttcatgaacgctgtccagcaggtcccgccggaagaaggccaggaaagcggcagcgtcgtgatggtattccagaaaggctacaagatcggagaccgcatcatccgtcacgcggcggtcgtcgtggccgaataaaacaagctgtatcggtccttcggggccggtcatcataaacaagcaatcaccaacattttgaatatgcaatcaatcgagaggagatcattatcatgagcaagatcattggcatcgaccttggtactaccaatagctgtgtcgccgttatggaaggtggcgagcctgtcgttatcgcgaactccgagggcgcgcgcaccacgccttccgtcgtcggcttcaccaagaccggcgagcgcctggtcggccaggtggcaaagcgccaggccatcaccaaccccgaaaacaccatttcttccatcaagcgcaagatgggcaccgcggagaaagtccatgccggcggcaaggactacacccccgaggagatcagcgctatgatcctggccaagctgaaggctgacgccgaggcttacctgggcgagaaggtcaccgaggcggtcatcaccgttcccgcgtacttcaacgacagccagcgccaggctaccaagaacgccggcaccatcgcgggcctgaacgtcaagcgtatcatcaacgaacccaccgctgcttccctggcttacggcctggataaggaagccgaccagaagatcatggtctacgacctgggcggcggcaccttcgacgtctccatcatcgagatgggcgacggcgttaccgaagttctggccaccaacggcgacacccatctgggcggcgacgacttcgaccagcgcatcatcgactggatggccgaggacttcaagcgcgagaacaacatcgacctgcgcaacgacaagatggctgcccagcgtctgaaggaagctgctgagaaggctaagatcgagctgtccagcgccacttccaccaacatcaacctgcccttcatcaccgcggacgccaacggccccaagcatctggatatgaccctgacccgcgccaagttcaatgagctgaccgctgatctggtcgaccgcaccatgacccccgtccgcaaggctctggccgacgccggtctgcagccctccgacctgaagaaggtcctgatggtcggcggctccacccgtatccccgctgtctacgacgccgtcaagaaggagctcaactgcgagccgttcaagggcatcaaccccgacgagtgcgttgctgtgggcgctgccatccagggcggcgttctgcagggcgacgtcaagggcctgctgctgctggacgtcactcccctgagcctgggcatcgagaccctgggcggcgtctgcaccaagatcatcgagcgcaacaccaccatccccaccaagaagagccaggtgttctccactgcggctgacaaccagcccagcgttgaggtcaacgtcctgcagggcgagcgtgagtttgcccgcgacaacaagagcctgggaaccttccacctggatggcatcgctcccgcgccccgtggcgtgcctcagatcgaagtcaccttcgacattgacgccaacggcatcgttcacgtcagcgccaaggatctgggcaccggcaaggagcagagcattaccattaccgcttccaccaacatgagcaaggacgacatcgacaaggctgtcaaggacgccgagcagtatgccgccgaggacaagaagcgccgtgaggaagttgacatccgcaacaacgccgaccagatggtcttccagaccgagaaggccatgggcgagttcggcgacaagatctccgcttccgagaagagcgacatcgagaccaaggtcagcgccctgaaagaggctctgaagtccggcaccatcgatgacatcaaggccaagcaggaagagctgcagaaggcattctacgctgtcagcgagaaggtctatcagcaggctgcccaggcccagcaggcacagcagcccggcactgaccctaacgcgggggctcagggcggcgcttccaaaaccgatgacggcgccgttgacgccgacttccacgaggtctgatttacaaaacctgtgacggggacccaggcgacggaacaggcggccgccgtccggcgtgccgcaaagcccggcgccgtccctgaaactgagagatgaacccactggccgtcgccggcaattctgcccggcggcggcccttgtggggtttaacagccaatcactgaacctgctttgacaagcgccgtcgtgcgccggtggggacagcgaatggaaaggtgtgattgtatggcagataaaagagattactacgaagtcctgggcgtcggcaaaaacgccagcgacaacgagatcaaaagcgcctaccgcaaacttgccaaaaagtaccaccctgacctgaaccccggcgacaaggaagccgaggaaaagttcaaggaggtcaacgaagccaacgacgttctgtccgacccggaaaagcgcaagcgctatgaccagttcggctttgcgggcgtcgatcccaactatgcggccagccagggccagggcggctttggcggcggcttcggcggcgtggacctgggcgatattttcggtgacattttcggcggcagctttggcggcggtttcggcggctttggcggccggaccaaccccaacgccccccgcaagggccatgacatccaggccagcgtcatcctcacttttgaggaggctgcccacggatgcagcaagaccgtcaccatcaaccggcaggagacctgccacgactgcaacggcaccggcgcggagcggggcaccagtcccgagacctgcccccactgcggcggccggggctatgtggtgacccagcagcgcaccccctttggtgtgatgcagagccagcagccctgcagccactgcggcggccggggcaccatcatcaagaacccctgccacacctgccgaggcaccggcaagaccggttcccgcaaaacgctggaggtccgcattcccgcgggtatcgacgatgatcagaacatcgcgctgcgcggtcagggcgacgccggcaccaacggcggcccggccggtgacgtgatcgtccatgtcaccgtcaagcccgaccccgtctttgagcgggacggctttgacgtgtgggtccatgaacccatcaccttcagccaggcggtcctgggcgccgagatcacggtgcctaccgtggacggcaaggtggcctaccgcattccggaaggtacccagagcggcaccaagttccgtctgcggggcaagggcatccagtacctcaacggcagaggccgcggcgaccagtacgtggtggtggatgtggagatccccaaaaagctgaccaaggcccagcgtgacgccctcaagacttttgaggactccctgcgcgaggaaaactacgaaaagcgcaagggcttttttaagaacctgaaagaccgcttcatgtgacctgttacggcgcagtctgacgccgcgatcctgcggtcgcgcggtcacgaccctgacagcagggaagtgtcccaagacatatcccgagtaaacagatcggcccgcactccatggcagaaacactgccggagtgcgggccggttttttgttgtctttataagccggggttcatgccggggcggggaaaatcatttccacagcccctgcgggtaggtcccggcatcggtcatggcctggagcgcggccatcagggcgggtttgtcctcccggtaggtgatgccataccacttatcggtgctggtcagcaccttcacctcggcacggccgtccgccagcgccgcagagacgacactgggcaggtaatactcacacttgagaggattgacgggcaggttctgccgcaggaaatccgcaaagccctgctgtgccgccgtgacaaagctgcgggtaaagccccacaggttcatgctgaccagggaatcgccgggcagctccacccaggtcttgccctcgtcctcggtgtaggcgatggcgtcgcccttgggctcgatgcgggtgcgctcggtgaccgacaccaggttgcccgccgcgtcggtctcgcagacgccgcggctgaccgaaccgttctcgctcaccgtatttttcaggtggaacccgaccatggcccaggcaaacttgtccccgtcctcgtgggtggacaggtactcatagatcaggcggaagcaggtggggccgtaatagtcgtcggcattgatgaccgcaaagggagcgtcgatgcactctgccgcagacagcaccgcgtgggcggtaccccagggtttgacgcggccttccggcacggcaaagccctccggcaggatgtccagctgctgaaaggcatagcggacctccagcccggcctgctcggcccgggcgcctaccgtgcgcttgaaatcttcctcgatctcatgcttaatgatgaacaccacggtggaaaatcccgcccggcgggcgtcgtacaggctgtaatccaaaatggcctcgccgcaggggccgaccgggtcgatctgcttcagcccgccgtaacggctgcccatgcccgctgccataactaccaggatcggtttgttgctcattgccaaaactccttttttcagccccgctgccgcatgaccggacagggagacggtggtctgcttttatcatacacgcaggaaacgccggatgcaagttgttcgccccggttctgcaaacagaaatcacgttttgtcagtagcgttttttgcgcaggaatgatataatgcagtcaatcagaatgttgcttccggcaggacggtagccggcgaaaacgatggacaaaattgacaaaaatgtataaaaagtgcggccgcttgtgatataatggaaagacatcagacaggaggaaaaacaccatgcgcagtgaagcaaaagctcttgttctggcaggcggcggcgccaagggaagctaccaggtgggcgtttatcgtgccctgcgggaggtgggctggctgccggacatcatcaccggcaccagtgtgggctccttgaacggcgcactgttcgtgatggaccatctggatgaggcggaacagctgtggcgcacgctggacgtccacggcgtgctggaagtcccccagggcaaaaagccggaggaactgcgcggctttcttttggatgtcctgcgcaagggtggcctgaacattgacccgttgggagacaccatcgacgactatctggacgaggaagaaatgcggggttccgctgtccgatacggtctggtcatgaccgagatgaataccctgcgctcccaccagtatgccctggaagagatcccccggggccgtctgaaagagtatatgatggcgtccagcgcttgtttcccggccctgcgccctcaggagatcgacggcgtcaagtacatcgacggcggctggagcgacaacatgcccatgcaccttgcggcccggatgggcgccaccgagctgatcgcggtggatattgacggggtgggcatcaaccgtcccaacaccacgggcctgcccacccgcatcatccacagccattgggacctggggccgctgtttgactttgacggcgagcgggcgcagcgcaacatcaaactgggctatctggacaccctgcggatgttcgggcgggtgggcggcaccgcctatgctatcctgccggcggaggataccttcccggcggactttgccctggcctaccgcggggcgctcatggaggccgcccagcgtgcgcccatgctctggctgaccgagagcatggcccgccaggtcaagggttacccgcccacctacgacaaggaccccaccgcccccacggccgccgcgctggccccgctggagatggcggcggagcggatgcaggtgccgccggatgaacctatgacggcaaaactgctggcactgacgtttttggggagttttgaccgtgacccggcggataagttccccattctgctgggcaagcaggagggaaatgtggtgggcgaggcggccatggcagccgccgcacccgaagaatttgtgactgcgctggtttcgcacactctgtccgggatgggcaccggcgtattctggtaaggatgccgcatggcgcggggcaagctgcccgcagtgcgccacggcgggaaagggggatgtctatgcctgcgtttaagggaatcaaagtatcgcccggtgtggcggtaggaccggtggcacggctggaccgcggcattgtgggtctgcaccgcattgtcagcgatcctttccgggagcgcgcactgtacgaggcggccatcgttctggcaaaggacgaactgacctgcctgcagcagcgcgcccagggagcggatgccgatatcctgatgttccagatcgcactgctggaggatgaatccttcaccaatgagatcggcgactatatcgcggcgggcgcgggcagcgcggccgcggtggaacgggcggagcagatttttgcggcccggctgaacaatgtggataacgactacatccggcagcgcagcgtggacgtgcgcgatgcctgccgccgtgttgtggatattctggacggacgtccccgccagaaactgcatctgaccaaaccgtccattctggtggcggacctgtttttccccagcgacatttttgcactggaccggtccatgatcctgggcatcgcggcggacaacgacagcgagaccagccatgcggccattatggcgcggaccatgggcatcccggcggtgttcgggctgggcaaaggggtggccgccctggcggagggccgggacgtgctcattgacggtcaggcggggaccctgaccatcgaccccacccccgatgagatcgcccaggcgaaccatcgctttgcgctgctgcagcgcaaaaaccgcaagcgtcatgcgctggccggaaagccctgcgttacccgggacggcacccaggtgtcgctgtacgccagcgcatcttcccccgaggatattgaaaacgccatgcacgccggggccgacgccatcggcctggtgcgcaccgagcagcttctgctggaccacctgggggaggaaaagcagtattattactacatcaactgccttggcgcggcgggcggacgtccggtcacggtgcgtaccggtgacgtgggcgccgacgacgccgctccctgggtggaggacgtccgccgtgcggcggagaacaggcgcaggctgtccacccagatcgcggccctgctgcgggcggggacccggggcggactgcgggtggtcttgcccatgatcactggcccggaggaatgggatgacgtcatggcggaggtggagcgctgcaaggaacggctgcaccgccggggcgtggaatacgaccgcgacctggaattcggctgcctgatcgagatccccgccgcagcgctggtggcggatcagatcatggaccacggggcaaagtttttggccatcgacatcgacgacctggtgcgctacaccgtggccgccggacgtcccgaaagccagcgcggccgctatgagcgggcggatgttcccgccgtgcggcgtctggtggatatggtctgccggatggcggccgaccggggcatcccggtgtacatgtgcggcatcatggcgggcgctctgcctgagatggaagcctacctgcgggacggcatccgcggcttctgcctggaatggatcagcctgaacgatctgaaggcggaatttatggaaatcgaccttgccgacgatggaacatcgaaaaaggacgatggaaaaagtgttgacaaatcgaatgggatgtgattaaataacttcaaaccagtgaagcgaaagtaaaactgcaggcgcacgcaaagagagcccccgttgctgggagtggggccggaagcggggcagataaatggttcgccgagggcacggggaaaggccgaaacggcccagtatccgctgacggaagcctccgttacagggcaggggaatgatggttctccgcaaaggggccgcgccataaaacgcggcaagcaaggtggcaccgcaggtcgccaaagtatttggatttgtcctgtccttgcacaacacccgtctggggttgtgcgggggcagtttttttatacccgcaccccggaacctgttgaaagggagcgtgcagcttatgaaactttctctccatcccggccggcgatggcgcggcagcagaccgtccgccgttccaacctgcgccggataaggcgccagacccaaaaggagaaattatcatgaaaaaactgtttgctgttatgaccgcctccgcctttgccctgtccctggccgcctgctcggggaatgccgcttccggcagccagtcctccgccgcgaccggtgagaccacctccggcgacggtgcaagctaccgcattgccattgtccagcaggtggaccactcctccctggacgagatccgcaccgccgttgaggctgaactggatgcccgggccgctgccgacggcatcaccattgaatataccgagttcaacggccagggggacagcaccgtcctcaaccagatcggcagccaggtcgtctccgacggctacgacgccgtgatccccattgcctccctggcggctcagtgcatggtcaacgcggtggacggcgatgtccccgtggtctacgccgccatctccgaccccgccaccgccggcctgaccgagctggaaaacgtcaccggcacctccgacgccctggataccaagttcatcctggatatgatgctggccgttgaccccgacatccagaccgtcggcctgctctactccaactccgagcccaactccgagacccccatcgccgaggccaaagcctacctggaagaaaagggcattgcctacgtggagcgcaccggcaccaccgccgatgagatcctgaccgccgtctccgccatgaccgaccaggtggacgccgtctttacccccaccgacaacaaggtcatggaagccgccggcgccgttgccgaagccctgaccgatgcgggcatccccttctacgcgggcgctgattccttcgtgacctcgggtgctttcgccacctgcggcgtcaactacaccgacctgggcaccaagaccgccgacatggccgtggacgccctgctgtctggtaccgttcccgctgactactacgtgatggaaggcggcgtcatcaccgtcaacaccgagaccgccgctgccctgggcatggattacagtgccttcaatgacatggcagctaccgtggtggaggtcaccaccgctgccgcgggcgaatgacccgggcaggggccaaacaagtaaaaccgcacggcggggcagggcagagggccttgccccgcacggtgcgctctgaaccaaaggagctgttaccatgatcaccaccgcaatcgtgctgagtgcgctggagctgggctgtatctatgctctggtcgccatggcactgtttttgagcttccgtgtcctgaacatcgcggacatgaccaccgacggcgcatttaccctaggctgtgcggtctccgccactatggctgtggctgggcatcccgttctgggcctgtttgccgccatggtgtccggcgctgcggcgggctttatcaccgcctttttgcagacgcggatgggggtgccttccattctggcgggcatcatcaccaataccgggctgtacaccatcaacctggcggtgatgggcttttcctccaatgtgcccatgctcaaaaccaccacgctattcaccatggcggagtcgctgttcggggagaacgctccctacaagctcattaccgccgctctcatcacggcggtggtctgcgctttgctcatcgcgttcctgggtacacggctgggcctttccatccgcgccaccggcgataaccccgacatggtccgcgccagctccatcaacaccgccttcaccgtcacggtgggcctgtgcatcgccaatgctatgaccgccctgtccggcgcggtgctggctcagtatcagaaatccgccgacattaatctgggcaccggcatggtggtcatcggcctggcatccctcatcatcggggaaacgctgttcggtcacggcgggctgtggaccaaggcggtggccgccgtggcaggcagcatcatttaccgcttcatcatcgccattgccatgcgggccaacctcccctccgaggcgctcaagctgatctctgccatcatcgtggtgcttgccatctcggcccctgccctcaagaagggcgcccagttccagcgccgccgctatgctgccatgttcgggaagggaggaaatccggatgcttgaactcagacaggtcaaaaagactttcaatcccggcacggtcaatgagaaaaaggccctgaccggcattgacctcaaactggagcaggggaactttgtcaccatcgtcggatccaacggcgcaggcaaatccaccctgttcaacgccattgcgggcagcttcattcccgacagcggcagtattctgctggacggcaaggacatcaccttctggccggactataagcggtccaagaccatcggccgcctgttccaggacccccttaaaggcaccgcccccagcatgaccattgaggaaaacctcgccctggcctacctgcgggcgtcggggcatacctcgcccttctcccgcatctccaggaccgagcgggagctgttccgcgcccggctggccgctttggacctggggctggaggaccgcatgaaacagccggtgggcctgctttccggcggccagcgccaggctttgacgcttttgatggccacgctggtcacccccaaactgctgctgctggacgagcacaccgcagccctggaccccgccaccgccgacaaggtcctggccctgacccgcagcatcgtggcggaacacaacatcacctgcctgatgatcacccacaacatgcacgccgccctggaactgggcaaccgtaccctgatgatggacgccggacatatcgtgctggacatcggcggggaggaacgcagccaaatgacggtggacgacctgctggaacgctttgcccgggatgccggacacaaactggacaacgaccgcatcctgctcagcaaggcgcagaccgccgccgactgaacggagacaccgactgatattgtgacaacaaaaatccgggaagagcgaatgctcttcccggattttgtcttgtgtgtgaaaagtcaggagtcaaatccctcagtgtgggtgatggtgtggccatcttcctcaaaccagatggcatccacgccctccaggctgtccacaagggttaggccgtcgtccaggggcatgcagtacagcccggtggatagggcatcccccacaccgccgtcggagcacagcaccgacacactgcggaaatattgggcggggtagagggtctccagatcgatcaggtgggaataccgcacgccgttcacctcaaaatagcgctgggtgtcggcgctggtcaccagagactgccccgatgccaggggaacttccatcagatcggaggaatcctcatcccagggcgcggtgatgcccgccacccaggaactgccgtcggcgtgggtgccgatggcccggatgttgctgcccgcatcaatgagagcattggtcaggccccgggcctcggcagccttggcggcaacctcgatggcccagcccttggccaggctgcctgcgtcaatgctcatgtcggggtcagccaggcggacggtttttgcattttcatccagaatgaggtcgtctatggaacagtgctgcgcggcctgctgcaaggcggcggcgtcgggcagagcagggacttccgcttcccgggcgtcgtgccacagcgccagcaccgaccccgccgcaatgttgcaacggccgtcggtcagatcgtacatctctttgcccatggtcagcagctggaacagagcgtcgtccacgaggacggcgtcgcccccggcctgggcgttgatgtccgccagattggtcatgccgtcgtagctgttgtagatgtcaaaaagccggtgatagtacaaaagatcgtcgtgcagagcctgggactgctgttcccattcttcctcgctctcgcagtaggcagtgacccggatgaccgagtcaaacaggtcaaagtaggtggtctggtatttctggcgggtgtcgcagccggtaagcgccgccagcagcaggacggccagagcagacgctgccgcccgcagacctcgcctcattggggctgaccgctgcccagtgccgcgtgttcggcagacagctcctccagcaaatggcccagcgtccaggcggcgctggtgggggtgacggccgcccgcaccgggaaggtcatgccggtctttttcacggcgtccagccaggtgttcagatcgccgttgtcatggcgcagcccgcccacgatcatggtaggagtattgctcaaaggcaggggatcgggcaatgcctggaccggggcggaagtcttgcccgcgcacaggtcgccgatggtggtgtccaggtcctccgcccccacaaagcggggcgtcaggcggaaatcggcggcgcggcggagcagcgtgtcacagccgggggtctcgggggtgatgccccacaaaagcagggcgcggggttcctggcggatatgagctttcataatagaaatcctcccgtttggtgttacagcagacggatcagcagcatataagccgctgtgccgcccgcaatgctgagcaaagtgttgtgcttccacaggtgcagcccagccaccagggcgcaggctgcaagctgcgggacaaagcccgcggcggcggtaaaactcaccgagcgcaggcagtagatgaccagaatggccatgacggcagggggcagcacccgccccagatacagcaccgtccggcccggcgtgccgctgcggccgaacagcacaaagggcagcgcccgcaccgcaatggtgcaaagactggccaccagaatgatggcaaggtcggagagaaaggcagtcacggggcatccacctcctccgtttgaggctggagcgttccgcggcagagcagcagaaccagcacggtgcagaccagggcaggcagcaggaaccggtcgggacccagtaccaccagccagagcagcccgaagccaagccccgcaacggcgggcaggcggcttttgaccccgcgccactgatccacaaagatgaccacaaaaagggcagtcatggcaaagtcaatgccggtcagatcaaagggcagcacgctgcccaaaatcgccccggcggcgctgcctgccacccagtaggcgtggtccagcagggcaatgtacagccgtacccgatcggcgtcaagctccttgggcggctgcaggctgcatagcagggagtaggtctcatcggtaagggaaaagatcatataaggctttgcccggcccatcttgcggaaggtctccagaaaggacaggccgtaaaacaggtggcggctgttgaccgacagggtggtcagggcgaccgacagcaggctggcaaatccgccgcccaaaaggcccaccagaacaaactgcatggacccggcgtagacaatgacgctggtcagcacggcccagggccagccgtatcccgcctgctggagcagcagaccgaaggcaaggcccagaaacaggtatccgcacaggacaggcaccgtctggcggaaggcataacgtagttcccgcatggaaaaggttcaaggctcctttgctttggcgttggcatgctgcaaagacaaaacgcggcgcagcccgcggccgatggccgggcgtgcgccgcgcttcccgacgcgggctcagctcaggtcgggatggtattccttacaggtgcattttttccatttcaggccgctgccgcaggggcagggatcattgcggccaatcttggtcacgcggatgggggcgctgcccttggcgccgggccgggtgggagcaccctcgccggtgggtttggccacctgctcacgctggggctggacctcggggcggcggacctcgatggtcagcagcatgtggacggcgtcctcccggatggtggccaccatctcgtcaaacatggcaaagccctcgatgcggtactccaccacggggtcgtgctggccgtagctgcgcaggcccatgccctgtttcagctggtccatgttgtcgatgtggtccatccacttggcgtccacgtttttcagcaggcagatgcgctccagttcgcgcatgagctggctgccgtacttcttctccttggcttccagaatgttcatgccgcggtcgtagagcattttggaaatgtcctcctgcttgagggcattcttctcctccacggtgtactggaagtcggtgggcaggcacagccagttcatgtagtggcggcgcagcgcggcaaaatcccactcgtccacggtctcgcccaccaggtaggctttgcaggactcgtcgatgctctccttcatcatggcgtgcagcgtgtcggagatgtcctggccgtccaggaccatgcggcgctccttgtagatgatctcgcgctgctggttcatgacgtcgtcgtactgcagaacctgcttacggacggcaaagttggaagcttccagctttttctgggcgctctcaatggtgttggtgatgagtttgttctcgatgggggtatcctcgtccaggcccatggagttcatcaggccctgaacacgctcgccgccgaaaatacgcatcaggtcgtcttccagagacaggaagaagcgggaggaacccgggtcgccctgacggccggcacggccgcgcagctggttgtcgatacggcgggactcgtgacgctcggtgccgatgatgaacaggccgcccgcggcgcgcactgcctcggcttccttcttgacttccggctcgtactcggcgcacagctcgtcaaagcggcggcgggcttccagaatgtcggcgtcgtcggtatcggcatggccgtcggcctcggtgagcagcatgtccagacgtgcctcaatgtcgggcaggggagcagcctccggcaggggctgaccggcagccttggcggcggcgcgctcggccttgcgcttggcttcctcggcatcctgggcagcggacagctttttgaacagctccttgcgcagggcagccttggccatgtaggggatgttgccgcccagcatgatgtcggtaccgcgtccggccatgttggtggcgatggtcacggcgccctgacggcctgcctgggcaacgatctccgcctcgcgctcatgctgtttggcgttcaagacattatgcgggatgctcttggccttgagcatgcgggagagggtctcgctcttttccacgctgacggtacccaccaggacgggctggcccttggcgtggcactcggccacctgctcgatgacggcacggtacttgccgttcaccgtcttgtagacgctgtcgggcaggtcctgacgggcgcggggcttgttggtggggatgctgacgatctgcagaccgtagatctcgctgaattcgtcggcttcggtggatgccgtaccggtcataccggacagctttttgtacatgcggaaatagttctggaaggtgatggtggccagagtcttgctctcggcggccacgttgaccccttctttggcctcgatggcctggtgcagaccgtcgttgtagcggcggccatacatcagacggccggtgaactcgtcgacgatgatgacctcgccgtccttgacgatgtagtcggtgtcacggtgcatgacgccccgggccttgatggcctggtcgatgtagtggcgcaggctcatgttgtcggcgtcggaaaggttgtccacctggaaccaggcttcggccttctggatgccgctctcggtcagggtagcgctcttgcgcttttcgtccacgacgtagtcgccgtccacctgctcctcggcctgcatcttgtcttccagctcgacgatgacgctctttttcagggtcttggcaaagtcgtcggcgcgcttgtacatgacgctggaatcctcgcccttgccggagatgatcagcggggtacgggcttcgtccaccaggatggagtccacctcgtccacgatggcgtaggcgtgaccgcgctggaccatgttggccttgtagaccaccatgttgtcgcgcagatagtcaaaaccgaactcgttgttggtgccgtaggtgacgtcggcggcgtaggcttttttgcgctcggcagaggggatgtcgtggaccaccagacccaccgtcaggcccaggaagcggtagactttgcccatccactcgctgtcgcgcttggccaggtagtcgttgacggtgaccacgtggacgccctcgccggtgagagcgttgaggtagacgggcatggtagccaccagggtcttgccttcaccggtctgcatctcggcgatgcaggcgcggtgaagcacgatgccgccgatgatctgcacggggtagggtttcaggcccagcacacgccagtcggcctcacggcagacggcgaaggcttcgggcagaagatcgtccagagtttcgccgtttttcaggcgctcccggaattcgtcggtcttggcacgcagctcagcgtcggagagcttctgcatctgctcgtccagagcctcaactttctgggcaatgggacggatgcgtttgagttccttgtccgagaaattcccgaacagcttttcaatgaaggacataagcacacacctgttctgactgatttagaaaatgtcatcgcagcagcggcaaaattccgccctgcaaagcgccgttatccggcgctggatacacactctaatataatacacccgcgcaggcaatgctgtcaaacctgcgcgggtgtagaaaaacgggaatctgttgttgtttcaggaatgtttgctggctgcccggcggttttgccgcgtggtcaggaccagtgccgcaaaaagcagaaccgcccagacgggcaggccgcagatcagccgcagcccggaaaaaccgacggaagcggggcggagaaggtagcaatagagaccccatcccaggctgttgacgaactcggcggccagataccagacgactgccgtttcaaggcctgcccgggtgcggttttgccgctgcaccaggaccagaatggcgtaagccactgcacacaggagccagaacagcagccagagatcgatgtcggatggccaggatgcaccgcgttcctgtgcggcggccagtagtgctacgcccatggagagcctccttttctcgtcaatgcgtgtaaaatcttggcggaatatccacagtatatcatgggaacccgccgccggcaatgcaaaaagccggatggagcctgaaaaatcagactgcacatccggcaagacagtaaagaacttccgtactcagtttttggcccccgagtgctgcggctggggtgcgggctgctttgccccggcggacagcagcaccagcatgacaaagatgcacccgaatcccagggcatcccacaccgtaaagggggaacccagggccagggtggagatgagggcagcggtggcgggctcggcaaagctgtacaggctgctgcgctgggggccgatcagtttgacgccctgcatatagcagcagaaggccagcaggttgcccacgcagaccaccaccgcaatgcccagcacacccacgggacccggtacataccccgactcccacgggcggaagagcaggcagaacaatgcgccgcccatgagaaaggcccagccctgtaacatgggggtgggatagcggctttgcagctgcttgggccacatggtgtagatgaccacacagacggcgctgagcatgccggtcacaaaagcccccggggagatggcaagcccggtcaggctgccgtgggtggtcagcagaaagacgcccagcatggccagcaggatggaggccagctcaaagggcctgggcagccgccgtgccagcaggcaggtgaccaccaggatcatggcgggggagacattctgcaaaatggtggccatgcctgccgtggactggtcgatggtcataaagtacatcagctggcaacagctgacaccggccaggccgtagatcaaaaggtccacggcatcccggcgggagcgccagggggcaaccagcagcttggggtcgcggatgcagtaatacccgcacaggatcagtcccgccagcagcaggcggatgggcgtcagccaggtggcgctcatgccctcgtaggtgaacagatactgccccgtacagccggacagaccccagcaggcggcaccgccgaaggccaggatggaaccctttacacggtcggtcatggaaaattcctccaaaaaggcgcggcaggcaaaacgccgccgcgccggaatacaatgtttattctgcctgccggtcgccgctcaggatcaggtcggcagcagcggtcagggtggggaccaccggggcgccggtggcggcaagagcttcggcagtctggtggcctccgctgtacaggatgcagcggacccccagagcatttgccacctggtagtcgtgggtggagtcaccgatcatgaccgcacggtcagggtcaaacccgctgtgctccagataggaaagccccagctccaccttgctcttggcgtaaatgtcgcccagccccagcatagtgtcaaaacagtcggccacaccgcgctcggcagtctgccgccgcagcgtgtcgatgggggaggcggacaggatcacctgccgcagacccgcgccgtgcagacggtccagggtgggccgggcgtcggcagtcagagggcagtggacgctggcgggaatgtagtcggccatgtagctttgggccagctcgtcaaagctgttgcgggtaaagtcgaacccggcccggaggtaatattcctccaccgggaagccgaagatcttccggtagctgtccaggtcgtaccgctgggaatacccgtggcgtgccagcagacggttgagcgcatccacgcacagtgccacatcatccagcagggtaccgttccagtcccacagaaccagatctgtcctcattcggggtcaccaccttgaaaaacagagtatgcgaaaaaatcaggtcatgcacgcacggccttgagcagggccggggtggattccacgatgcgggcaaacagcacgcccaggatcatgcagctgatgacctcgcccacgccaacggtgaaggcactccaggcaatcagcggcagcgtagccggagaatccgagaagaaaatggcgatctcggggccgacgatcagtgcgttgaagatgaccggcggaatggaagccggaatggccaggcccttccagcggatgttgcgcagctggtaagtgaccaggcaggccagcagggtggcgactgtgccgaacgcgatgtccaccgcagcggtggtgcccatggcaacacccatcaggttggacaggaagcagcccaccgtcacggcggtgatgtactcggcaccgaaaatcggcatcagggtcaggatctcagccacgcggacctggacggcaccgaaagagaaaggcgccagcaccaggcagagcaccacatacacagcggccaccatggcgacccgcgccgtgcgggtggtggaaggcttggttgccttgcggtccattgccaggcggatgcccgcgatagcggcaatcagaacgaccacgaaaagaaaaatccaatacagcataatacactccggcggatagattttgaccgttcgcaagaccgccagccttgcgtcggtttgtcgccgtctcccatgggggaggggcggagcctaaaatcctaagttgctcaacaaaccgttattatagcaaacttcccggccactgacaagaggtgcgggaagcagtacaggcaaaaaaacgaccgcccgccgtcccataaacgggaaaggcgggcggccggaacggatacagggttacggcagggagggggcataatcgcacagacggcggggtttgccctcaaagaccactgccacggcgtcggggccggtgttggcgctgacggcgccgcccagctggaaggtgcacagcggcgcatggccgaattccttcttgcacagtttgaccagctcatcgcggcgggcggtggaggcggtatatgccaccatgtagggggtgtccttcatgttctccacacgggtgtggacccacttcagcatggcaggggggacggcagcgtcgccgcggaccttggcttccacgtgggaaatgccgtcgttcaggctgatgatggggcgcaggcccagcagctcgcccgcaaaagcggcggcagcggaaatgcgaccggacttcttcatctgcttcagggtgtaggctgccaggcagacctccacacgggcaagcttttcttccatctccagcacagcatccgccacggtggcaccgttgcggaccttgcgggcgcactcgcagacataccagccgaacaccatggagtaggtgtggctgtcgatgatgcgcagcttcatctggcagtcgggacgctcgtcggccagcattttggcggcggcgtgggcgttctggttggtgctggagccgcccgcgttgatggtcacgtggactagatcggtatagccttcgtcggcaaaacgggtgtaatattccagccactgcagcggagtgatggccgcggtggtgggcacgcctttggcctcgcgcatcatttcatagaactgatcgttggtcatgtcgcggcgttcgatgtactctttcccatccaggttgatcgggaaacaggcgatctcgatcccgtatttttcggcaagatcggcgggaatgtcgcagctggaatcggtcaaaaatgctactttactcatattccgtgtcacttccattcgtaattggtcaactgtccgtgggtctcaagctcggcaaaatcccattgccgcagcgcttcatacacgccgacggccaccgaattggacaaattcaggcagcgctcgccatggcgcatggggatacgcacacaggaatccgggtgctgcaccagcagcgactccggcaggccggcatcctcccgcccgaacaccagataggcgccgtcggggtacgaaacatccgtatgccggtgcaggcccttggaggtgaagtagaaaaaggggcctgcattcttttccgaaaaatcagcataatcccgataatatgttatatcaagctggtgccaatagtcaagcccggcgcgcttgagtttgcggtcgtccacggtaaagcccatcggtcccaccagatgcagccgggcaccggtcacggcacaggtccgggccacgttgccggcattctggggaatgcgcggttccaccaatacgatattcaaaacaggcataggggattcctttcacgtccttgccggcccggcgggctgcagggcaaaaatgcgggcatcctgcccgcaaaccaccgaaaaccggctgaaaactgttatattttggaaagataatacaaaatgtaaataaatggcatccgttttattccggatagccgccccggacaggggagagcggttcctcccggtcggcgctcagcaaaggcagcgcggcttccagccagacgcccagccgctcgtcggcaccctccggcgtggcgcggatgcactccaccacaaaggcggcggcagtctgcacggcagcctcggtgacgttgccctgcatcatccgcccggccaccaccgcgccgaaaatgtctccggtgccgtggtacaggcgggggataaaggaggagcgggtcacaaacccgtggccgtcccgctgcgcgccgatgcaggcgatggaccgctgcccggcgcgtaccccggtcaccaccacccgggggcagagggcggtcaggcgcgctgcctgctgggaaacgctctccagggtgggcgcggcggagggcgtctcctccagaaggagtgcggcctcggtggggttggggaggatcagtccggcccgggcgcacaggctgcgcatggcggggatcatgtcctcggacagtccgctgtacagtttgccgtgatcgcccagcaccgggtcaacgatggccagggcgtcgggccacagctccagcgcctgctggaccagatgagcctgcccggcgtcggccagatagccggagtagatgcagtcaaaccggatgcccagccgcttgtagtgggccagggcggcgggaccgtagcctgggttggacatgcgggcgggagtgcccagccctccggtatgggtggatagcacggcggtgggcagagccacggcctgaacacccagggcagacagcaccgggataatgaccgagagactggcccggccgaatccgggcagatcatggatacataggacggttttgggggcggatatcatgggacaacgctcttttctgtgcaggttttgagggcgtgggacctgtcgaggtctgacgctccgggggaaatctgacacgattttaccacatccggcctgacaaaaaaaggcgtattttgcgcggttccataagaaaacaaagccgcaaaattctaactgcaaggcggcatctgccgcgttatcgggctttgcattccaccaaggagtgcttcagccctctgccttgcatctgccgccatgcagcgattttgcgatgcttcgcagttcttgcagaacctttgttttcttatgtcactcgcgctttggtacgaatccaattttctgtaccaaaacgccggggccggtgcggcggctgtcgaaaaaatcatgccgggggaataatggggcggcggctaggcacactaagaccaacgcttgcagaaagggggaaaaccggatgaaatccagcatgggcatgggacaggccgtggccgtggcagcgggcatggcggcaggtgccgccgtgatgtatgccgccacacgggacaaccgtcagatccgcaagacggtacaccgcatggcacggggcgccgaaaagacgctggccgacctggaccgtatggtctcgcattatacccgctgaacggcagcaaaaaagacggcggagcccaggctccgccgtcttttgctgtgtaatggggaaaagtcttacaggatgcgcacacggatgacggaatcgatgccggacagctgtcccatcaggtcgtcggcgatggtgccggtgacgtccagcatggtgtaggccacatcctttttgcctttgttgaccatgttttcaatgttcagattggcgttggtcaagatgcccgtaatggccgagatgacgcccggctcgtttttgtggatgatgcagatacggcggccgccggcgcggggctgctgcacgtcgggcaggttgacgctgtgcaggatgttgccgtttttcaggtaatcgctcagctcagaggcagccatgaccgcgcagttggtctcgctttccggggtggaggcgcccaggtgcggcgtgcagtagacgcccttgacccccagcagttcctcgctggggaagtcgcagaaatactgggcagccttgccgctttccagagcagcaagcatggcggtggtgtccaccagctcgccacgggcaaagttgagaacgcgcacgccgtccttgcacatgctcagggtctgggcgttgatggtgtgcttggtggaaggcatgtagggaacatggatggtcaggtagtcgcagcggggcagcatgtcgcccagagagacgcagtgctgaacgctgcgggacaggctccacgcggcgtcgatgctgatgtaggggtcatagcccaacacttccatgcccagggagacggcggcgttggccacccgggcgccgatggcacccagaccgatgacgcccagcgtcttgccccgcagctcgggaccgacaaactgctttttgcccttttccacgtccttggccagcgtctcgctgcctttcagcttctgcgcccaagcaatggcgtcgggcaggttgcggctgcctgccaccagcgcaccgatgaccagctcggccacggcgttggcgttggcgccgggggtgttgaaaacaacgatgcccgccgcggtgcatttgtcgatggggatattgttggtacctgcacccgcccgggcaatggccagcagactgtcgggcaggggaacttcatgcaagtcggcgctgcgcaccagaatgccgtggggcgcggcgcagtcgttgtcgacctcgaactgggtggcgggcagcttggccaggcctaccggggaaatggcgttgagcgttttgattgtatacattggtatcacacctcgtttgatttggatgggaatgtccgccaatcaggcgttttccttgcggaacttctccataaagaccaccaggtcgtcaatggctttgggcggcatggcgttgtagatggaagcccgcataccgcccaccaggcgatggcccttcaggttgacgaagcctgcctcggtggccgcagcgcagaatgccttgtccagttccggcgtggggctggtgaaggtgacgttcatcatgctgcggtatttgtgctccacgggatttttgtagaagtcctggctgtccagataatcgtaaaggacttttgccttggcctcgttgatcttcttcatctcggccagaccgccgatgtcgtgctccagatagtccatgaccagcccggtcatgtagatgcaccagcagggcggggtgttgtacatgctgtcgctcttcagcagggtggtatagttcatcatggtggggatctgctcgggggcgatgcccttggcgctcttgcccagcaggtcctcccggatgatggcgatggccatgcccgcgggggcaacgtttttctgcacgccgaagtagatgcagccgtacttgctcacgtcgatgggctcggagaagatcatcgagctcatatcggccaccagaggcaggccttccacctgggggacctccacaaagcgggtgccgaagatggtgttgttctggcagatgtgcacatagctggcgtcggcatcgtagtcgatggcgttgacgtcgggaatgtaagtgaagttcttgtccttgctggaggccacgatgcgggcctcaccgaacttggcggcttcctcggcagccttcttggagaagttgccggtcaccagatagtctgccttgccggtggtcatgaagttcagcgggaccatagcgaactgctgggtggcgccgccctggaagaacccgatcttataattgtcaggcacgttgagcacccggcggatgccggcctcggtgccctggatgatctcgtcaaaccatttgctgcggtggctcatttccatcacgctctggccggaaccatggtagtccagcagctcggcctgagcacgctccaaaacgggtacaggaagcatcgacggtcccgcgctgaagttatatacacgattcatggaaaaaacctcccccaattttctgcgcggctccataagaaaacaaagtcgcaaaactctgactgcaagtcggcatctgctgcgttatcgggtcttgcgttccaccaaggagcgcttcggccctctgccttgcatctgccgccttacagcggttttgcgatgcagagcagttcttgcagaacctccgttttcttatgtcgctcgcgctttgtgcgcggctcccatttataatgtagcccgcgcttttcctgattcttacagtcaggttgcttgcgccgtcagcgcataccagtattatacgggccggtgtgcggaaatctcaatgaaaaatgcttcggcagtgtgccgaaaaaacggcctgaaaacagggaatggctgccaaaagatacaactgtgtgccatacaaaaacataaacggagacaaatgtaaaagactggctcgaaaaaatgcacaaaacaagcggaaaaaattgtcataaccgctcggttgacaaaatatctgcggcaaatgtaaaataaaaaccactaaaacatagacatatgtgggaggaattggcatgcagacacttccaatcagtgaggaacgggtcatgtgcgcgttgtggaactgcggcaaggcggcgacccggcgggagatcggggcaaagttacccgccgtatgcgaatgggcagactcgacacttttgaattttttgatgcggctggagaagaaaggctttgtccgcagcgaacggcaaggcaacaaaaatgtatatacgcctctggtccggagggagacctactgcggtgcagccacggcggaacatctggaagttttgtacggcggagacctgcgcgcactggtcaaagcgctggccgataccggccggctgagctatgtaaaaatggaggctttggcacgctggctggacgtccgggtggcggaaagtccagagtatgactacgattgataaaaccttgacaaaaggccgtgttatgcggtttttgttgacttctgcgccaaagatgttaaaatgtttttgtgtattatttgagaacgtttgccgcagccccccggcgcggcaaaacatggaaaatcaggggaggagcttttatgctgaaaggactcaagcgttccgctaagggcgcccgggtgccgcacgagaaagctacggccggactggcaacggtacagatgccggtgccggaacacgtggtgatcccgatgcagatgcacatcggcgcaccggcggaacccgtcgtcaaaaagggcgacactgtcatggtaggtacgctgatcggcaaagccggtggctttgtcagcgcagacatccactccagcgtgtccggcactgtgctggacgtggcgatgatgcggatggtcaacggcgcaatgtgcaaggcagtggccatcaagaccgacggcaagcagacggtggacccgtcctgcaccccgcccacggtgaatgacaaggacagccttctggcggcgatccgcgcctgcggtctggtgggcgtgggcggcgccggtttcccgacgcacgtcaagctggcggccaacaccatcgacacgctgatcatcaacgctgccgagtgtgagccgtacctgaccaccgacgcgcgggaaatgctggaatgcagcgacaccattatctcgggcatcactgccgtgatgaagtactgcgacattcccaactgtattattggtatcgagcgcaacaagcccgagtgcatcgacctgatgttctcgctgacgcgggaaatgccgggcgtgtcggtcaagccgctgcccatgcgctacccccagggcgctgaaaagaccctcatcgagacctgcaccggccgtgaggtcccccaggtggcggagtccggcaagccgggcattcccgccgactgcggctgcgtggtcatgaacgtgaccagcatctccacgctgggcaagtacctcaagaccggcatgccgctggtcagcaagcgcgtcaccgtggacggcgacgccatcgccaacccgcagaatgtggaagttcccatcggcacgctgtaccgcgatgtcatcgaggcatgcggcggcatcaagcccgacgtggagctgggcaagatcatcttcggcggccccatgatgggcggcgcctctcccagtgcggacttcccggtgctcaagcagaacaacggcctgctgctgttcagccgcaaggccgccaccctgcccgaggccgacccctgcatccgctgcggccgctgcattgaggcctgccccatgggtctggaacccgtggtcattgcggaaaacttcaagaacaaggactttgatgccctgcagaagcgctgcatcgacctgtgtgtcgcctgcggcagctgtacttacgcctgcccggccaagcgccccgtctctcagaccatggcgctggcaaaggcgtggtatctcaaacaaaaaacggaaaaggcaggtaaatgacagatggaagaacaacgcctgatcgtaactgcctcaccgcatatccgggacagcgcctccaaccgcagcctgatgggaaacgtggtcattgccctgatccccacggttgtggcttcggcctttatcttcggtatgcgcgcgctgctggtggtcgccgtgaccaccgccgcctgtgtaggctttgaatatctctatactttgctgatgcacaagcgcaacccggtgggggatctctccgccgtggtcaccggcatcatcctggccctcaacgtgccggtggggatgcccctgtggatctgcatcgtcggcgcgtttgtggccatcgtcatcgtcaagcagatgttcggcggcctgggctacaacgtggccaaccccgctctggtgggacgtatcgttctgtttttgggctttacctcccgcatgaccgcctatgtctatcccgacctggcggtggatgcccttgccagcgccaccccgctgtccagcagcgtggaccagaccaccgtcagcctgatggacctgttcctgggcctgcacggcggtatgctgggtgagacctgcatcgccatgatcctggtgggtctggccttcctgctgttcacccgcaccatcagctttgccatcccgggcagcatcgtcggcaccgtctttgtgctgaccctgctcaccaccggcgatctgcatgtcgccctggcggagatcatgtccggcggcctgatgttcggcgccgtctttatggctaccgactatgtcaccagccccttcaccacccgcggtaagctgatctacggtgtggtcatcggtctgctcaccttcctcatccgcaacttcggcagcatgaacgaaggcatgagctacgccatcctgatgggcaacctgctgactccctggttcaacgcctggggccatcagatccctctgggacgtgccaaacgcaaaaagaaagctgacaaaaaggcggccgcagcctccgccggaaagggaggggcagcataatggcaaacaaacagacagccgcgccgcaggaaagtgcggtcaagaccatggtggtgccggtcatcgttctggtcgtgatctgcgtggtatgcagcgcgatcctggccgtgctcaacgacatgacggcccccatcattgaggaaaatacccgtctggagaccctcaactcctatattgaagttctgcccgaaggcacccaggccgaggccctgacccaggtggagggggagaccctcaccaccgaaggcgtcgagggtgcagcctacaccgccgacggcgcagtggccgtcaagtccgccgcaggcggctactccggcaagacggtgacggtctacgttgcctttgactctaccggaaccatcaccaacatcaaggtggatgcctccacccagactgccggcatcggtaccaagaccggtgacgagagcttctactccggctttgtgggctgggacggctcccagcaggtttccgccggcagcccggtggacgccatcgcaggtgcgacggtatcctccaaggccgttttcaccgcagtcaatcaggccatcgactgctacaacaatgagctgaagggggtggcgtaaatggccgaaaagcaaagcaaatggcgggtatttaccgccggcatcatccgtgaaaaccccgttctgcgcctggtcctgggctgctgctcggctctggccgtcactaccaccgtgtccggtgccctgggcatgggtctggccatgacctttgttctgctgggctccaacattgttatctcggctctgcgcaaagtcattcctgccaaggtccacctgccctgctacatcgtcatcatcgccaccttcgttaccgtggtccagatggtgctgcaagcctacgtgccggaactgtatgacgccctgggcgttttcctggcactgatcgttgtcaactgcatcatcctcggccgtgccgagatgttcgcctgcaagaataccgttatcgactccgcactggacggcctgggcatgggtatcggctacatcctgaccatggtgctcatgtcctccatccgtgagatcatcggcaacggcagctggatgggcatccagatcatccccgagtcggtggaccgcatgacgctgatgaatcaggctcccggcggcttcttcgtctttggctgcctgatggcgctgtgcgtctggatcgagaaaaagaccaaccatcccattgagcgcaagacctgcggcgaggctcttctggaagagcaggagaccgtgaaagaaggaggtgctgaacagtgagcgcggaaaacattgcaacctttgctacgatccttttcagcatgatcctggtcaataactacgtgctggtccagttccttggcatctgccccttcctgggcgtttccaaaaagctggattcctcggtgggtatgggcatggcggtcatcgtcgttatgctcattgccacggccgtgactttccccatccagatcttcctgctggatgcctatgacctgggctatatgcagaccatcattttcattctggtcattgctgtcctggtccagctcatcgagatcaccctcaagcgctatatccccgcgctgtacagcgccctgggcgtttacctgcccctgatcaccaccaactgctgtgtcctgggcgtgaccattctggctgtgcaggactactccggcgacgtggcgacctacggcttcggctttgcctttgcggaggctctggtctgcgccgctggtgcgggcattggcttcctgctggccatggtgctgttctgcggcgtgcgtcagcgtgtggaaaacgccgacccgcccgagtgcttcaagggcctgcccatcacgctggtggctgcggccatcacctctctgagcttcatgggcttcggcggtctggtcgaaaacatcgtcaacgcgatcttgtaagggggatttgaggatatgattacagcgaatccgatcgtctttgcggtgatcgtgctggcggtgctgggcttggcaggcagtgtgattctggttctggcctccaagttcatggccgtttatgaagatccccgcattgccgagatcaacgaatgcctggcgggtgccaactgtggcggctgcggctacgcaggctgtgcggactacgccaaggccatcgtcatggacggtgcgcccacccataaatgcgcgcccggcggcgacaagaccgccgatgccatcaaccgcatcatgggcgcggaggagagcgaccgccccagcatgcgcgcttttgtctcctgcaacggcggcaaaaactgcggcgtgcggtttgagtatcacggcgtgcagagctgcgctgccgcggcttcggtggcgggcggccccacggcctgctccttcggctgcctgggcttcggtgactgcgtcaacgcctgcatgttccacgccctcagcatcaaggacggcgtggcggttgttgaccgcgacctgtgcaccggctgctctgcctgcacccgtgcctgcccccgcggcctgctgaagatgaaaccggtcgccccgcagcctgcggtgctctgccgcaacaaggaacggggcgcgggcgttgtcaaggcctgcaagaccggctgcattgcctgcggcatctgcgtcaagaactgcccgcaggaggccatcttcctgcgcaacaacgtggcccgtatcgattacaccaagtgcaacggctgcggtacctgcgtggacaagtgccccaagaaggtcatccactgggtcgagggcggtcctacctccgtcgacgctccggtacccgattacgcggtgctgtaacgcgctgacccaaccttaaaatcaaaggccccggccctcgggatttctcttgcagagaaaaaaatgagggccggggcttgatttttgaaaaaggctgtgctataatctcttttgttacggatgattagctcagctggttagagcgctgcgttcacatcgcagaggtcgagggttcgagtcccccatcctccaccagaatcccgcagacgatatttcgtctgcgggattttttgtgctgttttgtcggtctccgcaaggcggtgaaagcgcgtcgcaaaaccggcgctgtatcgcgggcaatcggtgaaaaaagatgcgcccgggtttgcggaggggagagcggcatgctataataaggataaattgcggctatgattatcgcttttacgtaacatcttgccattccggcaatgtcggccaggcaaggcgtccgatgtacagcggcaccctttcggtgctttatggtatcataaatcaaacactacaacagaaaggcggcagcgcagatgatccacatcgccattgttgaggacgaccctcaggtccgggaacagcttgcgggatatgtgcggcggtatgagcgccagttcggcaagatgtttgagctgaccacctttgaggacggggaggagatcgtcaccgactaccgggcggcgtacgacattatcctgctggacgtacagatgcggcatatggacggcatggctgccgcagaggccatccgcaaggctgacaaggacgttattctgatcttcatcaccaacatggcgcagtttgccatccgcggttatgcggtggacgcgctggattacgtcctcaagccggtgccgtactttgccttttcccagcagctgcagaaggcggtggaccgcctgcgcaaacgccgcaagacctttctgacggtccccatcgacggcggcctgcgccgcattgatgtgaacaccatctattacctggaaagcgaggggcattccgtccgtatttataccgaggatggggagagcctcgcgcccggaagcctgaaaagctatgaggaaaaactggcggacaagccctttgcccgctgcaacagcggctaccttgtcaatctggagcaggtgatggaagtccagcaaaacaccgtgcaggtggggccctatgccctccagatcagccgacccaaaaagaaagcctttctggaagcactgacggattacatcggaggcagtgtgaaatgaccatcctgcccgatattccccgtctgtatacggctctggccgaatggctggcctgcctgatgtacattatcgccctgcgccggcggttcgggcgcaccgggaccatcctgatcgccgggggctggctggtggggctcagcgtatttttgcaggtcacgggcaacgtgccgctggcctggtggattccctgcatggcggccgccgtggtgggaatgtacagccttttgtatttgtgctgctccctgtccgcccgcgaggctggctactgctgtgcgcgggcgtttattctggcagagtttgccgccagcctggaatggcaggtccactgcctgctgtggccacagcggggggcgtgggaacccttgccgctgcttctgctgattgtgatctacgccggtgtatacggctttgtctaccggtttgaattccgccgtgtccggcgcagaccggaactgggcattacccgccgcgctctgagcagtgccgttgtcatggctctggctgcctttgccgtcagcaactttgcctttgcccagacgggggaggccaccatggacctgttctatatccgcacgctggtggacctggcgggcgtgctggtcctttccatccagcaggaacagctgatggaagccagtctgcaccgggaactggaagccatggacaacgtcctccaccgccagtacgagcagtaccagcaaagccgggagagcatccgtctcatcaaccggcattgccacgatctcaaattgcagatcgcggccatccgtgccgagcaggaccccggcaaacaggcggcggctctggacgagatggaaagcggcatccgtatgtacgaggcccagaataagactggcaacccggtcctggatactcttctgacggcgaaaagcctgtactgccagcagcatgacatcaactttacctgtgtggcggacggccatctgctggacttcatgcccacgggggatatctgcaccattgtgggcaccgccctggacaacgccaccgagagcgtccagaccctggcggacccggaaaagcggctgatccgaacggccatttatgcccagcacggttttgtcatgctgcggtttgaaaactactgtgagacggaggtcaagctggatgccgacggcatgccgccccacggttacggtgtgcggacggtgcgtgctgcggcggaaaagtacggcggcaccgtgacggtccactgtgaggataactggtttatcctgcgggttttgctcccgcaccggagtgaaaaaacgggcagggcgcagcaatgacaaaagggaatgtaccctgaaaatgacgaataacggcaaaggccggcgcatggcgccggcctttgtacgtgcaggatgcacaaagggctttcggtcaaacttgtgcgaaatgtatatgaaaattttgtaaaaaagcggtgcaaaaacaatttatgcttcaaaaatgacagtttttgaaataaccgtagacagttctttgtgaatatcgatataataattttgcttcatgaaggtggcgcgcgacccttcatcgtgtaaaccgaacaacaaggaggaaaataacatgttggctatcaacatcgatgatgtattgaatgtgctgacaacggttgcaccgtatttgatcggattcgggattgttttggtcatcgccatcatcgcaatgattgcctgcaaaaagcagagcaaggctaaaaagtatatggtccgcagccaggccggtatggcaattctgctggctttcggtattgtggcaaacctgatcgcttttggccccatgtccaccatgatctctctggctaccggcggcggtaccatttccgaagagtccaccgacacggccactgcgctgtgcaccaacattgcggaagagggcattgtcctgctgaagaatgacgacagcacgctgcctctggcttccggcgacaacatcaacgtctttggctgggcatccaccaatccctgctacggcggcaccggttccggcgcgctgagcgaggcgttccccatggtcagcctgctggacggcctgaagaatgccggtctgaaccccaaccaggaactgatcgacttctacaccaactacaaggcggaccgtcccgtggtcggcatgtggagcggcgactggactctgcctgagcccgctgtcagcctctacaccgacgaaatgatggaaaacgccaaggcctactctgacacggccatgatcgttatcacccgcgtcggcggcgaaggcgccgacctgcccaccgatatgtacgcgctggccaacggcaccgcggaggatgttggctacgaccaggtctacgacgacaccctcaacgagggcgccgactgggaccagggcgacacctacctgaatctcagcaaccaggaagaggctatgatcgacctggtctgccagaactttgacaaggtcatcgtcgtttacaacggcgccaacaccatggagctgggcttcgtggaagagcatccccagatcaagagcgttctgtggtgccccggcaccggtcagtccggcttcaccggcctgggcaacatcatctccggtgcggtgaatccctctgccaagaccaccgatacctttgtctatgacctgactgccaccccgacctggaacaacttcggcatgatgcagtacaccaacatggacgagttcgctgtggacggcaccctgccttcctttgtcaactacgtggaaaacatctacgttggctacaagttctatgagaccgccgctgtggagggcctcatcgactacgacaccaccgtgcagtatcccttcggctacggcctcagctacacctctttctctcagacgctcaacggcgtgaccgaggctgacggcgtcatcaccgtggatgtcaccgtcaccaacaccggctccgtggccggcaaggacgttgtggaagtctactacaacccgccctacaccaacggcggcattgaaaaggcttccgccaacctgatcggctttgccaagacttctcagctggagcccggtgcgtccgagaatgtcaccgtccagttcaacgtggaagatatggcttcctatgacgaccgcaacgccaaggcctatgtgctggaggcgggcgactacatcatctccatcaactccgactctcacaccatcatcgacagcagcgtctacaacgttcccgccaccatcacttacagcggcgacaacaagcgctcctccgatgaagtggctgccaccaaccagttcgactatgcccgcggcaccgcgacctacctgtcccgcgccgacggcttcgcaaactatgcacaggctaccgcggcacccaccagctacgagatgcctgccgactccaaggcgaccttctacaacatctccaactacgacgcatccgcggatgaagatcccaacgccgaggctcccgtcaccggcgccgagggcgacatccagctggtcgagctgcgcggcctggattacgacgatcccatgtgggacagcctgctggaccagatgaccgtggatgagatgaactctctgatctctctgggcggttaccagaccaacagcatcgacagcatcggcaaggtccgcaccaacgactgcgacggccctgcttccatcaacaacaacttcaccggcaccggctccatcggcttcccggctgccgtcatgattgccaacacctggaacgtggatatcgccaccgctttcggtgacagcatcggccagatggctgacgagatggacgtctccggctggtatgcacctgccatgaacatccaccgctccgctttcgccggccgtaacttcgagtactactccgaggacggcttcctgtccggccagatggctgcccatgccgtccagggcgctgcccagcacggcgtctacgcctacgttaagcactttgccatgaacgaccaggagaccaaccgctgcggtatgctgtgcacctggtccaccgagcaggccatgcgtgagatctacttcaagcccttcgagatcgccatcaagcagggccaggcgggcgccgtcatgtcctccttcaactacatcggcaaccgctgggccggcggcaccaaggaactgtgccagaccctcctgcgtgatgagtggggcttccagggatttgtcctgaccgactacttcggtgtttacggctacatgagcgccgatcagggcgtccgcaacggcaccgactgcatgctggtcaactatcccaccgagaccagcctggtgggcagcctgaccgatggcaacatcagcaacggcggcctgcaggccatgcgcaccgctacccataacatcctgtacacggtggtcaactcccgcgcttacaccgaggagaacctgcatcccggcatggaaggctggcagatcgctgccatcgccatcgacgtggtgctggcactgatcatcgtcgtgctggagatcgcagtcatcaaaaagggctacgacaagcgcaagaaagaggaagtcgaagtctgatctgactgcagggcttcttcaaaaaccgaacgtttgaaattctgacaacgggataaccggctgcgtctggcttctgcttgcaggcaggcgccgggcgcagcccatttatccgggaagggagcattccattatgcccgctacgaagctgacccagaaacttactctggaacagaaatgcgcactgctttccggtgcggatactttccggtcccgcggactgccccagtacggcattccgtcggtctggctgtccgacggccctcacggtgtgcggaaacaggcaggggagagcgaccatctgggcatcaatcccagtgagccggcgacctgtttccccaccgcgtcggctgtggcaagcagctgggaccccgctctgggtgaggagatcggccgggcactggggcaggaagccgccgcacagaatgtggcggtgctgcttggccccggcctcaataccaaacgcagcccgctgtgcggacgcaactttgaatatttttccgaggacccctacctggccggcaagatggccgccgcctacatccgcggcatccaggaaaacggcatctctgcctgccccaagcactttgcagccaacagccaggaactgcgccgcatggccaccgactcggtggtggacgagcgcaccctgcgggaactgtacctgactaactttgagatcgccgttaccgagggcaagcccaagaccatcatgaccagctataacatggtcaacggcgtctatgccaacgagaatgcccacctgctcaaggagatcctgcgggatacctggggctttgacggcgcggtggtcaccgactggggcggttccaacgaccatgctctgggcgtcaagaacggctccacgctggaaatgcccgcccccggtctggattcggtgcgggaactggtcaaggcggtcaaggacggcaagatctcggaggcagacatcaacgcccgactggaagaactgctggacctggtagagtccacctccaaggcgctggaaaaggcgcccaaaaccatcgactgggatgcccatcatgccctggcccgcaaggctgcggcggaaagcatcgtcctgctcaaaaacaagggcgggctgcttcccctggaccccgaggcaaagatcgcggtcatcggcgactttgcccagacgccccgctatcagggcgccggttccagcatggtcaacgcacccagagtggacaacttcctgcaggtgtttgaacagagcggcctcaagagcgcaggctttgccaagggctttgaccgttacggcaagcccgacgcggccctgcaggccgaagccgtcaagctggcggaaaacgccgacgccgttttgctcttcctgggcctggacgaggtcaaggagagcgaaggcctggatcgcagcgacatgaaactggccaagaaccaaatcgatctgctgctggccgtgcatcgtgtcaacccacggctgatcgttgtgctcagctgcggcagcgcggtagagaccaactggcagagccattgtcaggcgctggtctgggccggcctgggcggtcaggcgggcgcgggcgcactgctggatgtgctgaccggcaaggtgaaccccgccggacgtctggccgagacctggccgctgcactgcgaggacaatccctcttacaacaacttcggcaaacccggccgcaatgtggaataccgcgagggcctttacgtcgggtatcgctattaccagacggcaggcgttcctgtgtccatgcccttcggctacggtttgtcctacaccacatttgagtacaaggacctccatgccacgccttccggcgtgtcgctgacggtgaccaatacgggagaccgtgccggcgatgaggtggtacaggtctatgtttccaagcccgacgcccggatcttccgccccgtgcaggaactgaaaggatttgcccgcgtctcgctggaagcaggggagagcaagaccgtatccattccgctggacgacaaggctttccgttactggaacgacccggccaactgctgggcggtggaaggtggcacctatgtggtgcgcgtgggcgcttcctgcgaggatatccgcctggaggcggaagtcaccgtggaaggcaccggccagtctgacccttatgccggtattgcgctgccccattatgcgggcggccaggtccaggatgtccccgacgacgagttcgccgccatccttggccatgccattccggtgtccagggtagccattgaccgcaacatgaccctgggggagatcggccacggccgcagcccgctgggctggctggtccatgtgatccacaagcatctgctgcaaaagagtcttcaggccggcacgccggatctgaacctgctgttcaactacaatatgccgctgcgcgccattgccaaaatgacgggcggtatggtcagcatgggcatggtcgacggccttgtcatggagctcaaaggcttctggatcatcggtatcctgcgggtcctggttgagctggtgcgcaactccatcctcaacgcgtcgatggaaaagcgcctggccgagaaaaaggagggcgactgatgaatttctggtctgactttgccgccaagcacccggcggcagccaaatgggtgcgggagggcggcctctttgtcattgtgagcaacgtcatcacggtgctgaaatacctgatgctccagttcctgcccgcggcctttgcgggcctgggcgacgccagctttggctggccgggcatcccgctgactctgttcggcgagacctttgagtggaacatcctgggctatgaccaggcccacggcggtttggcctatttctgcgcctacatggtggctatggtcatcggcgaggtcatcaacttccccatccagcgcaactttgtgttctgctccaagggtaagctgggaccccagatcgcatggtatctggtggcgttctgcgtcatcacctgcatcgtcaactccatcaactgcatctgggtggcggtggccggtctgctggtccccgatttcatctacaacatcggcacgacggttctcaacggcggtatttccatggtggtcttcttctttgtcaacaagatcatcttcccctcgtcggacagcgtgcagaaaacggctgaacaggccgactgatccttaacgttacaaattcctttcccggcggcacccaatcttccgaatcattggctctgttttcccgccgccgcagcaagacccccgttcacgggcgaccgtggacgggggtcttgtgctgccggggaaaatggctcagacctctgcttccgggcttccgctgcgccggtaccgcggcggacatccagccctttgccgcgccgggttgacggctgtcccggtttgggggtatagtgagaaaaagcgcggcctgctgccatggccccgcggaagggaaggtccttctatgcgcatcaccgttctgatcgaaaataccgccctctccgacacgctgactgccgaacacgggctgagcctgtacctggaataccgcggcacatcctggctgctggacgccgggaccagcggcgcctttgctgctaacgccgacaagctggggatcgacctggcaaaggtggagacctgcctgctctcccatggccactacgaccatgccgggggactggcggagtttttccgccgcaaccaaaccgccccggtgtatgccatgcgcggggccgaccaaccctattattcgggggacggtgaaaaacgccatgacatcggcattcctggggaagtgctggaagccctgccccggcgggtgcactgggtggacggggtgacggcccttgcaccgggtgtgtggctgttgccccattccacgccggggctggagcagatcggcgcagccaaaaagctctaccgcggcacggaaaacggtgtggaaccggatgattttgcccatgaaatgagcgctgtatttgagacggccgggggcctggtggtgttcaacagctgctgccacgcggggctccaggctgtgctgggagaagtgtcccgccagttccccggcaaggggattgccgcttttatgggcgggctgcatatgcggggacgcagccacggctgcgagatctgcaccttcaccccgcaggaactgcaggcggtggcagactgcgccgcagattatggcgtgagtgcggtctacaccggacattgcaccggcggtgtggcctatgaactgctgcggccgctgatgggcagccggctgcacccgctgtccacggggcaggtcatcgaactgcccgactgaaccgaaaggaggaacccccatgtgcggcagataccatttttccaccgcaggctgtccgcccctggcggcactggcccggcggctgcagcgcaccggggaaacggtccctcaaaacggggatgtggcgccctcctgtgaggcgctgacggtggtgcagggtgcagccggcccggaggtctgtctgcggacctgggggtggcccggacacggcggccagatcatcaacgcccgggccgagactgtgaccgaaaagcccatgttccgggacaactttgcccggcaccggtgcgtcatcccggccagtttcttctatgagtgggatgccggacgccatccctaccgcttcgccctgccgggggagccgctgtatctggcgggcatctgcaacgccgagggccgttttgtcatcctgaccaccgcgcccaacggctgtatgcggcccatccacgaccgcatgcccctgatcctgcgccccgaacaaatccgcccctggctgtccgaccctgccgccgccctggcattgctggaaggcacacctccggaactggaacgggaaagcctggacggccagctgcggctggaagatctgacctgagataaacaaaacgcccgtttctgccatgatggcggaaacgggctttgctgtgtgggcggttatgcggcgggcaggatcatgtcgatgcccgtcaggatggtctcgcggtccagggcgctgagggcgtgggctacaagatagccctcggcgtcgatgaagtaggtggtgggcagggcggtgacgccgtaggtgatggcggcatcgtactcggtgtcgtagtagacggggaaggaatacccctgctcctcaatgaattcggaagcgccctccaacgtctcccgggagccgtcggtcatgttgaccatgacaaaatggatgtcctcgccgtattcggcgtagagttcgtcaaagtcgggcatctctttcttgcaggggccgcaccagcttgcccagaaattcaaaatgacgggcttgccgatgaaatcggacagatgcacctcgttgccttccaggtcgaccacggtaaaatcgggggcagcggtaagctgggggtcatcattctcctcatcatcctcggactcctccggggtggcgtcgctgtccggcacctcaccggcatcggagctgtcggcagagggagtgggggaaggggagggttcctcgctggccagggtatcgggggcgtactgagaccccagacggctgtacagcaggaacgccccgcccagcaccagcacaaaggcggccagaaggaccaccagggacagattctttttcatggaatactcctttccggtcagctcaaaagggagagcaggcggcccagcaggccggttatcatcagcacaccgatcaaaatcagcagactgccgctgaccatgttgatgacgcggtagttgctcttgacccagtcaaaggcggatttcagccggtcgatgagcaccgcactgatgaggaacggcacgcccagacccagggagtaggcaagcagcatgagcatgccttccaccacatgtccctgctgggaggccaacagcagcgccgaccccaggaaagcgcctacacagggcgtccagcccaccgaaaagaccacgccgaacagggcagaggagaaaaatcccaggttggaggtgtccacctgacgccgtccgcccgagaacaggttgagccgcagcacgcccagatagttcaggccgaacacaatgacgatcaggccggacacaatgttgacggcagtctggtagcgggtgagcagtccgcccaccgtaccggccagcgcgcccatgagcacgaacacggcggtaaagcccagaacaaagcccgcggcacaggtcagtgtccggcgggtgctgcgctgaccgccgcccgcaaaataggaaatgtagatgggcagcatgggcagtagacagggggaaacgaaggtgatgatcccttccagaaacaaaatgaaatactgcataaggcaggctcctttccgatattgggcaagagggcccgtggtttgccccggcaacatctgccgggcagcaccttagtatatcatatatatcagatttgcacagtggggtccgtgatgttatcacacagcccgctgtttgacagcggggcaaaagcgttttatactcaccatagtgactttgtattgagacggaggtcggaccatgtcgtttgcagaatattttcccgtgtgggacaagctggacaaggcacagcagaagatgcttctggattctgtgactgagcgcagcgcaaaagcggggacggtactgtatactggcggttccgactgtctgggcctggtggtggtcaagtcgggccgtctgcgggcatacagcctttcgggggaagggcgggaaatcaccctttaccgcctgtttgagcgggatatctgcctgatgacctcctcctgcatgatgcacaatctgcaattcgacgtgaccgtcgaggtggaaaaggacgcggagttctgggtcattcctcccgccgtctaccgcacccttaccgaacagtccctggccgctgcgcgctataccaacgacctgctggctacccgcctgtcggatgtcatgtggctgatggagcagatcatgtggcagagctttgacaagcgcctggccgagttcctgctggaggaaagcgccctggaaaacaccacggtcctgaacctgacccatgaaaagatcgccaaccacctgggcaccgcccgggaggtggtcacccggatgctgcgctatttccagggggagggcatggtccgcctggcccggggcacggtggagctcaccgacccgcaggcccttgcccgcctggcggacgccgagaaaccttcaaaataacacaaaatgcccccgccgggataccgactgcatggccggtcccggcgggggcttttttctgccggtgcgcaaaggcggcaggcaggattatttttcgtcctcttcggagtcgggggtgacgacgactttgatcttttccacccgcttgccgtccatggcaaggacggtcacgtccacgttttcgtagtggaatgcgtcgccgacttcggggatgcgggccagctcgtccatgacccagccgctgacagtcaccacgtccagttccttgtcgatgtccagcagctcaaacagtttttcggcgttggtgtggcccaggacttcgtactcgttctcgccggtctggcggatctcctccaccacttcgtcgtgttcgtcccagatttcgcccaccagttcttccaggatgtcctccatggtcacgatgcccacggtgccgccgaactcgtccatgaccacggccagatgggacttgtttttctgcaggtcctgcaacagctcgccgatcagcttgttctcggtcacatagatggccgggcggatgatggtggaaatgtctttgtcagtgtgatagacgtagttgtggaagtccttctggtacagaatgccgatgatatggtcgatgctgtcccggtagaccgggatgcgggaataccccgtctcggcaaagacggcggcgatgtcatccttggaatcatccaccgacacggcggtcaggtcgatgcgcggggtcagcacgtcgatggcctgggtctcggtaaactcgatggcattgcggatcagcgagccttcctgggtgtcgatgccgccttcctgctccgcttcatccacgatggtcagcagttcttcttcggtaagggtctggttgtccgaggaatggaaaatcagggacagcagctttttccactgacggaacaaaaagttgaagggggtcagcaggatcatcagcacatggaggaaaggcgccgagaacttggcaaaggcctcgggggattccttggcgatgctcttgggggagacctcgccgaagatcagcaccaccacggtggtcactgcggtggaaacgctggggcccacatcgttgcccagccatttggcaaacagcagcgttgccatggatgcgcaggcaatgttgacgatgttgttgccaatcagaatggtggacagcaggctgtcgtaattttcggacatgcgcagcaccagctcggcacggctgtcacctttttccgccatgttcttgacgcggatgcggttgagagaggaaaacgcggtctcggtcgccgagaaatatcccgacatgaccacgcaggccacaatgagcagtattgagacggtatcgtcgttcatgaacacattccttccttgatgatccccacggcaagcatcttacctggctgcggtgcgggcggtcgcccgtttttgtccgcgccttccggcgggggagcctgcgccggaaaaagacaacaaaaaggcacagccccatcaccggcggggacggaccgaaacagccgtttcccctgccgctgggcggcggggcggtcagttccggcacatcccgctctggcgggagctatgccttttgctatatgcaacagtatgggttggcatcagcgtcgatgtcggccactgtcaattcctccggtcttgtaagatactctcacatcataccgcaatttatcacaaatcgcaatgggcaaaccgcaaatatccccgtaactgatgaaaaaacgggtcgaatgtgacgtgaaaccggacaaaatgcgcggtcccggcagcaaaaacagggcgcagagggcctcaggcgcgggcagcggcggcagcttcggcgtcggcggccagctgcttgcggaacagcacgcggaaaatcagacggcacagggggccgcagtaaagcagctgccacaaaagggccatgggcagattgcagccgaaggtctgcacccaggtgccgaagctgggctccttgaacagcagggtggcgatcaggctcatgacggggcacatgatgcagacgatcatggtggaagtggcgtaggtgatgaactgcgggcggtcggtggggcgcataaaggtgaacgccagacgcacggccagcttttccaccaggaagaactccagaacaaaggcgatgggcgccataatgggcagctcgtgcagggccagcaggaaggtgatgttcttcacaccgccggtggccagggcgacattgtagacgatcattccatagaccatgatgatggccatgatggcggtgaaaacgacgttctgaaatttggttttcggcatgattctttctcctttggtttgggtaaaatcgtgggcagggggcaaaaaaacggaagcagcaaaactttcgttcgctgcttccttttccgcgacctaccatttgtaagggagtatagcatgccggcaaggggcttcgtaagcgattttttcacttttgtcgggctgcccagaatcattgcgatcctagtgaggggattttgtggaaaggtggctcatccctggccttcaaagcgttctttcaagacctcgtaatgatgacggttggacttgtccccaccgttatccgggaacaggcaatagggcaggctgtcggtggtgcggtgtttgatgacgcagttgcggcagttgccgtgattgggacagcttgtcttggggcacaggcagtcggtgccgccgcaggagggggcggacatggagatcaccttgccttctgcaggagttcggcggcttcctccacagtgaggacccggccagtgctgaccacagtcccgttgatgacaagggcaggggtgctcatcacaccgtaggcggcgatctgggcaaaatcggtcacatggccgatttgggcatcaatgccaagctgggcaagggccgtgcgggtgttggcttccagctgattgcatttggtacagccggaccccaggacctccacgcgaaggctcccggaagcggcgctgccggagggggcgggctgattggcggctgcacagcagcaggatgcggtttctttcttctttccgaacagactcatgacaaatgacctcctagataaacagaaatgcgaacagattgaagagatatcccaccagaatgataccggcggtacaaatagcgataaaaatggccagcagcttggggcgcaccgccttgcgcaacatgatgagggagggcagcgacagggtcgtgacggccatcataaaactaaggactgtgcccagctgggcgcctttggcaagcagggcttcggcaacggggatggtgccgaagatgtccgcgtacatggggataccgaccgccacggccagcaggacgccaagcgggctgctgctgccgagaatggaggtgatccagctttcgggaatccagttgtgaatgactgcgccgacacccacgccgatcaaaatgtaggggaaaaccttacggaaggtggaggacatctgctcccgggcgtaggtaaggcgctgtgtctgggtcagggtgggtacggcgctgtccccggcgtgtacggagcggacaaaaggttccacttcctggtcaagatgcagcttttcaatcagggtgccgcccgccactgccacgctcaagcccactacggtgtaggctgcggcgatcttccagccgaaaatgcttgtcagcagcaacaaactgcccaggtccaccatgggagaggaaatcagaaaagaaaaggtgaccccaaggggcagcccggcactggtaaagccgatgaacagcgggatggaggaacaggagcaaaagggcgttacggtgcccagcaaagcggcaaacaggttggcccggatgccgtgaaagcgccccagcaggcgtttgctgcgctcgggcggaaagtagctttggatatagctgatgaaaaatatcagcacacacaaaaggatggtgattttgatgacatcatacagaaaaaactgtatgctgccgcccagacgggtggagatatcgatggacaaggcggtgaggatgcggccgatgacggcgttgagccatttcatgccaagcagctgatcctgcacaaaattccagatcagtgacattggcagcctccttcctcgcagcaggaaaatccgcccagaaatccgcacagggaatcaagagtttctctgcacagggagtagtgggtccattttccttcccgccgcgcgcagacaaggccgcactcgcacaggatcttcatgtgatgggacagcgtgggctgtgtaatatcaaaggtttccagcagcttgcaggcgcatttttctccgctggaaagcaaccgcaggattttcaggcggttggcgtcactcagggctttacagagtaaagcggcgtccatatcggacatgatgatcacctcacatagataagagtctatatgagattatacactcacatagataattgtcaatatgtttgacgaaaataaatcaccttccggtaaaccggacggcgatgcaaaaaaataccggccccgcgtaccccaccgcggaacaggcggtggggatgcaggcccggtgtgaaattttggggcaggggagcactcattcctccgcaagataggcgtggatgacgtaccgttcgctgccgctgccatagctggaagcgcaggtggataaggtcagcacccggctgttttgcgggacatccaccccggtatcgtagtcggaagcgtcggacagttcctgaatgaaggcgtcgtatgcttcgccggaggtgcggtcggtgctgtacaagtcctcgccgttcgttgcgctgtggcaggaaaagatgtgccaggtctggtcaccctccggcgtgcacagcacaaagtcgggattttcacggtaaaaggattcctcctgatactgcaaaagaccggcaaacatctctccggtgtggatgttgtggccgtagatcacccggtacagattactgtccgcagaggatgccgaaaagaacaggcatccgcacggggagggactgccgtcaaaactgtggtggaggtaggtgtcgttgtcctgggcctggaccacaggcagagacagcggcagaccgggcatctccagccaggcggcaatgtcggggttgatctgttccagtgcggcaaaatcaatgctggacatactctgttcgccggtgctttggtgggatagctgtgccagctcgtcgtagtatcggctgcttttcaggtaaccgtattgctcgtagccgaaaacgcccaggaaccccacccccgccagcagcaaaacaatgcaaagtaccagccaccagcgggaaggcggctgaagcagacggctttcgccttgaaaacttttcattcgtcacgcatccccaatcgccagtataccggtatgcaggaccggcggtagtagtaaagtccggtgacagccgcgccgcacaggcagacgatgcccagcgccagccatacccacatcagcggatcgtcgccggtctgtaccgtctcggtgggcggacccggcgggggagaactctgtgtgacgggcggggtggaaaccggtgtcggtgtgggcgtgggtgacggcgttgcgacgggctgatcctgcatggtcacagtgtaatagccgtgtcccgggatggttccgtcaccattaaagacaaattcaatatcctgggcaagctgatagcctgccggtgcactctcctcatgcaggatataggtgtgaccggctaccagctttttgccgctttcggtagccagggtgatgacatggggctctgtctcggtagtccagcggtcgatctcttccccggtggtcttgtccgtcagggtcagcaccgccccggccaggggattcccggcggcgtccaccttggcaaatttgacgaccagctccttgtcggtaatgatgagggtatcgccgtctatggtgccgttgtcgccgtccagccggatggtgaggtcgtcggtcacggtaaagggaatgtccaggctgactgcgtacccggcgggggagctcacttcatggaggagaaaacggccggggtacagccgcaccgtgtgaggtgtggtgccggacgtccattggtcgatcagcgtctggctgccgtcgctggacaggcaatacagcttgagcgaggccccaggcagttcgtcggtgccggtgatgctgcgcttgctgaaggaaaattccttgctggaatagttggtgaaggtataggtcttgccgtcctcgctggaggtcagggtgctggtatacccttccaggccggtcatgtcctcctccagccagcagttggacatgtcgttttggatggtaaaggtgacagaggcatcatccccggtcagggtgcggcggctggtctgttccacgccgttttccgtgtaatgcagaacaatgacggcggggggatgctcctgcccgccggtttcccagtgtttgtgcaccacaatgtcgccgtaggtggagatcacgccctccatatcggtggggacgctggtcacattgactcggaaggtccagccgtcggtgccgggaacataatagccgtcggtggccgggacgtaaatggactccaccgtcttgtccaccgtgatgccgatggaaaaatagccggggttcgcgtaggtatcgttgccgatgccgttggggaaataaacgtagagataattgccgtcttggtcgaaggaaacgccgccctcggtgtactcgatgttgatgccgtcggggcagagctccagcagccagctgatgtccatgcggagataggaactgcccgaactgcggttttccaccatcagggaggaatcgtccagaataccggaactgccgggcgaaacactctggccgttgaggtatgtcgtaccgttgacgtaggtcacatgggtggagtttgcctcgtcaagctgggtggggtcgttgggcatataggcccgaccgcacagtgcaaaacggaaattgaaggacatggtatcgcccaccgtcaaagtcaggggagtccccgcgtcgctgagcgactgcagttcggaggtggaatactcctgaccgtttaccgtgatggtgatttgcttcatgtaccgcatcagatccacatacccgttggcggaaacatcgtaccccgggtaggaataggtgttctgtccgctgtcggcgtggaccggtacaccgcacagcaaaagcaggcacagcagagcaaacagacggaacagcagcctgaccgcccgggtacacagggatgggctggcctttctggcaaggtcactcattgaatcaacgtccttttaattttgaccgatcctgtgccgcagggcggcatcggtgactttgccgtgctgcccacaccaaaacaggccctgattttgtccttccgggaaaatcaagagcctgccgcgcaatcaaactccaaagaagccgtttgcctttgtgtcacaggaataataccgaattttccaaaaaatcaacgaaaatagtttaacattatatcgtgctgttttcaatagagaaaatggctttgtatagccggaaatcaataaaaacaagaaggattacgaaattaaaattatgttgtattttacgccggcaaaatcaggcggttccgccgctttgccgcaggtcacgataagagaagcagtcccgatgtgattctgacagaacagcgggcagccgtcttttgtgccgctgttgaaaatacagccaagatctgaaaagcttgataaaaacatcgaacctgtgaatattttctgcgcaataatcggcaaaaataaaaaggagggcaggaagaaaagaatagcgggtaaagtttgaaaactgttcataaataaaagtcaattttgtgctatgattgtataaaataagcgctttccccgggcgcaaaaaacggatatcataaaaaacagggtataagaaaaataaggggcgtcagatccccctggaaagaggtttgattttgaaaaaggcattgatcaccggcgtgaccggtcaggacggttcctacctttcggagtttctgctggaaaaaggctacgatgtccatggcatcattcgccgttcctcggtggattaccgtgagcgcattgcccacctggaaggcaatccccattttcacctgcatttcggcgatctgagcgactccatgagtctggtgtcggtcatcggcagtgtacgcccggatgagatctacaacctggcggctcagagccatgtccaggtcagctttgacgtgccggagtacaccgccgacgtggtggccaccggcgttctgcgcgtgctggaagccgtccgcctgtgcggtctggcggacacctgccgcatctatcaggcatccacttccgagctgtacggcaaggtggaggaagtcccccagagcgagacgacccccttccatccgtacagcccctatgccgtggccaagcagtacggcttctggatcaccaaggagtaccgcgaagcctacaatatgttctgctgctccggcatcctgttcaaccatgagtccgagcgccgtggcgagaccttcgtcacccgcaagatcaccctggcggcttcccgcatcaagcagggcaagcaggacaagctctacctgggcaacctcagctctctgcgagactggggctatgccaaggattacgtggagtgcatgtggctgatcctgcagcacgacaagccggaggactttgtcattgccaccggcgagcagcactcggtgcgtgagttctgccgtctggcgttccactacgcgggcatcgagctggaattcaccggcgagggcatggaggaaaagggcatcgacaaggccaccggcaaggtcctggtggaggtctctcccgatttctaccgtcccaccgacgttgttaatctgtggggcgatccctccaaggccaagcgtgagctgggctggaaccccaccaagaccagctttgaggaactggtcaaactgatggtggagcatgacatggccaaggtcgccgtggagcgtgccgaggagcatatccgctgcaacctggaagaatacctggaaaaaggcgttgtgaaataatcggctgtcccgaaacgacaaaccgacgcaatatgaattaggagcgcgaaaaataccatgatggaaaagaatgcaaagatctacgtagcgggacaccgcggcatggtcggttcggccattgtccgtgaactgcagcgccagggctataccaacatcatcacccggactcacaaggaactggatctctgccgccaggacgcggtggaggagttcttcgccaaggaaaagccggaatacgtctttctggccgcggccaaggtgggcggcattgtggccaacgccgaggctctggcagacttcatgtacgacaatatggtcctggagatgaacgtcatccattccgcctggaaaaacggctgcaaaaagctggaattcctgggcagctcttgcatttatccccgtatggcaccccagcccatgccggaaagctgcctgctgacctcggagctggaaaaaaccaacgaggcctatgcccttgccaagatctccggcctgaaatactgtgagttcctcaaccgtcagtacggcactgactacatcagcgtcatgcccaccaacctgtacggccccaacgacaactatcatcccacccacagccacgtgctgccggccctcatccgccgcttccacgaggcaaaggtccagaacctgccctacgtcacctgctggggcgacggcagccctctgcgcgagtttttgtacgtggacgacctggccaacctgtgcgtgttcctgatgaacaattacagcggcaacgagacggtcaacgccggcaccggcaaggaactgaccatcaaggagctgactgagctagtggccaaggtcatcggctacaccggcgagatccgctgggatacctccaagcccaacggcaccccccgcaagctgctggatgtcagcaaggccaccaagctgggctggacctacaagaccgaactggaggaaggcatccgcctgtcctatgaggatttcctcaacaaccccatgcgtgcggaacggtaaaaatcccgggaaggagaaagactcatgaatatcgtgttgctttccggcggatcgggcaaacggctgtggccgctttccaacgatatccgctccaagcagttcatcaaaattttcaagaccgccgacggcggctatgagtccatggtgcagcgggtctaccgccagatcaaaaaggtggacacggatgccacggtgaccattgccaccagcaagacccaggtctctgccatccacaaccagctgggcgaagaggtgggcatctcggtggaaccctgccgccgggataccttccccgccattgcgctggccaccgcttacctcaccgacgtccagggcatttctcccgaggagagcgtggtcgtctgcccggtggacccctatgtggacgacgactatttccaggcgctgaaggacctggccgcccttgccgacaaaggcgaggccaacctggtcctgatgggcattgaacccacctatcccagcgagaaatacggctatatcatccccgcggatgccggccgggtcagcgctgtctccaccttcaaggagaagcccgacgctgccactgctcagaaatacatcgagcagggggcgctgtggaacggcggcgtgtttgcctacaagctcaagtatgtgctcaacaaggcccacgaactcatcgacttcagcgattatcaggatctgttccagaagtatgataccctgaccaagatcagctttgactatgctgtcgtggaaaaggaaccgaagatccaggtcatgcgttttgcgggccagtggaaggatctgggcacctggaacaccctcaccgaggccatgggcgagaacgtggtgggcgacggcatcctgaacgagacctgcaataacgtccacatcgtcaatgaactggacgttcccgtgctggccatgggcctgagcgacgtggtcatctcggccagcccggagggcatcctggtctcggacaaggagcagtccagctatatcaagccctacgtggacaagatcgatcagcagatcatgttcgcggaaaaatcctggggcagcttccgggtgctggacgtggaggaggaaagcctgaccatcaaggtcacgctgaacgccggccacggcatgaactaccacagccacaaaaaccgcaacgaggtgtgggtggtgatttccggcaccggccgcaccgttgtggacggtatggagcagaaagtccatgcaggcgatgtcatcaccatgcaggccggatgccgccacactgtctttgccgacgaggagctgcagctgattgaagtacagctgggcagggagatcagcgtccatgacaaacaaaaatatgctctcgagatctgattgcccggggccgctgtttctgcggccggcgggtaaggactacctttggggcggcacccgcctcaacgatgacttttccaaaggtatcgatctggaccctctggccgagacctgggagtgttccacccatcccgacggccccagcacggtggagggcggaccctttgacggcaaaactttggcgcaagtgctggaagcccatcccgaatatctggggacccatccggtcatccgggacgggctgcccatcctggtcaagttcattgacgccaagcaggatctgtcggtccaggtccatcccgacgacgactatgcccgcctgcatgaaaacggccagctgggcaagaccgaaatgtggtatgtgctggacgcagccaaggatgcctgcctgatttttggcctgaaccgcgacatgaccgctgaggaactgcgagaacgcattgcctccggcacgctggaaggctgcctgcaaagggtgccgatccataaaaacgatgtgttctatgtctcggcaggcaccatccatgccatcggggcgggtgcgctgattgccgagatccaggaaagctccaacctgacttaccggatgtatgactatgacagggtaggcaaggacggtaaaaagcgccctctccatgtggaaaaggcgctggccgtggcggactgcaaagcccgcggtatcccgccccagcccatccgcgtgctgaaatacacccggggctgtgcccgggaattgctgggccgctgcaaatactttgaggtctaccggatgctgctcaacacagagcgctgccgggaaatggtggaataccatgccggggaggagagcttccgggtcctgctgtgtgtggacggctgcggttcggtgcagcagccggacggttcggtgcgcaattttttcaagggagactgcattttcttcccggcggaaagctgctcggtgcatttgcatggccaggcgcagctgctggacatccggggctgaaaacgggaggaaaaaggggggataccatggcggcaatggatcgcgatacgctgtttaccgatgcgggcagtgtccggtcggagcgcgtgctgtataccccctcgccctttgcccgggctaacctggtgcatttgcaggagaccggccgcctgacggccacggcggaacataccagccgacgggaaaagctgcaatcctttctctgctttgtggtccgcggcgggtcggggcgtctggactatgacggccagacctggccgctgcacaccggggacgtggtctttctggattgccgccgcccctatgcccacagcacaggcggcgcggcgggggaactgtggacccttcaatggtgccatttttacggaccctgcgtggcggcgatctatcagaaatactgtgagcgcgggggacggccggtctttcatcccgccgacccggaacgctttgcgggacttttgtcggagatctatgatctggccggcgccgacgattacatccgggatatgtggctcaatgaaaagctcaacacgctgctggcctgcctgatggcggaatcctggcagccctctccccggcaggatcagcgccgcccggcccggcgggacattgccccggtgcgggcctatgtggaggaacactgtgcggaaaagctgacgctggaatcggtggcggagcatttctttttgaacaagcactatctggcgcggctgttcaaggaacagtacggcgtttcggtcaacgggtatctgacccaggtgcgcatcacccgggccaagcagatgctgcgctttaccgacaagcccattgccctgatcggagcggagtgcggcctggacgacgccaactatttttcccgcatcttcaaaaaggtggagggcgttaccccaaaacagtaccgcgatctgtggtgaaaccacgctgcaaaaagcataagggaccggagcatggtcgcagcaaaagcgcctgtgctccggtcctgttttgttatcattctgcgacggctatgtcatctcttttgacttctttttgcagaaagatgtcgttctttttatgcgcaggaaacggcgaagccatggggaacggaatttcgcatcggacgaaaaccggaatacggcttgtgacaggatgagcaccggcaagaatgattttgtgacaatacacggtatttgtctttacatttatatcccgaattgatataataaaatagaaataggaagcggattctctgccctgaaaaatgtccgggcagagtacattctgatataaaagcacgataaaacgaatatatctgcgggagcttggaatgctcgcccaaaaacggacatgccacctccatttgtattcgaatcgagcattgaggagagtgattttgtgaaatataaaacgccgcaatataaacgcattgagcgggatatcagtgaaaaaatctcctccggatattacagcgtgggcaactctttgcccacggagcaggaactgggcaaacagtatggcgtttcccgcgttacggtgcgcaaggcgctggataacctggtagccaaggacctgctgatccgcacgccgggtgtgggcacttttgtcaagcagacgccgacctatcccaccaagaaagtggacctgtgcggctttaccgccgagatggacgccatgggcctgaaagccaccactgaactggaaatgttcgaggtcatccgggccacggaaaatattgcccatctgctggagatctcggaaggggacctgatctaccatttccggcgcagacgttcggtgaacggccgggtgctcatgctggaaaacacctttatgtcggtggacaaatatcccgatatttccattaaaatcctgagcggttccaagtaccagtactttgagaatgtcctggggaaaaagcctgccagcaacgagcaccaggtctttcccatcctggctacggaggaagtggcggagatttttggcatcgacgtcaatacgcccattatccgcattgccaacaccacccgctttgcggacgggcagatcatggactataccgagaacaccctcaactcgccctactaccagctcaattacctgaaacattgacagaacataaaaagcctggccggctctccgcaaacgggagaaccggccaggctttttatgagggggagaagttattcgcagtagatggggctgctccaggcaatgtcaccgtttttctgccagacgcgcagacggtaattgctgccgggaaccagatccagcgtctcgttgatgttgacgagataggcgttttcgggagcggcgcggcggacccggaacttgaaggcactgtgccagatcaggtcgtcgcggtagtggtgtgcgtcgggataccggtcgtacaccattttttcggcttcctcgtattcggagtagacccgggtgccctgcagaaggtcgcggacatacagcgggtagctcttgccattgaccgtcaggtccagcacgtcgtccaggccgccttccacctcgaagatgaagccttcctggcgggtggggctgctgcccatccacttgccggtctcggaggtctggcgggtgatcaggttgaagtcgcagcccttgtcgtcctgatggtcgatccgctgaccgaagctgttccacagcttttccaccgacaggagggtacccggaacacggagactgcccgcccaggtcttggtctcgttgccgggaaaggccttgaggtcgggaccccagccgaactccacctcaaacttgaagcggaacttttcgggcaggggagcgcgctcccagctgccggaatggacgtaggtcttttcggggatgctgtcccgcagcagctcgatgcggtccacggcgttggtgccggtgatggtgatggccagaggctgcgggcctgcgggaacggtctcgcccatgactttgccgccgatggagaagtccactccgatgcggctgcggctgacgccgtaggtgcggccgctgcgcagggcggcccagatggcctctttggtgttgttctctgccagagcgcacatcatgccgtggtcggcctcgccgggaacggcgtggttgtcgcccgaggcaatgacgctgacgtgatggccctgggccaggccggactcatagctggtgccgctgatacgggggcccatatggacgtggcgcaccatggggatggggccgtcgtcgttttcgctggaaccgtggctggagtagatctcggcgatgggggagaacttctcgtcgtgggtgctccagtttttgccgcggctgttcggcttgtaggccagatggtgcggcacggcgatggcctcatgcccggccagctgatcgcggagctccagatatttccggggctgcaggatggcctcgtcgttgttgaggtaaaagacgttgtggtcgccgtccgaaccgtcgccctgccactcgtaccccatgaagaagggccagccttcctgttctgcctgtgcagccagggcacggacggtctcccagtcggcgcagtagtcctcctgagggaccaggtcctccagcgccgcgccggagggcgttttgcggagggcgaagggataataggcaatgggccagaaatccatcactgccttggcgtgttcataccactggggcagctgcttcatctgatgatgatggatgttgctgtgcatatcggcccaaaactgttgatatcgcatagttgctccgttccgccgccgtcgcccggcggcatctttttgtgggggaagtttcaatgcttccgcagacggggtcaatcctcgtcgacctcgtcgtcatcatcgccgggctccggcgggacaaagaggaaggactgctcccggatgaattccactgcctcgttggccagatcctttgccgtgtcggcatcggtgtggctcaacgcagccgtcatcaggatgggcacgttggtgccgctgatgacttcgctgtcggggtagcgctccatcttcaggcggatggaaacattgaacggggtgccgccggggatgtcggtaaagacgaccacgccgtcgcactctttcgccaggcgctgccatacggcgtcgattttttcggtcagctgctccaccgagtcggagggttcaaattccacagcttcgcagtattcctgctcgcccaccagcagcttcagggcgtccagagcaccgggggcgaatttgccgtgtccggtaacgatcattccaatcatgtcagtctcctcttccgtccacgcgggaccgttttgttgaagttacagcagggcgatcaggtcggcagcgggatcgttgggaaccagctgggcagtgatcttggcgccctggtcggccaggtagcggaaatccgccacgtcctgctcgttgacgttgacggtcttgcgcaggttgcggcactcgccgcggacgctcatgttgccaacggtgatggcgtcaaagtggacgccggcctcggccatgatccgcagggaagcgggagacttggtgacgataaagacgcggtcgccctcgtacttgcgggcgatcaggttttccgctgcctttttgggggagaggatggacagcttgacgttgccgggacgggccatcttcaaagctgctttctggatctcatccttgactgcggcggcgtctaccaccatgatgcgggtgggtttcagctgctgggtccaaacggtggccacctggccgtggatcagtctttcatcaatacgaacgtttacgatttccatatctgtcactctcctgtgtgttgtgtatgtgttaagattttttgcgtccaagacttacgtaatcgtcggggtttttgctgctggcctgcatgcattccttgcggttgaccttccactcggggcggacctcaatgggaccggcaagcagcgggtcgttggtgcgctccatgtgctcctgcagtttccggcgcagggtgtcggcgatctcacggcaggcgggatcgtcaatgaggttgttccgctcgccggtgtcgtagaccatgtcgtacagggcctcggcggctttggggcgttcccgcagtcccttggtcaggtagtagtccttggtcagggactcgtcgcagttggagcagttggtcttgagccagtcggtgtcaaagtagcggatgtacttgtagcggccggtgcggacgcagcgggcaggctcgtagctggtgtggaaggtgacctcggagtagatctcgtcccggatggtgcgggaggaatcctccagcatgggggcgaaagaagtgccttccagccagtcgggcgtatcgatgcccagcagctcacagacggtggggtagacgtctacgtggctgatcatgccgttgacggccttgccgttggaggcggcgccgggtttgcgcaggatcatagccacgccgatgccggaatcgaacagcgagcatttgcagtagggagcactcaggccgtggtcggtggtcagcatgatgacggtatcgccgtagatgcccttttccttgagggcattgatgaccacgccgaagcagtcgtccgcccacttgacgctggtggcaaactgtgccatgtccaggcggacttccggggtgttgggcaggggaaccgggggctgcatgaagttctggttcaccgattcgtccacccagtcggggaaacggcggtgggtggcaaacatgccgtaggacaggaagaagggcttgctgccgtcatactgacggatccagtcggcggcggagcgggcgttttccatatcccacttgaccagctcctcctgacggtatccctcgtcggaatgggtcaggttttcgcagtagccgatggggtcggcgtcctccttgttcatgtaccagccggcttcgtgctggatgccgctgagcacggtgtgatagccgtggcggttgagccactggaccagatggcgggagtaatcgatggagaagccccgctgtgccaggcccagcatgccgttctggtgagggtaaacgccggtgagcatggccgcgcggctggggctgcaggtggggcctgcgcagtagcactgctcaaacaccgcggcatccccggcaaagttctcgatgttgggggtggggacgcgatagccgtaggggctcagcagccggccggtgtcatgggtgtgaatgtacagaaaattcataggttgttttctgctccttcctgtgtgtgggggcgggcgttgtccaaaagttcctgcccgcggtaggggtccggccgggtcacacattcccggctgaggggaaatctggcggtgtcccggggctgcatctgcttgccccaggctttcagcagcggatagcctttcatgcgcagccgctgacgctccaggatggctgcctcctcctccggggagggcaggcaggccagcagctcgtcacacccttcggtgacgggcgtgccgatctcctgctcgtcggaggccagatcgtacacccggttgccgtcggggtaatgggtcagtttttttccgtccaggatcacggacttcaaaaaggcggaggcgtcgtcggtgacggtctcgatctccacgggggagggctgaccggagaacaggttgacgccccggctctggggcagatcggcgcccgccgcatccagaatggtgcggttgaggtccagcaggctgacttcccgggagatgacctgactttggcggctgccgtcctcccagatcatggggatgcggaccgaatcctcatacagcgttttcttgccgtagagtccgcgcttgcccagctgctcgccgtggtcggaggtgtagatgaagatgccgtcgatgctgctgcggcggaattcccggtgcagctcaccgatgcggcggtccagctgacggaccatgccccggtaggcggcccggatggtccgcagctgccgcggttccaccggctgtaccagggagtcatagcagggatggcagggccaggaggcatcgtcgagggattcctccggttcgatgctgtcccggaaatcctcctccggacagacaaagggaaagtggggggcatacaggcctaccaccaggaacagcggcttgctgcggggctgccgcaacagctctaccgcgctttgcacgacggcgtcgtcatattcctgggtgggggagatgccgtacccggccaccttgcggcagccggacgcctgcaggctgcccgcgaagtctcccagatcggtgcgggcaacgccccagtactgggtggtgatgtcgccggtcaggcggcaggcaaaaccgtggttctggtcgtggcccttgaagtgcatccgcccggccagcaccgtgtcgtagccggcggcggtcatggcgtgggcaatggtgggcatatcctcgggcaggagagcgtcattgtcaaaaatgccgatctcatgggggagcctgccggtgaggaaactgctgcgggaggggacgcacagcggtgcgttgcagtatgcagcggaaaagacggtgctgctttgggctagttgatccaggcagggcgtatcggtcattccgccgcccgcaagcccggtataacggccgttgtgctggtcgctcaggaccagtacgatgtctttgagttggttcaaaacacacctccgtgccgggatttcatcgggaaagaaaaccggaccgtctgtctcggtggccagcggcacgctttggaacagacggtccgggctcttgcatgatttacaaggttccggttagggattagcccatgatgccgagcagcacgcagatgaagaccacaacgatgcagaccagcaacgccttgatggtgctccagtgatgcttggtgtacaggcgccaaatgccgaggcagaggcacaggggcaggatgccaggcatgatggtgtcaaggatggaggacaggctgatcgtcagatcgccggagacgtactcccagacgatgggcaccttgacggtgttggcagcaacgccgccgacggtaatcagaccgacgatgctcagcgcaacggtagcaacttccatgatcttgccggacaggatcttgacggcgtcaaggccgagcttgtagccgcgctcgaacaggaaaactttcaggaaagcgcagaccaggccgtagaaaacgaacaggaaaacgggacccagcagggagccggactctgcggacaggccgatggcgatggaggcaatgatcgtctggtagacgctgccaatcatggagtcgcccacaccggcgaaggggcccatcagggcgttcttggtgccgatgatcatctcttcggagatgggcttgccgttggcgcggccttcctccaggccgagggtgatgccggggatcaaagcgccgatggtaggctcagtattgtagtactgcatgtggcgcttcagagccttggtgtactcttccttgtcggggtacagctttttcagaggcttctgcaggcagtggcagaaagccaggcccatcatacgttcgtagttctgtgcgcagtggtggaacatcatgtaggtgatggcggaccggcgcacgtcctttttggtcaacagcttggtttcgttcgtcgtagtcatattctcactcatcgtattcaccatcctcatcttctaccggtgcggcagtcgtggtcgcgacggcctgtttgttgccgaacagctcctcaccatagcgggccatgacgtacaggacggcaacggcgatggagagcagggtcagggaaacaatgttgaacgaggtgttcagcacgatcaggaagccgagcacgaacagggagaccatccagccgcggccctcggtgatgacgtacttgagcagcatggcaaagccgacagcgggaacgatcttggccatgatggacagggtggtgatgacgctctggggcagggcacccagcagggcctcgaccaggccgacaccggcgtagttggcaacggtgtacaggatgaagtagaagataaaggtgggaacggtgcccaggatgttcgcgcgtgcaacgccttcgccgtcgcctctctcagcagcggcatcgcccaggtgggggaagaatgcgttgaaggtcatgaacagctggaagatcgcggagcccagcaggcccaggggaactgccagagcgatggcagcctcgacgccgccgccggatgcgatggccagagatgcgccgatgaagcaagccgcagctttatcggacgggagcgcgccgccgggctggatcacgccaagatacatggcctgaattgcagcaccgaccataacgccggtctggacgtcgccgtgaatagcgccgatgattgcgcaggagaccaacggctgtgcgatgccgaagaagccgcctgcctggccgagtagccacggggtacggttaacaccgaagtaccccaacaatgcgattaacattgccttccatagttccataatgattccctccgtttacgtatttgggatttctgcatgaatataataacaaatagaaaacagtttgtaaatattttatgtacaataatacaatacaaagatacaggtggatgtttgtatacttttcacaggaaaaagggatgattcgcagaaataccgaaaataaagccgaaaaagcagtgggaatcgtaaaagcctgagagaaagatggcgacaatgggagcgggaagcgtgtaaaatgaggaaagcgaaaaagacaaactgaccaaaatgttattacattttatggtgggtaatacaaaaagatacattttgagtgttttgtttgtatcttttctgccgcggatgccgcaatgccccgggaagtgcagctcccgtccccggaaaaaacgcccgaacggcagcttttccggcgtacaaatgcagatataaggaaagaaaatgacttgatttttcatttgacggaccgataaataggggagaaaatacaaaatgacgaaaaaacgatgtattttaatgctcttgcaagagaatgaattttcttctatactaaaagcagaaaaaagatttcatcatgacagacagtccatacttatatagaaggaaaggagagacttcccatggcattgccgccccaagaaaacttttggaagctgctgcgttccaagcaggacagcctgaccaaggccgggcgcacgattgccgagtacctgacccagaacgcccagcaggcacaatactggtcgatctctgttctggccaaccaatgcggtgtggccgaggctaccatctcccgcttttgccgtgcccttggttttgacagctataatgaaatgcgcatcgctcttgcccgggccaatgcctcggtggacactccggtgggggagatgttggagcccggtgtcaacaccatgaccctttgccgccatgcgggagcgctggccgcaaaggccatcaacgatacggcggccgtgacagaccctgacgcggtggacaaggcggcggcactgctccagcgggccaagcaggtgttctgcttcggtcagggcagcagtcagctgctggccaatgacatctgggcgagattttcctcgctgtccaccaagttccatacggcgggggacaaccatatgcaggccatcaccgccagcctgatggcccccgaggatgtggtcctgttcgtttcctactccggagcgacccgggatatgatggagaccctgcgcctggcaaaagccaacggcgcctcggtcattctgctgacccacagcctcaatgtgccgggagcggccctggccgacgtggtactgccctgcggtgcggcccaaagccctctggacggcggcagcctgcccgccaaaatcgccatgctctttgccgccgaagtcctggttttgcgctacatggtggataatcaggaactggcttccatcgctcaggtgcgcaccaagcgggcgcttgctcccaaacagctgtaaagccggcaacagaaaacaaaaaccgccgccttcccgatgacagggaaagcggcggttttcttatacaagggggcggccggttaccggacgcggatggcaccgcgctcacagcggttgccccaggcgtcgatgagtttgccgtcgcggtagaccagaatgcgctcgcagttgttggcgcactggccgcagttgctagcacgggtgacaaactccatgtcggccacgtcggcgttgaacggcgcttcctgaccgctgcggcgggccaggatggcaacaccgaaagcgcccatcaggtggccgttggggtcaacgatgacaggcagaccggtctccttttcaaaggcggcacggacaccggcgtttttggacacgccgccctggaacaccaccggaccgacgatctttttgcctttacccacgttgttgaggtagttgacgaccacggcgcggcaaagcccggcgatgatgtcggtcttgctgtaaccgatctgggccttgtggaccaggtcgctctcggcaaaaacggtgcagcgggcggcgatggccgcgggatttttggactgcagtgcaatgtcgccgaactcttccacggcaacgcccagacggcgtgcctgactggacaggaaggaaccggtgccggcggcgcacagcgtgttcatggcgtagtccaccaccacgccgttttcgatcaggatgatcttggagtcctggccgccgatctcaaagatggtgcggacatcggggtagagcgtcgttgtgccgatggcgtgggcggtgatctcgttcttgacgaccacggcacccagcatggtgcctaccagcttacgggcgctgccggtggtgccggcggcaacgatctggtaacgggtggagtccagctgcttttccagcgaacgggacaggcgcttggtcgcgccgatgggatcgccctcggtccacaggtagtcgctggcaaggatgtgattgtcggcgtcaagcaccacgccctttgtggaaatggagccgatgtcaacgccaagatatgctttttccatactcaggtatccctcttcttatggtttggcccgcgcccggcgcgggcggtggcagacttacttgtgcgcctgcttgcgcatggagatcatgtcgtagaacgcctcaaggcgggtgttcaggccggtgtcgctggtctgggtgtcatagctcagatacaaaatcggcacatggtagtcggcactgatgttctgcagcgccgggatggcgtcgatttcgggggtgcatccggcagattttacatggatgatcccgtcaaagccagacttggcatagtgcagcgccgcgtcgatggtggccatggccgtggcgcccatgttgtagtgggcgtactccttgatgcggggcagcattttgcgggtgcggtagtggtacatgcagttggacatgtccatccaccggtccaccagcacgcccatgcgggccagctcaaactcaatgtcgtggttggagaacgggtccatgatggtgtaaaattcgcccaccacgcccacgcggatgggatgcttgggcatgtggatcttctggttttccagcgtgcggagcgtcgcccggcgcagcagttcgatctgcttgatgccatccgcctggcgcagctgcttgagccagttgttgcggatgctctccatggcgcggggatcgtcggcaaagccgatgcggcggcggaacagcgcatccacctcgtcaatggcgttgaccatgcgcaccgtctccaccgcggcggcggtaaagcgcttgatgtccaggtcgggcttgagagcgcggaattcgtccacgaaggtcttgggacggctgaaatcgcactcggcaaaattgacgaagcggacatccttgcccaaatcccgcaggatctgttcatgcagttcgccgtaataacccagacggcaggttccgccggtctggatcagtgtgtcggctccggcgtcgatgcactccagaaagcagcccaggttcagcttgaagggcgcgcagaccgaatccggagcgtaccgggcgcccagttccagggtgtggcgggtcatgcggggcggcatgacataggtcatgcccagacctttctggatcagatgttccatggcgatgccgtagctgccgaactgcggaaagctgatccggctgtccggcggcagaggctgccgatacttgctcacaggcataccgtaccatcctttctcaaatgcaggatatccacaaagctctcaatacgggtctccatgccggcggtgccgtcctggccgtccagcgtcatggtcaggatgggaatgtttttcaggcggcgggtcatgatctcgtcggtcatagaatccggcccgcaggagaaggaggacagcagcacaatgccgtccaccttgctgcgcagctgcaccgccgcgcccgccagttcccggttgaccatccagggcatggtgtcggtcagttccgcgccggactgccaggcgctgtcccgatccacccagtcggaggggatgggcagggcatggttggccaggatggcatccatcaccgggcggccaatgtaatcgtcgtaaatgttgtaggcatggcccgacaccagaactttcaggtcgttccgcgccagtgcggcatccagcttgcggctgttctcggactgaagctgctgctcggcctgcttggccagcagataggcgttaaacacctgctcttttttgaagcccagctttttgcccagctcggcaaaggctttcatctcgctgttgccgcttcgcacaccgatgtcgcaggtgataaggcggatatcctcggtgcggaaggtgttgtataccacgtcgggcagagcacggaatttcaggcagaattccttgtcgcggcccatgtcggccatgcgcggcacaaagatcagatcgcacttgcccagcagccaggccacgtggcccaggtagatcttggcggacaggcagctttcgtcaatggcgtagtggatgccgctttgcaggatggcgcggtcggtcttggggctgacgacgacctcgcatcccagggacgaaaaaaacgttttccacagtacgccgtaccggtaatagtacaaagcgcggggaatcccgatcctcaaggctgttccctccttttacggggcggatatcgacgcagggacgaggataccgcccggcgccgtggtgttgatattcggaatgcttacgaagcatattcaagtattatagcacgtttttatttcaaaatctttatggacttttgaaagagaactcctcactttttgcggaatttgcacaaatgttcagggatagtcaaaaccccggtacaataaaaagcccgtggccggggagcgcttgcgtccggtcacgggctgaaaaattatgtggtttgtttgctgtccgaaccgtcgggggaggtcagcctgcggaaaaaggagaacatgggaatgcagcccacaaggtccgcaatggcccagccgatggggatggagacccagatgcccgcggcgcccagggccggtatggccgacagcgcataggccaatactacacgcaggcccagggagatcacggtgagcaccaccgacatgccggggcgttcgatggcgcggtagaagccgtacagcaggaacagcagagcgatcaggcagtagaaggagccttcggtgcgcagatactgtacgccgatgcccagaatctccacttcctccggctgcacaaagatgagcatcaggggctgtgcaaagacgaataccacagcgctgaccgcagcaccgaacagcatactggtgagaatggcgctgcgggtaccccggcggatgcgctcgtgttggccagcgccatagttctgtgcgatgaaggtggaaaaggcgttgccgaaatcctgtaccggcatgtaggcaaaggaatcgatcttgaccgccgcggcaaaggccgccatgacctgaggcccgaagctgttgacacggccctgcaccatcaggatgccgaagttcatgatggactgctgtgcgccggtcacaaaggacaggcggaacacgtgggccgcgcagggcttgtcccagcgcatatcctgacgccggacccgaaggtcggggcgggtgagcagggcgtaaacgcacagacccaaccccgacagccactgggcaatgacggtggcccaggctgcgccggccacgccgccgttcagacccagaacaaacagaatgtccagggctacattcaaaagcgctgcaatccccaggaagatcagcggccggaccgaatcgcccaccgcccgcaaaagacaggcgtagtaattataaaggaaggttccgccgatgcccaagaaaatgaccaccagatagtcccgcatcagggaccatacttccccgggaacctgtaaaagggccaggatctggtcggtcagggcgaaggtgccgatgttcaggaccagggcggtggccccgatcatgcagaaggagaggaacacctcccgccgcatccggtcggattctccgcggccgaaagagatggagacggccacgccgctgcccatggacagacccagcagaatggaagtcagaaaggtcatgagggtgtaggcggagcccacagcggccagggcgtctgcgcccacataccggccgacgatgagggtgtcggcaatgttgtagaactgctggagcaggtcgcccagcatcatgggcagggcaaaccgcagaagggtgggcgtgatggggccgctcgtcagcgagcgggctgccccggcgctcacaggaaaacctccggtgcgggattcgattgctgtatggctgttgcgcgtctcatgctggcgcgatacctccctgtcagactggttttgccgccccggcggatgccgggggtctgccttcctatgatagaacgcgggcggcgctttcgcaagagggactgtcatagaattttttcttgccagaaaatgtcgtttcttatatactgaacataacatccgtcaaaatcaatataacatggaggggattatcatggctgagtaccatctttgggacgttctggacgagcttcgctcgccgaattacgcatgggtcgatctgacgcattcgctggacaacaacagtccggtctggagcggcatcccggcaggctctgtggagctggccaaaacggtttacgactggggcaacgagatgctggactgcttgatccagaccttcaagttcccgggacagttcggtacccatatcgacttccccggccattttgtgcgcgacgccgccctgtcggaaaagtacggcgtccacagcatgatctatccgctgtgcgtcattgacattaccgccaaggccaagcaggacatccattacgccgtcaccatccaggacattctggattatgagaacaagtacggcaccattccctcgggggcttttgtggcgctgcgcaccgactgggcgcgccgctggcccgatatgggcaacctgtccggcaccgacgaaaacggcgcggacaacttccccggctggtcggtggacgctctgcgctttttgtatgaggagcgcggcattgccatgaacggccacgagacgctggacaccgatgcttccgagctggcggctgccgcaggggatctggctgcggagcgctatgtgctgtcgggcggacacctgcaggtggaactgctggcaaacctggacaaggtcgctcccgcgggcgctgtggcggtggtctcctggcccaacatcgatgacgcgaccggcctgccctgccgtgtctttgccatcacgccccgcgtctgaatgatcctgtaaaccgaaacaaaaaatcccgtccctgccgtgaaaggccggggcgggatttttcttgctgtgtttgggtatgggatgaaatcaggcgcgggaaggggcctcttccaggccggccatccgacgcagcttttcccgggcgaagccgttgaaaatggcgatcacgcggccgacgccgatcatggagatcagggtacccagccccacgcccatcagcgggttgcccatgcaggtgccgatgatgagggagcagcacatgcagcaaaggtcaaagatgtttttgcacaggcccagttccttgccgctgcgggccgagatgctggccacaatgccgtcgccggggttagggataagggccatgtccaccgtcatggccgcgcccacgccggtcaggatgatggcgattaccagcatcaccaggtccaggggcagatttccgttttcataggggaataccactttgatcaggttcatgatgcgggtaaacacgatgctgagagggatctgcaacagataggtccagctgctggccttgcccatgatgaaaaactctgcaatgacaaaggccacgtaaaccacaagcgtcagatcaccgaagctgaggccggtggcctcgctgacggtaaacggcaccgacacgatggccgatgcccccagcccggtcagggaattcagggtgataccgatggccagcagtaccatgcccagtgcgtaaatacaccatcttgctccattgaactttttcaaacaaaacccctctctctgcaaaaagccggtctggaatgcactgcacacgcagcaacacagaccggagctgtaaataaaaagaaagccgttgccggcttgaacacgttccgtcaggggaacgcttgtactatttatggtagcaaatctcatctgcccttgtcaattttttgtctgtcatataaaaacaccggcggcgacttttcatctgaagggaagcgcgttataataacatacaaagcagatacagatcctgcgcggttccataagaaaacaaagccgcaaaattctaactgcaaggcggcacctgccgccttgcagcgtttttgcgatgctttgcagtttttataaaacctttgttttcttatgtcactcgcgcctttctgcgcgggtttcatgggcagccaaagccgcaaaatgcggactgcaaatcggactttgctgtctggcaatgttgctgcgatggctcacggttttggcggtatcttcgggttcctgcgttcctcgcgctttgatatgattgttgatacaggaggacggcaccatgtttgaacaggtggttttgtacgatttcagccccacgggcggtacccggcgggtaggggaggccttttgcaaggccatcggaaaaacggtggcggaggtggacctctgctcgcccaatatgccggagcagccggaaaacgcccagctggctgttctggcggcgccggtgttcggcgggcggctgcctgccactgcggcgcagcgcctggcggagctgaaaggcaaaggattgcctgcggtgaccatcgccgtgtacggcacccgtgcctttgaggatgccctgctggaactcaacgacatcgccgccgactgcggctttcgtattgttgcctctgcggcctgcattgcccagcactccattgtgccggaggtaggtgcaggccgtcccgacagtgacgatctgtccgagatcgccgcctttgcctcccgcgtatgggaaaagtatgccggtgcagactgttccgcgcctcaggtcccgggcaaccgcccctacaaggcggggatggcgtccctgaccgcgcccatcacgctgaaaggctgcacccgctgcggcagctgcgctgcggcctgccccacccaggccatcacggtaggtgggcagggagtacataccaatgccgatgcctgcatcatgtgcatggcctgcacggcggtctgccctgtcaaagtccgcgttctgccctctgaggtgcagcagaaaacggcgcagaagctgcaccccctgtgcagtctgcgccgtcccaatgaattttatctgtaaggttcagtccagtttgcggcagatgtctgcccaggcttcctcgtcaaagcggcggtccttgtagtagaattcccggtcctcctcagtgatggcgcggatgacatggcaggggttgcccaccgccaggctccagtccgggatatccttggtgactacgctgcctgcgccgatcaccacgttgctgccgatgtgcacgccgggcagaatgacggtgttgccgccgatccacacgttgtcgcccaccgtgacgccgatgccgtactcatacagggtgttgcgcaccgccggatgaaggggatgtcctgccgtgtagatggaaacgttgggagcaaactgacagttgtccccgatgaccaccttggccacgtcgatgatggtgcagttgtagttggcaaaaaagttcttgcccaccgagatgtgactgccgtaatcgcagtaaaagggcgggttgatcatggcattttccgagccgggcagcagttccttggcgatggcggcgatctgttcaaagtcggcacggtcgacggtgttcagccgctgaaggatacggcggcagacccgctgctcttccatcacggcggcatcggaaatgtagggcagttccgcgtcacggcgttcaatatgcgtcatagggggcagtctcctttcacgggttcggtatccgctacgggggaaaatggtttcgcggtttgcgcagtctcccggcggttacctatgatataacataccgcctttgggatgtcaatcttgcgggaaatgagaaaagttttttgcttttttggaagccggggcttgacaatcggggatgtgcgtggtaaactatatctcgcatctgaatggcgtgccactgtggaggggtgtccgagtggtttatggagctggtcttgaaaaccagtgacgcagcaatgcgccgtgggttcgaatcccaccctctccgccatttattgatacaacaagtgaatcagttttatcactttgactgtggagtaatactcaagaggtcgaagaggcgcccctgctaagggcgtagggtccgaaagggccgcgagagttcaaatctctcttactccgccaaaacaaccgctcatgattgggcggttgtttttttgtttgtgtatctgtcaaacccggtccaaaacgcctgtatggcgcagcggaccgggtatttttgtgccgcggcaggatggtaaaacaaatgcagaattccgtgctggaacgttgtaatttccggctctgttttccgtcttatagggtaagaacgctgaacaaacccctgtgaagacagaaagaggagggagtccggatgaaacgagaaaacctgcatgtgcccatggaaccaggcaatgcgccgatgccgaagggaaaagcccaaaccggggacagccgcaaaaagccctggtggatgattgcccttgccgggctgctgatcgtggcggtggcgggagggatcgtgctgggcaggggagggcatttgcccaccgcttccgggtacgccatccgggaagcggcctatcccgaaatggccgcctaccccgatgaaaacagcccggattttgagcggcagtatgacgtatggtgggaatcggtccgggcgcagcgccgcccggagggttatgccgacgggctggatcatttttggagcgaaagcatcccgcagtttttggccggggaggagggggaaaacaaggtctattctcccctgaatgtctatctggcgctgggcatgctggccgaactgaccgacggcgacagccggcaacagatcctggatctgctgggggaggacagcatggaaaacctgcgcacgcaggccgaggcggtgtggaatgcccagtaccgaaacgacggcgccaccacctgcatactggccagctccctgtggctggacgaggatgtgcagtttgtgtcccggacgctgcagcggctggctgatacctactatgcatcttcctaccgtggcgcgatgggctcggaggaattcaacaaagaactgcaaaactggattgactgccaaaccggcgggctgctgacagatcagacccaaacgatccggctggatgcagacaccgtgctggcgctggccactaccattcaataccatgccagatgggcggggacttttgacaaaacccttaccgcacccgggacctttcacggcacggacggggatgtggcctgtgatttcatgcatgaccgcagcctggggacctattactggggagaacacttcggcgcggtggcgcggcctttggaaaacggcggcggtaccatgtggatcattcttcctgacgaggggataagcccgcggcagcttctcggtgaagagcagaccatggagttcctgctgtgcaagggcgactggacagacaggaaatatctgaacatcaatctctccctgccccggttcgatgtctcctcccagacggatctgtgcgatggcctgcaggctctgggggtgacggatgtgtttgatgagaccagggcggacttttcccccatggcggcaaacccggaggggatctatctttcccaggccaaacatggcgtgcgggtggcggtggatgaggaaggcgtcaccgctgcggcctacacggtcatggaaatgtccggttctgggatgccgccggaggacgaaatggactttacggtggaccggccgttcctgtttgccattaccagcgatgacggactgccactgtttgtgggcagcgtgtatcagccggcagcgtaattggatggactgcataatcaaacatccggggagcgatggaacccatcgctccccggatgctttgctgctgccgctacacggaccggcaacgattatttgatctcccgcaaaagatcttcggtaggaatcccaaacagcttggccaaagcaatcagattggtggtgctgggatcggattttccgctctcccacttggagactgcctgacggctcacgcccagggcgtctgccacaaattcctgggtcattttgcattccgtgcggtggcgcttgatgacctccccgagagattgagcgttctgcttgttttcttcccggacgggggaagaggccaggtacttccgcagggagcggatggccagatacgccaggtaacccagtgctgccaaaatcaaaatgagcagactgatgtttagcatggtaaataaaaatcggaatatcatttgagccgtgcgcctgcctttctgtcagcagtataccatgaaaaagggcggttgctctaccaactatcgcgcaaccgtaccgccggaaaaggggagaatacacgttccgccgacctcgcctgctgaaatgccgggcgctggcaggcggaacgatcacgccgtacagaaaaaccggccccggcagacagcctgccgggaccggtcttttgttgaaatttgaagtgcagaaagagtggcaggaagttcccacagaaaatgcagaaggggtgccttatagcttttccgctaccttccaggcctgccagaccacagtgcgcagattgcccaccttgcaggcgtcgccgatcacatggacatggcggctcttggcaaaggccgggttgggggtgtagcccacagccagtatcacgtcatcggccgggagctgatggttgttgcccgctttgtcccggacggtgacggagtcggcgccaatctgcgccacgctgctttccaggtggacggcgaccttgttggcttcaaagaagtcccgcagataggaggagttggccaggcacagcccgcggacggccatcaggtcgtttttggcttccacgatgaccggggtcttgcccttgcggtacaggtcgtaggcgatctcgcagccgctcaggccgccgccgatgatgaccacattctgacccaccgggcggccttccagatactccaccgcatccatggcccgttctgcgccggggatggggagcttccgggccgtggcgccggtcgccacgatcacttcgtccgccccaatggtggagagatcggtcaccgttgtgttgaacttgacagggatgcccagctttttcacctggcggcggtaccactcgatgagttctttgtccttttccttgaaatccggggctgcggccgcgataaacacgccgcccagccggtcggtcttttcgtagatggttaccttatggccgcgcagggcagcgatgcgggcagcctccataccgccgatgccgccgccgattacggcaacggttttcggctgtttggcgggtaaaatgtcgtacttgtgcccctgcatggtcatgggattcagggcgcagcgggccatgtgcagtacgtcgttaaagtcctcgtcgttggcggagcctttgtagtgggccagcgggaagcagccgttgtggcagcagatgcagggctggatgtcctcctcccggccttctttcaacttggtgacccattcgccgtccaccaggaactgacgggccacgcccatgccgtcgatctcaccggcggcgatggccttggccgcggcctccggcgtcatgcggccggcgcacaccaccggaatatccacaaatttgcggatgtgcgccacgtcctccagattgcagttctggggcatatactgcggcggatgcgcccagtaccaggcatcgtaggtgccgttgtcggcgttcagcatgtcgtagccggcatcctgcagataccgggcggcgcgctcgctctcttccatgtcgcggcccacttcggtatattcctcgccgggaacggcgcccttgcacagaccttttgtcttgctgaggacggaataccgcagggatacggggtaatccttgccgcaggcctgcttgatggcctggaccgtctccaccgcaaaccggtagcggttttcaaaactgccgccgtattcatcggtgcgctggttggtatagggcagggtgaactgatccatcagatacccttcatggacggcgtgaacttccacgccatccacgccggcttccttgcaaagacgggcggtctccgcaaaggcttttaccagatgccggatctcctccttggtaatctcccggcacatcaggtcctccgcccagcgggagggcaggggactgggggaggcgcacaaaaacgaagcatccacaacgggcttggcgatcgtgcccagcatcttgtttttcagcaggatgctcaggctgtcggtaatggcaaaactgcggccgaatccggcggtgagctgcacaaacagtttggcgccggtggcgtgcagctgttccatgtagactttcaggtccttgaacattcccggattgcggtacagccagcggccgccgatggggtcacgcagcggcgcaatacccggaatgatcaggcccacgttgtttttggcaatgttcaaaaagaactccgccgccactttgtcaaagtggttgggctccatccagccaaacagggaggtgccgcccatgggacacatgacgatgcggtttttgatctccacattgccgatcttccagggggtgaacagcggatcatagcgcgagtccatggttttccactccttttcagtaggctacggggacatcgatctcaaggtcttccagcgggtaggtgacacaaggatggataaagccgaacttgcggtccgcttcccggcggccgtcgcggccatccgcgacccggtagctgccggaaagccatttgctgtggcagaaaccgcagccgccggcgcggcacttgttgggggcgttcagcccggcacgctccatggcgaccagcagcgtctcgttggccttggcggggatgacatagacatcgtcccgcatatggacggtcagtttgaactcgccggcctgttccatgggcagatccccgcagcaggcggcatcccggtggactgcctttttgggcaggttcaggggagccagttcctttgccacaaagtcatacatggcggcggggccgcacaggaagaaggtgcagtctgtcagggaggtgtatttcttcatcagttccgcggagacaaaacctttttcacacccgggctgttcctcgtcgctgagaacatataccaccttgaaatccttgcagcgttgggccaaagcgtccagttcggccttgtaggccagctgggcagccgtgcgcgcgccgtagaacagaagcatggaatagctttcgtcgccgtcggcaagactgccggccatggacatgaaaggcgtgatgccgctgccgccggcgatgcagacgatctgtttgctgtcccgcagcgtttcgtagtggaactcaccggaaggctctgtcatcacaaagcggtcgccgatatttgccttttcgttgagatagccggacacaaaaccggcattttccacagccaggaccagcttgttctccagtgcctgctccggtgtggagacgatggaataggggcggctgaccagactgtctccgatcttgatctggatggaggcatactgccccgcacggaagaacggaaactcatccgcgtccacccgcttgaaggtcagctcccggatggtgggggtgaggggacgggcggcgaccagttccacctgcatgtagccggggtggagctttttggccagcgtgttggtgcggtattcctggggaagcggtttgttgtctccctgagccagcatctgccggcgggtggggaccagctttttgaaccgcagcatatccataaaaccaaagggctgttttttgaaattcattctgccgtcgcctcctttttcaaatcgcccacagtctggcggccggaaagatcgccggagatataggcactggaatatccgctggaacgcatggcgtagccgcccgcaaagcggattcccgggttgatcagggcatcttctttcatcatcatcatgcggggcatcaggctgtcccagtcggcggtctcgtatccgtagatcacgccctccgggtggccgcagtagcgggcataggtggtgggggaagccacgcagatctcctcaatggcgtcccggatcttgcagccggtttcccgctcgaatacgcggatcatgtcatcggccacctgatctttcattttgaaatactctttttcggtgacgttgccccagtcgtcggacatgaacatggtggtgaagtacatcatgcaggtgccttcgggggagcattcggggtaggcgttgttcagacagaccgtcgcctgcacatggttggtgctgacctttttcatcaggtcgtactgtttgacggtgtcggcggtgtcataaatgaaatagttgtggctggtaatgcccagatcttttgcggaacggttgagacccaggaacagagtgaagccgcggcctgcgaatttccggctgttggtggcccggaccatctgctcggtgacggctttcttgtccagcattttgccgaacaccagatggggagagcagttggcaatgatgtggtgggtctcgataaccttgccgtcggtgagctgtacgccgcagattttgccgttgtcatcggccaggatcttttccgcctcggactgataccagatgtcgccgcccagttcccggatgcgggtatccagggccaggctgatctcgtgggagcgcattttgggcatccaggcgtcacgggtgatgtagcggatgaccatggacccgtaatgcaggaagctcatgcggtcgcagtcaacgcccagatagcaccagtaggcgttgaggatgtccttggccttctggggcattttcaaagcgtccagaacttcgttgaccgagtagctgccggccttgacgaaattggggaagttctttttcatgtagttggagtcggtattgccgttgaccgagttggaataggtctgggcatcgcggacttcgttgcacagttcaaagaattccgtgatggatttgcgggattccgggcagtattccaccattttgtcaatgaatgcctgctggccaaagggcatgacgcagtcatattttttgtcggtggtgatcaggtggtaggcttcggggatgcggacccaatcgatcttgtcctccacgcccagggaacggaacagggtgcgcacatcgccgggctcctccggggagccgaaatcgttcagctcgtgcagacttgcctcaaactcaaagcggccccgcttgaagctggtggcaaagccgccgggcaggttgtgcttttccagaagcaggcaggagtatccagcctgcaagatccggatggcggcaaccagaccgccgttgcctgcgcctatgacgaccacgtcataggccttttttgcttttgttgccatagtattcctccttgaatttatatcagcagattccgagaacggttgagccagtgctgcaattcggcttcgcttttgacctgcttatagtagcttaaaatgatgcggtaatattctgtcagttcggtgctgatctcttcctcgctgaaatccagatagcaggtagccatcatgaccgccatggagtaacagtagtattgcattcgccggtgcatctccgcggcctgctgacgggaaagttccaggttcgtttccagcttgcgcagggtctgctcggcgttggggtcctcaaaaaaagtttcccccggtgcgcgctggcgcaggtacaccagctggaacaggttcttttcctgccgtgcaaaatgcaggaaggaaagagccacctgtttatagctgtcggcgtcctcccggagatactgctcgcggatgtaggccatcagctcgtcgcgcagggtctccatgctttcaaactgggagtagatgggctgggtggaacagttcagctcttttgcgatgttccggaccgaaagggccgaagcaccttcctgctgtacaagatgaactgcggccttcagaatgtcctcacgaaaaatgcgctttcgcggcggcataaaaactcctctttcttggtgataaataacacatgttatttataagctattttactatattttttcttggatgacaagagaaaattggggggattggccgatccggcggcgcgaactgtaaaaacggccggacagagaaaaaagaacgcatggcactgcatggaaatccgcggacgggcagatagcggaacggatattccgctgcccggccaatgaaaaactccccggttcagaagaaccggggagtttggatggagtatgtcgcgaaagacgcaccgaaatgtgccggcatcaccaaaaggcaggggaaaaattaccagagcgtttcaacgtactgcgtgtcgatctcccgataagccggtttccctgccagaaaatccgcaaaggagatcaggctgtaacggcccactgccgcaccgttggtggtgggggtgccgtctttctggatgtaggtgacctcatccatctgcatctccatttccaccagcaggctgtcggcgctacgccccaggatcgataccggctgctccttgccgttgctttcatacagcagggggatttccgctgccgagccatcggacaggtccaccgcataccggttttgccggagttcccggccggtgactctcagcagcgcgtggttttccaccaccccttcaaagcggctgatgcccgcggtttcgttgggatcgttctccacttcctgcagcagggcatcgggccaggcaacggcaacttctccggtctgtccgtccggctctatccagtgaacggactggggcagccggttccagccggtgtcacaccagtacagcctgttgtcctgccagagcagggcccgatcctcattgtccatggtggaggtccaggaatccagctcccgctgggtcccgtcatcgatgttgagcaggtacagcgtatgggttccggtacaggaggaaagatactcgtgggtcagccggttgatctcctcctgggaggcgttgtccggaatttcaggtggctggacattttccgcctgatcataatgggatgtatggcagaccaggtcgcgcccactgactcccaggatctgactgtcggagcagtcaaacagcggttccggctctccgcccgaaagggcaacgcggtacagccgggtttggctttcctcggcctggtaggtctgcatggggaaatagagatattggtcgtccgcgcaggtgatctcccagaaatcctggccggactctgcctgaaagatcttgcgccggttttcgccgctgctgtccgcgacgtaaaggatggaacctttgtcctctgtggcagccgcggtcacgataaaggcgatgctccggtcatccaacgcataaagggaggaaatgatctgaccttcgggaatgtaggcggtacagctttcactgttgtgagggcaggagggctgtgcacagagaggcgtgtcgcaggcggaagagtaatcaatatagcacaggagcgagtaatcgctgcgggaaacgatgccgtaccgcccagcttcggaacccgtctgcaggaagcgcagatcatggggatcggcttgcgatgctgcggcctcgccggaactttccgacggcggggcggtgggaggggagacgcaggcggacaggccgaccgccgcgaccagggacaaaaccagggaaacagcttttttcatttggtacaccttcctttcccgtacagaataaaagcccgctgtttccaaaccatttcggaaattcaggaaagcccgtcagccaccgctttcagtgtttcctcatccattgaaacggccccgagggcaaatcgtccgccgccgaaggagcagtagagataaagctgcccctcacaggaccagcaggcggcccccgtttctgtctggagcgtctgccagtcggtcagcccgtccaggccaagatagctgcggtaggctgagagcagagcgctggtgtccgccgaaccttccgcatccatggtgcaggcgacgaccagtccggtctcttcctgctgctgtatcacaatgcttttgctggggcctgtttgtgtctgtacatggcccagataacttttttggacaaagccgtcctcccgaccaatgtaggcgatggcatcgggaaggtcccggatggtgtctgcctccgcaaggcaggcggcgggcagaacaccggcggtttccagttcccgcagcgtatcggccagactgtatgccagcgcctcggcgtccgtctccgagacgttcatatctgtctcggaaccggacaggattcgtttgcggtacaacccgtacaccacggggatgtcctgggcctgctgggacagctgaccttccatggcgggccgcgggacgctgccggagaccaggtttgcgtcacaccagcgcgcgacccctgcgggaagcatcagcaggagaagataggcaggtatcagcagcacggcccacaggggaaaggcggttcttgcggtgaatttcatgcttgcgcctccttcaggtcgacccatacccgggtgccttcgttctcacgactttccagtttcagatcgctgccgtgcgctctggcgattccggcgcagatgctcagccccaatccgttgccgcctttttcccgggaacggcttttctcgatgcggtaaaagggctcggtaatacgcaaaagttcctccggtgccatgcccttgccatggtcctccacgcaaagccgaacgtccgtgccgcagcggtcgcaccgcaccgtgaccgtgttgtcccggggctcggcggctgccgcgttgagcaccagattccgcagcagtgttgccagcaggacccggtctgcctgtacccggagagtatcctccccctgccatgccagacggaaagtgcgctccggcaggctgcggcagacatcctcatacacagccgtgacggcgacggactggaggcagatctcgcccttttccagccccagcaatagcagcagttcccggctcaaggcttccagccgggcagattcccggtaaatgtaatccgctgctttgcggcggcgttccggcggcagctcggcgctgcgcatcagaccggcataccccagaatggcggtcatgggcgttttcagctcgtgtgtaaacgcggcgacgaaccgcttctgtcgttcgctttcttcctgcaaaagaccgatctgctgttccagtgctctggccatgttgttgaacgttcggcccagctgttccagttcgtctctggaagtgatgtccaccctggtgtcggttttgccctcggacagggcggagctggcggcttccagctgcttgagggagcgggtcatcatccgtgagaccagcgcggccgcggcccctgtgagcagcatggcggccgcctgaaacagcagatgctgccggagctgccggtcccgttcccggaacagggaggtgacatcgtaggaactgaccagccagagagggcggtccatcccccgcagcggggtggagagcagcagaaaatatcggctgtcggcatgcaggaaccgcgcttcggtttcgccgccccggatggcggcctgctggtcggcataggaaatgcagtgggggatatcggagtacagcacggtgccgttctctccgaaaattgcaaagtccggggccagctctgtgctcagtgccttttgctgccgcgtatattgcccggcaagagacgaaatgctttcggcaggcgtttccgcggtgcgggcaaatgcggtctccagggcatagcggtcatagaactgctgccggctgctgcggagcagctgctgtttttgcgcctgggaaaagttctgctggatcgtccaggcgccgcccagggacagcgccgcgcacagaaaggtggagatgaccagtgtgagcttgtgtccgaatttcacgtttccgcctccagaatgtatccgattttggggaccgcccgcagctgatgttcccagcccaactttttccgcagccgggagatatggatgtccagtgtacgggtggaagcgtcgctttccacgccccacacccgctcaaacagagtgtcccggtacagcagcaggccgcggttcagcaccaggaccatgagcaggtcgaattcccggggcgtcaggctgaccggctgtccgtccttgctcacggtgcgcaggtcgggattgatttcggtaccccatatcgtaagattccggctgcgctttcccatgtgacgcattaggccgtccacccgggccagaagttcctccggggcaaagggctttgaaatatagtcgtatgcgccggctttcagcccccgcacccgatcctccaccgaggttttggcggtaatgaaaattaccggggtgccggtggggcggatgtagtccatcagtgtgagtccgtctgtgccaggcagcatgatatccagcaggatcaggtcgaacttctctttttcaattaatgtggcggcctcttcgccgtcagatgccttgacgcagcggtattccagctgacccagcgtctcttccatcaggtcggcaatggatgcttcgtcttccacgatcaatatgggatacatagtctccaccttcgttgtctcaattatttctcagaatatcgggaaggtgtttccaaattgtttccgccggatatgcggtcgaaggcccatccgcaaaagcaccggctttcaaaaagaaaaacgagggatttccccgcggctccgcccatagaggcgaaaccggtccgaaagaaatacctggtttggctgacatgatacatgaaccgtgatattatgactgtggaagaagaaattgcgaagcagagagataccaatggaaaagaaggatgcctgctatcctttctgcggcccgctgacagtacagatgaagacggcaaacggcggttcctaccgccaataagaccggattctccgggaattcacggagccggagaaacagggcggtatggaactgtttgccggcgactgcccgctggaggatgtcggcaccgtgctggatgccgaacagcattacaccgtataccatgtgggcagccggtatcatgatttgaacgggcctgatgtggctcagactgaaatctgtaatgggatattgaggaggtatgcatggaaacagaaagtttgttgaagtgtctgaaagaagccccgaatttcgactggctgattgcagaagccggaaaagattccggctttctgaatgcactgtttgagatcgtccggagtgagcgctcggcagtacgctatacttgtaccaaaaccctccgcattttgagcgaacagcagccggacaaaatctatccgtattttggcgatgtggcaacctggctgcaagatcccaacaactttgtcaagtgggacggcatcttgatcctggcaaacctcgcagcggtggacacggagcaccgttttgcctccatttatgaagagtatttcgggttgattcgcgattcaaaaatggtcacggcggcaaatgtggcagggaatgcttggaaaatcgtgcaggctgtgcctgaatgggaaaacgatatcacgcagcggcttctggaagttccgcagatcatttacctgcatcacggagagccttctcccgaatgcaacaacgtcatgtgcggccatgtcctggattgctttgaccgctattttgatctgtcaaacaatcagaaattgatgctttgttttgcgcatacccaactgaacagttcacgaaaatcagtcgctaaaaaagcagctcactttctgaaaaggcatggagtataagcaaactttcatttcggatgttcgcgatgaaaggattgtcagttcaaggtttatgaaaaagaaaagcggcgataaatcatttgatttatcgccgcttttaattggtttgggtcaacaaaaatatttgaggtaactctattctttatagcctggctatcgtaagttgtggccgcaatcccggaaaagcagcagaccggcgggcgaccgtcagggcttaaatgaacaggtttgcacccggccttgattgtcgccctccgtcacgctgaacgggcagacaaggcggccaaccccttaaagtgcctggccgcactcatagataaacatttcgcactggtcattgacggcgggggctttctgataattggaatagacagatatgctcttaaagccgcatcgccgcagatattcgtccatctccccgtatcggtacaggtgtgtctgaaaatccatggtttcactttgcagtaattccgctccgtgatagagttcgtaaatggacggggaaaactgtgtctgacttttttcgtcgtagtggtttttctctttcaggatcaaatcgtatccctcttttgttttcaccgaaacatttactttgtagtcactgtcctcttcacatcggtcaaagacggtatcgactgcaaacacaaatttcccgccgggagccagcaattctttcatcttccgcaaaatttcttggcacatcctcatgtctgtaaacagtgagatggagccggagggaataaaaatataatcaaactgttcctgtacggtatagttgatgatgtctgcctggatcacttttgcgtccggtgctttctgctttaatttcgccagcatttctcctgacaaatccatcccactgatgtcaaagccacgctctaaaaacggaaccaaaaaccgcccgctgccgcacaggggttccaggattgtctttcccttttctgcataggaaagataaaagtccaactcgtcctgtggcgcttgctcatgtaagatttcgtacatttcagtacacaaactgccataatagtttggttttaattcactcatgctattcctccagaattgcttataggaacagtgtctctatatcctgcgcggatatacggttttctctgcaaattccgagttgacactctgtatttatattgtaccacaattccgagagcgtggaagcaggctgttttttaggccaatccccctcttttaggatatatgggacgggtggtcatttaagtgtaggcttgcccatggacgatagagcaggtcaaaagcattatgaaagctaaaatctgcatcggccataagcgaattgtttatgggtgaacgtatcctgatgtgatgatgaactcaaagaaaaaaggctgaaaaccggtagtcgttagttcaactcctcatcaacgcccgaaatgccagaaacattttatacccgcatgcaaaaaaccggtcaaccattcggttgaccggtttggtggttgcggaggcaggatttgaacctacgaccttcgggttatgagcccgacgagctaccggactgctccactccgcgatattttcatccgctcggcaactgccgtatcagatgctgcctatataatatactgcaatccgatcgggttgtcaatagtctttctgaaattttttttgcgagtgtctgtgtggtgtgacagaggggagaggcctctcacaaaaaatacggtgcaactgccacatcggcgggggaaatttttgtatacagggggttcaatttttgccgtttggtgtgttgacgcggtatcaggcaaggagtatgctttaagtagaatccacctgtctgtgacaggaaatgtaaagcacgaaaaaacgttgaaaacgagcggaaatgacaccggcttgcggccgggatcattatgcaggcaacagaggatgaccggcatgaaaagaggctcccgaatcccggaaaggaggaacagcgaagatcggcatgatgcaatcggaccatgggtttgccctgcggcaaaacggggcggacggaaacggaggattttgtatgaaagttgttgtgatcggtggtgtggcggccggaaccaaagctgccgccaaactgaaacgggaacagccggatgcccgggtcgttatttacaccaagggccgggatatttcctacgcgggatgcggtctgccgtattatctgggcggtgacattcccacgcgggaggggctgatcgtcaacaccccggagaaatacgcgggtctgaccggtgcccaggtgtttaccggcaaggaagccatcgccctggacagtgcggccaaaacggtaacgctgcgggatgtggataccggcgccgaggaaacgcaaggctatgacaagctcatcctggcggtgggggctgagccctttgtgcctcctgtggcagggaccgagctgcccggcgtgttccggatgcgtaccccggacgatgccatcgaggcacgtgcctgggcggagcagaacggatgccgcaaggctgtggtggtcggcggaggctttatcggcctggaagtggcggaaaacctgatggcaagaggcctctccgtcacggtcgtggatatggccgcgcagctgatgcccaacatttttgacccggaaatggcgggatatgtcaagcgccagctccaggccaagggaatgcgtgtgctcaccggcacggccctgaaaggcattgcgggaaccgaaaaggcggaaggcgtggagaccgacgccggtctgctgcccgccgatctggtggtgctggccatcggcgtgcgcccggccacggcattcttggaaggcagtgggctggatctgttcaaggggaccatccgggtggatgcccgccagcagaccaacctgcccgatgtctatgcggtgggcgactgcgctatggtgttcaatgcactgaccggaaagccacagtggtcggccatgggttccaccgccaacctgacgggccgctgcctggcctgcaatctctcgggacatgaggcactctacggcggatgcctgggtaccggtgttgtccgcctgatggaaggcctcaacgccggccggaccggcctgaccgaggcacaggcaaaagacgccggttacaatccggtctccgtcgtctgcgtcaccgacgacaaggcacactattatcccggtgccggtgcgttcattaccaagctcattgccgaccgtgccggccacaagctcctgggcattcaggtgctgggcggcggtgccgtggacaagatggtggacattgccgtcaccggtatttccatgggagcaacgctggagaacttcgatacgctggactttgcctatgcgccgccgttctccaccgccattcatccctttgtacaggcctgctacattctggaaaacaagctgtccggggcgtttgagacctttaccccggcggagtacgccgccggcgccgccgcggactaccaggtcatcgacgtacagccccaggcggctatccccggcgcccgctgggtcaacctctccgcagtccatggccccattgagggcctggcgcccgacgcaaagctgcttctggtctgcgcaagaggcaagcgcggctatttcctgcagaaccggctgaaagcctgcggctacaccaacacccgcgtgctggaaggcggcgtgaccttcaaccaagtcaaggtggacctcaaggggaaaatcccgcccgaggagatcaagcgggtcaagggcctgggctgtctgcaggacaagcgctatcccgaccgctttaatgtgcgcgtcattacccgtaacggcaagatcacggcggaggaacagcgggccatcgcccaggccgccgagcgttatggttccggcgaggtcaccatgaccacccgtctgaccctggagatccagtgcgtaccttatgacaagctggacgccctgcgggaggaactggcccaggccgggctgatgaccggcggcaccggctctctggtgcgcccgatcgtttcctgcaagggaacgacctgccagtacggtctgctggattccttcggcctgagcgagaaactgcatgagcggttctacatcggctaccacaacgtcaccctgccccataagttcaagatcgcggtgggtggctgtcccaacaactgcgtcaagcccgatctgaacgacctgggcatcgtgggacagcgggtccccatgatcgacccgtccaagtgccgcggctgtgccaagtgcctggtggaggcaaactgccccatccatgtggctaagctgaaagacggcaccctgcacatcgaccccaatgcctgcaaccactgcggacgctgcaagggcaagtgcccgttcggagtgaccgaggaatttaccgatggctacaggatctatctgggcggacgctggggcaaaaagatcgcccacggccatcccatggataagatctttacctccgaggaggaagtgctggacatcgttgagcgcgccatcctcttcttccgggatgaaggcattaccggcgagcgctttgccgacaccattgaccgtctgggctttgactatgtccagaacaagctgatgacggcaaccgtggacaaatccgccgtgctgaacaagacggtgatcggcggcgccagctgctgagtaccggtggcatctcataacccaaaacgaacggaaaccgggcaggtgacagccctgccccaataaaaaagcacgctgaatctctgacggcaatccgcctaaagattcagcgtgcttttatttgtgaggtcactgccgcgccgtctggcggctgccgcggggaaggaacagcaaggggagaaacgtcaatccttttgcatgacaaagttggtcagcaggatgccttttctttcgacctgctgctcccgcaccacacggtagccccggtgctcaaagaagggtcgggcagtgatggaggcatgggtggtatacgggccgggagcagcccgttccagtgcgtcgcacagggcggtggcgatgccgcggccctggtagtctttgtgcacatacagccggtccagatagccgtcggaagccatgtctccaaagccgacgatcacgccgtcccaaacggccacaaggctgtggtgctcagacagagagcggtcccacgcggcaaggtctacgtgaccgtccgcccaggcatccagctgaggcggggtgtagtcccgggcgttgacggtatgtacggtgtcatagaacagcccggccagggcagggcagtcctgtgtgtggtaggggcgaagctgcatggcaaatcctcctttgggcaaatcggcggggcaggggagagggaatcccgctgcacggcacgacaaagccgccgcggggcagcataagcccgcggcggcgattgggtttgaggggaagaattacttcttctggacgtacttgaggcagtcgagcataactgcgacgaggatgatgataccggagaagacgaactggaggttcgtgtcgatacccagggtggtcagggagtaagtcagagcggtgaagatgaagacaccgacgaccacgccggagatcttaccgataccgccggtgaaggagacaccgccgacaacgcaggccgcgatggcgtccatttcccagccctggccgtaagcggcagaaccggagccaaccatacggatgcattccagccaggagccgaagccgtacaggataccggccaggatgaaagcgcccacggtgacgcggaagacggagataccggagacagcggctgcctcggggttgccgccgactgcgaacaggttcttaccaaaggtggtcttgttccagatgaaccagacgatcacgaccgcagcaacagcccacaggatgatggtggggaaaccgccgatcttggggatgatcatgctggggatatcggtctcgataccgccgaaggaaacgcccttggtggagtaggtgaccagaccgaagatgaccagcatgtttgccatggtggagatgaaggggtgcatcttgaacttggcggtgaagaagccagcgatggtggtgaagatggtgcacaggatgatgcagacgatcagagccaggaacacgcggacgatgaccggcaggccggtgaagtcaaacacatggccgaagaccgagccggtattgacgcccttgtgcatgatgatggtggcggcggtcatgcccataccgaccatacggccgatggacaggtcggtgccggccagaaggatcaggcctgcaacgcccagagccaggaacatacggggagaagcctgctgcagaatgttcaggatgttgttgacagtcagcagcggaacgttcttgacgatgggggtgatgatgcacagcgcgatgaaaatgacgatgatcgcgatgtacagaccgttgcgcagcaggaagtcgcggcggttgaaggtgtacttgtagttctcccagcgctgagcgatcgtctcggcgacggtgaacttggacaggcgcagcatatcgatcaggtgatacttgtaatcgaaagcggcgtgctgacggtccttgacggcctgcaggtccttgtcgcgctgcatcttggcgtcaaacaggcggtttttgtagacgtatttctcgtccttgatctcctgctggtcggtcagcttggcaaccgtggcctgatgatccttttccagctgggcgacagcagcctgatattttgccagagcggcggccttttcttccttgcagctggcaaccacgtactgatagtactcactgttgtagtgagctttcaggtaagcctcggcgtcagcgatcagcttggagatttggtccttgttcttggcttccactgccttggcggtttccagagcagccttcagctttttctcgcgggaagccttttcctcggcagtatagatgcggtcgcgcttgaggttgtccaggtcattctggaggttgacgaccttttcggtgccgtcgacgcgcagttcgtcgatctgagcctgaatcttgccgacgtaatcatcgatcggcttgcggagctcggcttcccgctccgcagaaagaatggtactgtttgtcatcgtactattagccatttgtttatcccccactcacaggtatttcgcactcagcctcaaaagctcttcctggtttgtctccttagtgttgacaatgccggaaagatgtccgttggacataacgccgatgcggttggtaatgccgaggatctcgggcatctcagaggagacgacaatgatcgtcttgccctgttttgccatctggatgatcagctcgtagatctcgtatttggcgccgacgtcgataccgcgcgtgggctcgtccatcataaagatctggggctcacgttccagccacttgccgaaaatgactttctgctggttgccgccggacaggctggagatcatatcgtcgggacccaggcacttggtgtgcatgatcttgatctctttgctggtggctttgaccatcttggggttggaaagcgccatgccggtcttgtactggttcaggttggcaatggtggtattgaaggtcaggtcacatttcaggaacagaccgttggccttgcgttcctcggtgatcagcgcgaaaccgtgctcaatggcctcgtgggcattgttgaagttcatcagccggtcgcggaaataaacgcgtccggccgcgcgggtgcgcacgccgaagatggtttccagaagttcggtacggccggcgcctaccaggccgtacagaccgaagatctcgcccttgcgcacatcaaaggtgatgtcctgcagatggggctcgtacttggtggacaggtgctgaatggacaggatgggctcgccgggggtgttgtccacaggcgggaagcggctctccagagagcggccgaccatggcggcgatgagctcgttcatgtcggtatccttggtagacttggtcatgaccaggttgccgtcacgcagaacggagacttcatcgcagatctcaaagatctcgtccatcttgtgcgagatgtaaatcagcgaaatgccctgggatttgagcatccgcatcatttcaaacaatttgtcaacttcctgcaccgtcagggaggaagtgggctcgtccaggacgatgacctgggcgttgtaggagatcgccttggcgatctcacacatctgccgctgcgaaaccgacatgttgcgcatcggctgggtcaggttgacggtcatgcccagtttgcggaacaggtcagccgccttctttttcatttgtccttcgtcaacgacgcccatggagttgaccgggtaccggccgaggaacaggttgtcgatcacactgcgctcgaggcactggttcagctcctggtggaccatggcgataccgttttccagggcatccttcgggccggagaagctgatctccttgccgttgaggaagatcttgccctcgtccttctggtaggtgccgaagagacatttcatcatggtggacttaccggcgccgttttcgcccataagacccatgacagtaccgcgctttacatccaggttgatgtggtcaagcactcggttgcggccgaatgacttgcacataccgcgaattgacaagacgatatcatctttcgcttctgccattctcgttactcccgtttctgcatattgacgggggagaccccgcctacgttttcataaaaaagcgctattagggagggtgtattctccccaatggagaaattccttctccctaatagcgttgtggttacttagtggtcaggtttcagtgcagtcgctcaggatcactggctcagcagagaggtgtaggaggacgcgttgtcggtcttaaccatgttgatggcgaaggcgtcgtacgcatcggggttgcccagacggttggtgatgttgccctcggtctggccgtcgccgccgatgtagtcaaccttcaggttgagcagatcgtcgtacttctccagcaggggctgataggtggcgctcaggaagttgtcggcagcattgtagatgtcgagccagacggtcttctcgggatgagcggtggcatccagctggttggaaaccggagcgtaaggaacggtggaatccaggtaatcctggtagttgtcagcggtgacagccacgttcagagcgtagtaagaacgggaagcctcgtcgtagtagtagacctcgtcgctcaggacgttgccagcgtcgtcagcagtggcgataccggtgttgatgtcaacgccatcgagagcgttacggatgaggcggagggtcaggtaagcctgaacgtcagcgtgctggctgatggttccgccgtaaccgtcggcgatggcttcaacagcgtcggcgttggcgtcgtagccgaaggtgggaacgcctgcgtcacgggaccagatgttgaacatggccatgcccatgccgtcgttgttggagatgacgaggtcgatgttctcgcccatggaggaggtccaggtggtcagcgcggtgctggcggtggaagcatcccaagtggcgccggcggagttcttcatttcctgagaagcgagctcacggacgatgaaggtcttgccgtcaacttcgatggagccgtcctgaacctgggtggccttgccttccaggttggtgccgacgggatcggaaacgatgccgttctcaccctcaacagcggtgcccagagcagagcggacgccgcgggtacgggcgatggagtcgttgtggccgatatcgccgatggccaggacgtagccgatgatgccgtcgccgttgcggtcgatggtgtcggcgtgggccgcgatgtagtcagcgaccatcttgccctgcagctcagcgccctggttggcgtcgaagccgacgtagtaggtgttgtcgttgaaggtcagagcttccatgtccagctcgccggtggtgctgttggagggctgacggttgtaccagaccaggggcttgtccttgttggcgacagtgccggtctcggtggaggtggaggtagaagcggaggcatcctcagaggtgccggccgcggaggaagaacccgacgcggtgtcgccggagcaggctgccaggctcagggccatagccgctgccagggtcagtgcaagtgcttttttcatagtcgttctcctttttgtctttcgatttggcgaaccctccctatctgggcccgcctgacactacttatgctaaaggaaaacgagtgcaaaaacaaggtgaaatttcaccgaaagaggggcaaaaaattatccaaataagacaatatgcaaaaacaagtttggcttctattgtgcaagttgcttaattttggcgctgctcaaaggcaaaaagggccttttggctgtccattgtaaatatattgttacgatctacgatccgggtggaagtatccacggtccgctccaggccggaaccctgtccggtcagcagtttgtaggcgctttccacgcccagatagcccatggcataggggttctggacgataagcgcatccacggagccttcctgcagaccgtctaccgtcaccacgttggagtcaaacccgaccagaaacaccgtatccgaaaggcccagctcctccacggcgctggccgcacccacgcaggtgggctcgttgaaggccagcagaacgttgatctcggggtactgctgcaaaagaccggcggtatcgttctgggcgtgctgagcttcggccagggtgttgatgacggcggtgatctcggcacggccgctggcagtaaaggtgtccacggcaccgcgttcccgctcctggccgttggcgctgctgatgtcatagttgacgatgccgaccttcagctcgccctccacccggtcaagggcggcctgggcggccatctgtccggcggcatagttgtcggtgccgatgtaggtgctgaccgcctccgagtccacattgctgtcgatggccacgatcttgacgccctggctggcggcacggtcgatggcatcggcgttgttctcgtaatcgatggcggaaaagaccagggcctcggcgccttcggagacagcctgtgcgaccatctcgttctgggtctcgtagtcctcctccgtctcggggccgaggatgttgagcttgaggttgtactcggtggcggcggcttcggctccggcaaagaccgacagccagaactcggtctcggtggattttgccaccagtgccaccgaatgctgcgtcgacgataccgtgtccgacgcacagccgcacaggcaggcgagggccagcgccgcgcaggcgaatgcccgtttatttcgtatcatggtcgccctcccgtaccttgggcatgcggatttccacacaggtgccgacatccggctcgctggtgatatgcagcccgtaatttttgccgaaatagattttgagccggtcgttgacgttcttgatgccgatgccggtgcggtctttgggaccgcgctgcatgatggcttcgatctgctccggcgtcatgcccacgccgttgtcctgcacaaagaaaacgatgtccccgccgtcctgccggacccgcacgtcgatgtgcccttcctccaccatcaggtctagaccgtggttgatggcgttctcaatgatgggctgcagggtgatcttgttgcagagataatcgagacattcggggtccacgtcaaattcgtaggtgaactggttcttgtagcggtatttctggatctggagatagctctccgcatgctcgatctccttggagatggggatgagctcgtgccccttgctgatgctgatgcggaacagccgggccagggcatggaccatcttgacggcgtcggcggtgcggccctgctcacacatccaggcaatggagtccagggtgttgtacaggaaatgggggttgatttgagcctgcaatgccttcagctcggtcttgcgcaggttgacctcctcctcacggacggtggtcatcagttcctgaatgcgcaccaccatgtgcccgaaggaattggacagttcctgcacttcccgggtgccgcccaccggacggtaggtgaagtggtccgcgtcggtctcgaagctttccatggcggaggccagtccgcgcaggggacggcccagcagctgggaaagcagccagctggtcagcagcgccgcggccagcaccacaaaggccagcaaaatggaaaggtggatcatctcggtgacgttgcggttgaccagttcgtctacatagctgacgcccactacccgccagtcgctgttttcgatgctggtgacgcagtaaatgacggtgtcgtccgcgtaggcgccgtcctccagggcggccagggcagaggtgtcctccgacttcagccccgaataaatgagctgctgctgggggtggtagatgatgttgccgtcggtgtccatcaaaaagcagtaaccgcgctgtccgatgcccacgttgttgatgtagctggaaatgctggaaaagctcaggtccagggacacccaggcggcttcctcgctgccggtcagcggagcggtcatggtgacgacccagggatagtaaccttcaaagatggtctccacgtggggcgcagtcatataaggcccgccggaagagcgagccttgtcaatgtcgaaggaaaggttctggaaaatgttttcctttggttcgtggttcagggaccagcagtccagcagggtgccgtcggaggaatagctggtcaccgccaccacatcggggcggaacttcaaaaaagcggacagcagttcatcgcggctgtccgcactttccgacatggattgttccaccagctgcatggcctggtccatatccagcagatagtttcccaccgtgttggatacctgggagaccgcctgggcactgctggtctgggcgctctgcaccatggcgctgcggtaccggtccaggaacaggaagatgcagcagcacaggatgacggccaccacgcccacgaccatggagacaaggatggtcgtgatgcgcaggccggtatgcgggcagcggtctttcaagacgcgtcacccgccttttcggagcccagtctgcgccgcagggcgttgggggactcgccgcagtattttttgaagcagtagctgaaatagtgctggtcagtgtagccgcagcgctgggcgacctcctggatcttgaggttggaggatgccagaagctcccgcgcggcgtccatccgcttgcggatcagaatgttgatgaaggtctcgccggcatactttttgatgcaggcgctcaggtggttggggctgacgtccagcattccgctcagggacaccagggacaggtctgcgtccatgtaatgctggtccagggcgtccaacgcccgcttgcacagcaggttgccgcctttggctgcggggacaaggtcactgatgaactgggcaccgccctcggtggggtcgccctggcgcagggcttccatggcttcccggtaggcatcgtgcaggccggtcagcgaccgggccgcacggctgacgccgatgcggcagtgcttgcccagaacgcgggcggccacctggggaatctcgtcggccagaatgtgcaggtactcgtcaaagtcggaggggttgcccagcagcaccgagatgaccttgcccgccgcaaaaaagctgacgctgcgcaggtatttggcggccagcgtatccaccgacgtcacaaaggagggagcggtgcagttggcgccgtcctcgtccagcagggtggagaccatcacggtatagcagggcttgtcatccagatcgcgcaaaagcccgcactgccgggcgtaggcttcggcctgggcctcgccttccgactcggcatagtcgtccagcaccaggggcatcagcatggcggcgcgcatatcctggcccgcggcctgggcatcggcctggcggaacatggcaaacttttcgtcgatcttctgacggatgttgcgcagttcggcggcaagaccctccatggtcaggggcttgagcatatagctgatgatgttgtactggatggcctgtttggcgtactcgaaatcatcgtagccgctcaaaaaggcgatgttcatggcggggcggatctcccgcacctgccgggccagctcgatgccggaaataaagggcatccggatgtcggtcaaaagcaggtcgggttcgcgcttttccacaagctgcagggcgtccaggccgttgctggcgctgcctaccagccggaaccccagttcctgccaggggatcattgagcagacagcttcgcgcagttcgtcctcatcgtcggcgacgatcacggtgtacaatgtctttgcggccattgggatccatgtcctttctcttttgggggcgctgacggccgcggaaaagcagggggctttccggttgtctcagggggcggcgtcgggggcgcgtttttgggaaacccaaaggtttcacacagtttcattgccttaagagtaaaacatttgcacgctcttgtcaatttccggtctgaccccgctgaccgccgcgtataccattatagtagcagggcgaaatccgccggaaaggacgcccctcggcaacccgtgccggagccaggagacagcaatcgccagaaaagccggaaaactgcatcttgtgttcaggtcccgagtgcggtacaatagataaaaatctgacgctggcaggagcggaaggctcactcggcggattttttggaaaagcatgacacggggtgaatgatggtccccgtccggcggcagacctgccgcacaaaccgacaaacaatatatggagatgaatgtatgggtaaatatttcggcaccgacggcttccgcggggaggccaacatcaacctgaccgccgaccacgcatacaaagtcggccgtttcctcggctggtattataatgagaagcgccgccgcgatgcagaagccggccgcgccgttccgcaaggccccgcccgcatcgtcatcggcaaggacactcgccgttccagctatatgttcgagtacagcctggtgggcggcctggtggcctccggtgcggacgcctatctgctgcacgtcaccaccaccccctcggtggcctacgtggcccgggtggacggctttgactgcggcatcatgatctcggcctcccacaacccctactacgataacggcatcaagctcatcaacggtcagggcgaaaagatggacgaggagaccatcgccctggtggaagcttacctggacggcaacctggatgccttcggccagcactgggacgagctgccctttgcccacaaggacaagatcggctgcaccgtggactatatctccggccgtaaccgctacatcggctaccttatcagcctgggcatgtactccttccgcggcgtcaaggtcggtctggactgcgccaacggctccagctggaacatcgccaaggcggtgttcgacgccctgggcgccaccacctatgtcatcaatgccgaacccaacggcctgaacatcaacctgaacgccggctccacccacatcgagggcctgcagaagttcgtggtggagaagggcctggacatcggctttgcctacgacggcgacgccgaccgctgcctctgcgtggatgaaaagggcgaggtcatcaccggcgaccacatcctgtacatctacggccgctacatgaaagagcgcggcaagctcatcggcaataccgtggtcaccaccgtcatgtccaacttcggcctgtacaaggcgctggatgagctggacatcggctacgccaagaccgccgtgggcgacaagtacgtctacgagtacatgcagcagcacggctgccgcatcggcggcgagcagagcggccacatcatcttcagcaagtatgcctccaccggcgacggcatcctgaccagcctcaagctgatggaagtcatgctggcccgcaagaagcccatgagcgaactggccgcccccctcaagatctacccgcaggttctggagaacgtcaaggtcaccgacaagaccgcggcccagaacgacgccgatgtgcaggcagcggtcaaggccgtggccgaggccctgggcgataccggccgcatcctggtccgtgagtccggcaccgagcccctggtccgcgtgatggtggaggcccccgacaaggagacctgccagaaacatgtggacagcgtggtcaacgtcatccgggaaaagggatacgccgtcgactgacggggaaaaatctccttgacgggagcagttttctgtgatattatgataaagccgcttggcaagggcacgaaaagtgcgtctgttcgcagacaccgcctgacccagcgagacttattgaaagaggttttacacatgtacgcagtgatcgttaccggtggcaagcagtacagcgtcaaggtcggcgacagcatcttcgtcgagaagctgggcgctgaggctgattctgaagtcacctttgaccgtgtcctggctgttggcgaggagggcagcgtcaaggtcggcgctcccgttgtcgagggcgctagcgttgtcggcaaggtcgtcaagaatggcaagggcaagaagctgaacattctgacctatcgtcccaagaagggcagcatggtccgcaagggccatcgtcagccctacaccaaggtggaaatcaccgcgatcaacggctaaggagggaacacacaatggcacataaaaaaggcgtaggctccacgaaaaacggccgtgactccgaggcaaagcgcctgggcgtcaagcgcggcgacggccagttcgttctggcgggcaacatcatcgtgcgtcagcgcggcactcacatccatccgggtgagggcgtcggcatcggcagcgacgataccctgttcgctctggttgacggccatgttcatttcgagcgcatgggccgtgaccgcaagcgttgcactgtcaaacagtaaaaaccagcttgggcgggccgccaaggcccgcccaaatttttttgggcagactaaaaaccacggcagacggttctgcctgtattgcacttctgcggcaacccgccggacggacggccgcggactgtctgaccggatcgattcgtaacaacgcgggggccatgcttcccgcccaggcaagaaagaggtaatacccgatgcccggtaattttattgatgtagcgaccatctgggtccacggcggcaagggcggcgacggctgcgtcagcttccaccgcgaaaaattcgttgcggcgggcggtcccgacggcggcgatggcggccgcggcggcagcatcgtctttgtggcggacgacaacctgtccaccctgatggacttccgctacaagcgcaagtacaccgctcccgacggcgagaacggccgcggcgcccgccagaaaggccgtgacgccgaggacctggtcatccgcgtcccccggggcaccgtgctgaaagaggcggagtccggtctggtggtggcggacctttccggggatgaacccgtggtcgtggccaagggcggccgcggcggctggggcaacgcccggtttgccactcccacccgtcagatccccaagtttgccaagcccggcctgcccggtgaggaactgcacctgaccctggagctcaaggtcatcgctgacgtgggcctcatcggcttccccaacgtgggcaagtccaccctcatcagcgtcatcagcgcggccaagcccaagatcgcaaactaccacttcaccaccctgacccccgtgctgggcgtggtgcgcgttggccccgaacagagctttgtctgcgccgacatccccggcctgatcgaaggcgccgccgagggcgtgggcctgggccacgatttcctgcgccacgtggagcgctgccgcctgctgctgcacgtggtggacgtctcaggctgcgagggccgcgaccccaagcaggattttgaacagatcaaccatgaactggaaggcttctccgccgagctgtccacccgcccccagatcgtgctgggcaacaagtgcgacattgccaccccggaacaggtggaggaattccgccagtatatcgaggccaagggcctgaccttcctgcccatctcggcggccacccgccagggcatcgacggtctgcccgccctggtctggcagcggctgtccgaactgcctcccgtcaaggtgtatgaggcggagtacgtccgtcccgacctgtccaaccagcccaagcggccctttacggcccagcgcaccggcgaacatgagttcagcgtggatgcaccctggctggagcgtatcctggccggcaccaacgtggaggactacgagagcctgcagtacttccagacccagctgggcgattccggcattctggatgaactggtccgcctgggtgttgaagaaaacgacaccatcaagatcggcgagtacgagttcgactatgtctactaagaaaggcggcgcagcatatgctgtttgaagcagcgcccaaaattgacatccgggagcaaagcccgctgtccctggcatttgtgggggacgcggtgctggaacttctggtgcggcagcgcctggtggagaccacccggttgctgcccggtcgcctgcatacggcggccacgcggtatgtgtcggcccgcgcccagagcagggaactggccatcctggaaccggtcctgaccgaggaggaagccaacgtgctgcggcggggcaaaaacgccagcaaagccacggtggccaaacatgccaccgcgcaggagtaccgtgcttccacgggattcgagtgcctgctgggctacctgtatctgaaaggccgcaacgaccgcatcctggaactgttcgatatgctgtggcagggctttgaccccgacgccgcagagtgaacggcaggaaaaacgacaaagcaaggcagcggcagaggggccgcccgtgatggggaatgcccgctctgccgctgcctttgttctgacagcagggatcagaaattacttcttgcgttcgccgtccatgcacttgccgccgcagttggtggcacggttggtcgtcttgctggagacgctgttctcggcggcattgctgccggtcttgttggtcgtcttcatgcgctcggacgccttgttggtggtgttggtggtgcgattggtggttttctgctgggttttctcgttcttggccatggtgggacctccttccctgaaagttctggtcttcaatggccgccgcagccgtgtccggaccgcgcagatcctcttccggcggccgcacacggctgcccgagcccctgccctgtcaaaacccggctttaggtggtcacgccgatagtttgcccgccccctgagccgaatatacaatctcatgatcgccaaaagaaaggagccgctgttctatgcccgaatattttgagacgcgggaacgcgcactgctgggcgtacgctatgaggaactctaccgccccgccaccgagacggctgcccggggcgtgacggtcaacgctctgcgctgcacacccggcgaatttgcagccggggcagggatagagctgtcgccctcgcccttttgcgaccgggcgtttctggctccggcggatttccgccccggacggcacccctggcaccatgcgggagtattctatgcacaggaacccagtgcggcctccgccgcgccgctgctgggggtggaaccgggcatgaaggtctgtgacctctgcgcggcccccggcggcaagagcagtcagctggccgcggccctgcagggaaaaggtctgcttttggccaacgagtatgtggctgcccgggcggagattttgcgccagaacctggaacggatgggcgtggccaacgccattgtcaccaacgaaacgcctgcccgcctggccgctgctctgccgggatattttgaccggattctggtggacgctccctgctcgggggagggcatgttccgtaaggagcctgccgctctggcccagcacagcgaggccctggtgcggcaatgcgcggcgctggcggcggacattctggacgcggcggcggaactgctggcgccgggaggcgtgctggtattttccacctgcaccttctccccggaggaggacgaggcccaggtggcggctttcctgacccgccatccggagtttgtccagcaggacctgtccggtgtgggcttcggccgccccggtgaggccaaccgcgccccggaaacgccgggcttttcggcggctgcctgccgccgtatctggcctgccgacggcggggaagggcacttcatcgcccgcatgcaaaagcgccctgatgctccccgggcggaactcccccgcgccgagcgccctgccaaaaagggcaaaggccgggaaaacaaaggcaagggcggcgcggcagatgccggtgcggcctggcgcagctttgcaaaggaatgttttcccacccttgccggctgcggggtggagacacccggcgaactggtggtgctgccgcccgaagaactgcccccgctggggcgcctccatgtgctgcgggcgggccttgtggcgggccgggtgcagaaaggccggtttgtgccggctcacgctctgttcatggcccgcggtgccgagtgcatcaaccgggaaaacctgaccctggatgacccccggacgctggcctggctgcgtggggaggagatcgacgccgccaccgcccaaaacggctggtgtgccgtctgcgtggacggctatcctttgggttgcggcaaagtcagcggcgggcgcatcaaaaaccactaccccaaggccctgcggatgctgggttgacccatgcgcagaatgccctctgaatggcggtatttgacccgttttttcggcaccgtccggtcttgactttggcgggaaatttgtggtaaaaaagaatcagccgtgtagcacatatggtttgcgcaaagcgtatagcaactctgtccggagctgctatgcgctttctttttttgctgtgctgccatgctgaaatttgcaaaaaggcagccgtgactgtgtgcatcggctgtcggggaggaattcaatgatacgcacaaaaacacagggaatcgttttcgggattctcatgtcttacgccatggcctacggtatggaggtctacaacgtagccatcaaggaaggcgtcgatctggcagcgggcggtttgagcaacatgaccaacctggtgttctgggatgctctcaaagaggcttcgtatatggggatcctggtatttcttttttccaacctctggggcaatcgactgggtgatgcttttgcccggcggcactgtgaccccgggaaagacaacccctacctttgccgtctgctgcgccagggcggcactgtggcgatcatgtgccctaccatgagtctggtggcatccgttttgttcaacgttgtgctgggaggcgcgccctggtggcagcttccggccatctgggttgggactgtgctcaaaaatttccccatggcgtttttctggaacttttttgctgcggcgcctttttcccactgggcatttgaacggctgttcccccagccccagaactaaaaccatactggtggggcaattcccataaaaataaagcggtgctttcccgtcctccttgcaggaggaacctggcgggaaagcaccgcttttattctgatgcgggaccggaaacacctgccgcaaatctgcggcgggtacaggtcaggccgcgggctggctcaaataatcgtcggcaaagtcaaataccgtatcccagtaatcgtcgcccagggcgtacatggcctcgccgtggccggcaccctccgcgaccagtttgagcttgtcatcgccgggcttggcgttgtacagctcgtccagcatttcaaaggggatgaagtcgtccagcgtgccgtggatgaacagcatgggcttgtcacagagagcgacctgctccagggcggaagcctcctggaaggaataccccgctttcacctgggccacggcctgggcagtgtagagcaggggaaactccggcagaccgaagcgcaggctcagttcgctggaaaacacatcccacacgctggtgtagccgcagtcctccacaaacaccttgacggcgtcgggcgtttcctcaccggcggtcatcatggaggtggcagcacccatagagatgccgtgaatgacgatctcggcctcggggtcacgggccaggacccagtccacccaggccagcacgtccatgcggtccagccagcccatgccgacgtagtcgccctcgctgtcgccgcaggcccgcaggtcaggggtcaatacctgatacccggcatcgtggtagtgctgggcaagggctgttgcccccagatggctgccccggtagccgtggatggcaatgacccagcggtggctgtcgttggggtagcagacgccgtacaacgcaagaccgtccgtcgaggagatagtcacttcctcgccgggattggcggagaggaaggcttcgctggcggtctcctgggaggctttgttctccgcaatggtaagggcgacaccctcggcagctgggtcaacatcaagggcgacctcccggttaccgccgtcgccgctgcggccgatggcgtaatccaccagatagttgctggcaaacaggatcacggccgccaccaggactacgatgaccgccgccgcgatacccaatcgctttgccaggcgggaatggttgcgttctttggttgcagtttccatacctttattttcctttccttgtccggatgcggacgtggaaaagtatacgacaaatttcgaataaatgtcaatatattgaactaaatagagcgcaaaacaaacaccggcttctgcgggcgtgtgctctgcaaaagccggtgtttgaagatggggaatggggagaacgaaggtgacggagaatattctccgctatggggatggtcgtctgaaagaggacttagacctgacggtaagcggatacaccgtcggtcagttcccgtacggcacgggtgcaggcatcccagtcgcaggcggccagtgcggctttggggaccagggcgctggccaagcctacggccaggtaacctgcccgaaggaagtctgcggcgttggaagcgctcactccgccgatggccatgtactgggtctggtcataaggaccgcgcaggcttttcacgtagctcaggggcatatccccggcggggaacagcttcaaagtggaaaaaccgtgatccaggcaggcctgtacatcggtgggggtcatgacgccgggcagcagcggcacgttgttttgctcgcaatagctgagcaccgattccggcgcgctgggggtcagcaggaaaccggcaccggcgtccagcgccatctgggccagctccggcgtcacggcggttccggcacccagcaggatctcgtcgccgaatgctgcccgcagcagtcggatctgttcaaaggcgccgggggagttcagcgccacttcaaagaagcggacgccgccgtccattacggcgcgggcataaggcacggcatgctcattggggacgttgcggaaaattgccagaatggggttttgttccaccatggtgcgcatatctgccataaagttcacctctctattttcttaacggtaaatttcagcctgaccatgcagggcggcttccatttgctcccgggtgggggtgccctcaatgtcgccgggggtctcggtggccatggcaccggccactgcgcccatgcggccgcaggtctcggggggcaagccttgcagccagcctgccaggaacccggcattgaaagcatcgcccgcgcccaccggctccacgcaatggcagggccacggcggaatgggaaggggaggctgccccggcaccgccacggtacagcccttggctccgtctttcagggcaatgacctgcacgccgtgttcaaacgccatttgactcaaaacattgatgtcgtcggtatcaaacagggccagggattcctcgcggcccagaagcaggatcgtgctttgcagagccaggcggcgcagcagcggtgtgtggtctgtgccgtgccagagcttgcggcggatgttggggtcgaaactcatggggatgccttgccgctgggccaggtctgccgcggccagcactgcctcccggcagctgtcactgagaaccggggtgatgccggtcaggtgcagcagacccacgccctcaaacaattcgggggtgatgtctgcagggctgagagtactggccgcactgccggcacggtagtaggtgacccgtgtctcacctgaaccgatctgtttgaacatcagcccggtgggatggtggctgtcaaatactacgccggaacagtctaccccttcgccgcgaatacggctgcacacaaaggcaccgaactcatcgctgccaaggcggctgaaccagcggcaggggatgccgagctttgcggcatcgatcgccacattgctctccgcgcccgccagtgtcatgcggtagccggtgacataacgcagcggaccggccgattccggcataaagcaggccagcgtttccccgatggtaagaagtgttttcacggatgactcctttcgaaagccggtcaggactgggtcagctcgatctcaagggggaaatcccagcagtccccggcggacagtacagggcaggcgccccgggacaaagccagcggaatgttgtcatagtagccgttggcgggttccagcgcacagtttacgtcgccccggtagcccccggcggtggcccaaaagcccagatagggcagggcgtccgggtcataatgcagggtggctgtcacgccggagcggggataccggtaacggcaccatcctgttttgacggggccgtcggcgtagaatttcagcatgccttccgggggcatccgccgcaggtccagaggaccctgcggaccgtctgccagaggatagctcaggcactggccggcttttcccaacaggggactgtcaaaaacgttttccacggtggtgacttcgggaggaaactcgatacacagttcctcatccgcacggaccagacagtgacatacccacagggcgggaatatcccgggaagtggggttttcgatgtgatagcggcagacaaggcgggaaccttccagcgagaagcgcttggtgtaccggtatcccagaagcgggctggcaaaagtcaggaccagcgcatcgccgtcgggacgggcgtcaaaacaggcactccacagttcgccgtggtcggggtaggcaacagcctcgtcccccacggagacggtgcaggcatccacggtgggaaatgcttcgtcgaaaccgcaggcctcaaacagggaaaagtcatccccacagtgcgccgccgcaaaagcgggcttgggattctggaacaacagttcaaagcctttgctccgcaggatcagcgaggcaactttgccgccgtggcccggcaggaccacggcacgcaaagcctcgttttgcaggatccaggcttcactgcccataaaagtatcgtgctgaagcatggcaggtgcctcccttgcaaatggcgggaaacggtttacactgcacgactgtgcagcagaatcccgatgtgattggggtccagcttgcgggcctgtgcgaagcagtcccgggcttcctcggtgcggccgcggcccatgaggcccaggccgcgcatgaacaggcagtggacccggttgcggatgtccagatcttcctcaaagatctgcaggtcgggcagagacaccgcgaaataatcgatctttacatgatcggtcaggtgctgctcggcgtagtcgatcagcttgttgaagcggctgcgggcaccggcctcgtcgccgagggcgcggtgagccagaccctgatagtagatcatctcggggggctggtcgttgtagtacatcatgccggcgggttcggacaggccgacacttgccttgcgcaggcaggcctgggcttcctcttcgtggccaagagcgcgctcggccagacccagatagtagtaaatgtcgttctcctgggcaccggccagtttgccttctcccaggttgtggggatagacggtggcctggcggagcaggtcggcggccttggcggcgtctccgccgtccagtgcctgccgtgccatctcggtcagggccagacgatactgggccggaactttgccttcgccgccttcccagggatggaaatgacggcccatcagcatggcgtaggcttcttcgtaacggccaagagcgttgtgcagcgcaatgtattccagatacaggtcgtcgcgcttgctcaccaccgggagatgcttctccagcaggggcagccgtacggaggcatccatacccagctttttgcgcagctgatccagctccatcaatacgcgggcatcggtctcgtcctgggcaaaggcctgttccatttcgatcagggcatcctggggacggtcgtacttgttgaagtaggcaagagccagattgcggtgagcggtggggaagccggggtcaagatcgcggctgcgttcccagcaggccacggcgtcgtcatactgacgcttgtcataccacaggtcgcccagatagtagaagcctttggcgtcgccgggattcttctgtacggcttcctgaagtgccagcaggtcttccagacgatgggggaagcagtagtcgctgggggcgttggcagccagcgtgcgctgtgcggcggcttcctcggtgcggcccaggcgctccagcatccatgccagatggtagtgcagcaggggataggtgccgccccggcggaggctgtccgcaaggatctcggcggcttcttcatacagtccggcttcggcgtattccagagccagttccagcgcccagttggcgttggtggaaaggtcgctcagcatggcctcccgggcggaaccgcccagctcccagcgggctgcgtagtccatgggatcgatgctcaggctctgacgggcaaagtcggcagcttcctgcgtgcggcccaggtgacggagaatggcggtcttgagactgcgggctttcatgttgtggcagccttggaccaggctgcgctccacatgggccagggccagatcccagtcgccttccatggctttcaggcaggccatggcgtagaaggcgggaccctgccatgcgccgctccaggtcgctttgtagaatgcgtcataagcgtcgctgttctggcccagcagtttcaggcacaggcccaggttgtagtagggttcgctgtcgtaggggttggggttggagcgggtgtacttggcgatggcggcgcggaagtaaccctcggcctccgtcagccgtccgcggcgcatcagcagcaggccataggcattgttgatgcgtgcatcggtgggatcgcgcttgagaccctcaaggtagtagtcctccgccaggtaggtggcgtggcggtactgctcaatgtgctggccgtagaggaacagatcctcgttggtggggaccttgtccggatcgggaacggccttggcaggatcgggggtcttttcgatggtttccgcctcgggggtatagtgcagcagttccttgcctgcggcgttgtagacgcgcagggtgagggcggtggcgtcggaaccggcgttttccacgcgggtggtcagggtctggaccggggaaagatccagcgtctgctcccacagcgggcagccgccgcattccagaaccacacgggcgccgggcaggtcgccggtggcgtagacggccagatcggcggtttcgccgtccagatccagacgtacggccacatcggtgctggcgcagcgaatcatgcctacgtccttgtagggcatgaagtactgggtaaaggtcttttcctcgtagggagccagccaggtgaagtcgggctggttgtcggtaaagcagccggtcatcagttccacgtaggggccgtcttcgtccgtcaggttgcggtcccatgcctggccgaagtctccgcagccccaggtccactgctttttgccgggggcgacatggtggtcggccacatgcaggatgccggcatgcttgccgtggtcatagccgcccacgaaatcataatccgaatggtaagccatgtaggaggtggggaccgggatgttcttgtagcgggagatgtccacaccggcggagtagtcctgcttatagtagacaccggtggcgatggggaagcgggagacatcccgcttgccatggtccatcacggcgtggacgtcgggcgggaacaccgactgggtgtcctggttgacaggcaccgcggggttggcccaccacaggaaggtctggggcatggaggtgcggttgtacagctgggcatcgatgcggatgtacgccttgtcgggatagatggtaaaactggccatgcccttggtgcggaacatgttttcgatttcgctgaccaccacggtgcagctgccgtcgggattttcccggatggcgctgtccacgggatcaaaggtgctgggacggtggtgctgaggccagttgaactcgatgccgccgctgatccagggaccggccaggcccaccagggcgggcttgatcacatgattgtagtagacgaaatcgtagccgttggtcttgtcgtaagcgcgctggatgcggccgcccagttcgggcagtaccatgacaaagaggtacttgttctccaggcacagcgccttgtaggtgcggtcttccttctcgtcatagatcttgtcaatgacgctgtgggggtagaccttgccgctgctgccctggtaaacgcgcttttccaggaacatggggtttttgtccggctgaccgacggggtaggtggggatggtgacatcctctctccaaacggccacgccctctgtgatatgcttcatcataaaaggggtcctcctgtaaaaatgaatggtcacaaagcggtcgaagccgcctgttggtatgcttgctccacggcatgcacgcaggcatccaccgtgtacgccacaatgtgctcacccagttccggggtggcgtctctggggtcatagcgtacggtatagtctgcgttggggccttgagaaaaggtttcgctgtccacaatggcgtaacgggtgttggccagcttaccgggcttggcgggcagccggtccagcgatacggcctcgggacaaaggtgctggaagatggcggtctcggccaggccggcatggcccagtctggcgccgcagccttcgcacaggctcatcagcgtcatcacgcagtggcccgatgcctccgacatttcccggcagacccgttccaggatctcgatctgggcgtcggcgccgtggccgttgagccagacgatctgtgcaaaacccatctccagcagcatccgggtctgctggcgtacgatctgctcaaacagttcgggcggccagtaaaaactcttgatgctgttggcggggaagtccatgcctacgatctgctcctcgccggtaaaacctactttgcgcagagtttcgggactgcgaggcgtctcggtgccgatgtaaagcggcggcagtaccgcgccgccggtacggcgggcgcaggcttcggctacggcagcggcattgacggtgtccatgcccatgcccatgtgggggccgtgccattccatgctgcccaccggctgataaaccaggctccgccctgtaagaagtgcctgaagttcatcaggaagcagcgtctcaaaacggatcttgtgcattgtatccctcgccttcgtttcaaaaaagaagagcggggaccgcagaggctagcctccacggcccccgcagggttaaacggttgattggacggttgtgtgatcagctcacgtactcaggcatgatgctggccagatcgtcgccgtattccacgatggtggcgtcaacggcgtaggtctcggggatctcggtgccgttctccaggtagtcgaccatgaactgcgcagcagagctgccgacgtccagagcggagaagtaagcggctgcacggaagcaggaatcggggttgttgaactcgtcctcgcacaggtagccgcccaggccaacgaccatggaatcagcgcccagaccggcggactcgatcgcacgggcagcaccctggctgctctcgtcggaaacgcccagaaccagccacttcttgatctcgggatggccggtgatcacggcgttggcggcctggttgccgtcctcggcggtggtgtcacagtcggcgcggaagatgcggtcttcggggaagtcgggcagaccttccttcagagcgtccacttcgccctcggtacgggggacacaggaggaaacggtgtcggcggtcatcagcaggatgccgaaggtctcgtcttcagccaggttgttctcggtgatgtagttgacgccccactcaccggtggccttgccgatgctgtaaccgtcaatgccgacccagggagcaagtttggtgccgtcctcggtttccagcgcgtcgtcaactgcgatgacggggataccggcttcggtcagcatatccacggtggtctggctcaggttctggtcaggcacgcagaccagaacgccgtcgaccttgtcggcgatgatggtgttgagctgctccatgtaggtagcggcgttcagatcgcagtccagatacttccaggtgtaaccggcttcctcaaccactttctgggatgcttcgccttcctggatgaaccaggtggcggtgcccatcttgtacagaccgacgatggtcttgctgccggtggaatcggcatccgtagcggtgtcggacgtggaggcgccgtcgctggacgttgcggcagaggagctgccggaggagctggagcagcctgccagtgtggcaaacatggcgagagacaggcctgcggccagtacttttttcatggtctttttcatggtgttcttcctttcttgaaggttattttattcagcgggcgcccatggcccgcacggatccgaatggaaaggtcaggatgctttggaggtggggaccttgatgccgcgggtggccatgctctcggcgagggcgtgcttgtcgcggttgtgcttgcggtagaagtcgaaggccagagcaacgaccagcagtgcgccctgcgcaacttcctgccagaaagtctgcacgccgaccatgttcagaccggtcttgaagccctgcagaaccagcatgcccaggaaggtgccgaagatggtgccgacgccgccggtgaaggcagtgccgcccagaacggctgcggtgatggcgtcgaattccaggccttcacaggcggaaggctgtccggagttcatacgggcggccagcaggatgccggcaaaggcggccaggccggattccatgatgtgcagcttgaagatgatggcggtggggtttagaccggccagacgagcggcgtaggtgttgccgcccagcacgtagatgctgcggccgaagtaggtcttgctgagcatgatgccgaagaggatgaaggcgatgagcagtagaaggaccggtaccggcaaaaagccgaagatgcggtagttgccgaagctgatgaaggttttgtcgctgatggccacggccttgccgtcacagagaatgtaggcgacgccgcgggccacgctcatggtggcgagggtggcgatgaagggctggagtttcaggaaggtgaccagtccggcgttgatggcgcccaccaggcatccggcggcaacggcgatgaggatggccaggatcaccgggatgccgtcccggaccaggatggcggccagcacgccggcgcaggctgccacggagccggcggacaggtcgttctgaccggcgatgatcaggttggtttcaccgatggctacgaaaccggtgagggagcaggcaatcaggatgttgatcatattgctgccggtaacgtagttggggttcagacaaccgaacaggatcaccagcaggatcatggcagcgatcagtgtgatcttgtcggcaaaatcactctttttcagtcttttcaaaacattgttcatggttatgcctcctgtttttcacgctgttgctgagtgctgtcggacatagcgtacttcagtactcgttcttcggtgaattcgccgcggtgcagttcgccggtgattcgtccctcgcgcatgacgaggatgcggtcggacaatccgatgacttcgggcagttccgaggaaatgacgatcacggccatgccttgctgggcacattcggtgatgatgcggtagaactccgctttggcaccgacgtcgatgcccttggtcggctcgtccaggatcaggatcttggggcgggtctccagccaacgggccagaatgactttttgctggttgccgccggacagctgggcgatcagcttttcggaattgggggtcttgatgttcaggtccttgatgtctttttgcgcgatctcttcctctttgtcggtcatcaggaagccgattttgttgcgcagcgatttgagcatcgagatggtaatgttgccccgtacggaaatgttgggcaggataccctgcattttacggtcttcaggaaccatggcaaatcccagcgccagggcctgggcgggggacttgggggctacggcgctgccttccagccggatggtgccgttgtacaccgggtccagcccgaacagggcccgcatgacttcagtgcggccggcaccgaccagtccggcaaaaccgaggatctcgccccggtgtgcggtaaagctgacgtcgttgacgtagggcgtgcaaaggtgttccacttccagaatggcttcaccgggggtcttgttatgcggcagttcatcgtagatgtcgcccagcgaccggccgaccatcaggcggatcatctgatcttccgaggtagtggcctgatccacaacgtcaaccaggcggccgtccttgaaaatgatgaccttctgggcaacctgtgcaatctcgttcatgcggtgggagacatagaagatgactttgccttccgctttcagctcgcggatgatcttgaacagcaggtcgatctcgttgtcgctcaggctggcggtaggctcatcgaaggcgatgatgttggagtcacggttgatggccttcatgatctccaccatctgctggtgggcgatgctcagggaaccgaccttggtttcggggctgatatccagcccgaagcgtgcggcgatctccgatgtgcgccgatacatcagctcaaaatctaccatgccgtttttctttctgggccagtctcccaaaaagatgttttctgccacgctcatatccagcaggatctgacgttcctggtagatgacgctgacgccgtgggcgatcgcgtctttgggtgtggcgaaacggatcggcttgccattgatcaggtactcaccgaaatcgggctggtagtctccgttcaggattttgagcagtgtggatttgccggctccgttttctcccaaaaaggcgtagacctgaccgctttccgcctgaaagctgatgtcgtccagtgccttgacgcccgggaaatacttgctgatgtgcctgaattccacggaattgctcatgcaatgtacgccccctttttatgtgtaagtggtttgcgttcgttgtgttgtgtgttggaatgtttacgttaacaccttgtggccattatagcttggcggtttttgagtgtcaacggttttcacaattttcgtaataaaatcaaaaaatgataaaagttattgtgcaaaatgacgcttttggcttgaaaggaagagatttactttcaaggtaaaggctgggaaaaggattacaagacggtaaaacacttttggctttggtaaaaaccgccgaagaaatggtgcgctaattggaaaaggtgtataaaaatcgtgtgtagatataagaaaatatagtgcaactattgcgcgacggaaaaaggatgctataatcgagttaacgtacacacttttgaaaaaacgtgttacaacacaaaaaagtgaaaaggagcacacatcatgcaaagaaaaacggcattggtcaccggcgccagccacggaatcggcaaagcgattgccctggcgctggcaaaagcaggatatgatatcgcagtaaattactgcaacaaccgggccggggccgaggacacctgcgcccgggccagggagctgggagcgcgggcgattgcgctgcaggcggatgtaggcaactaccaggcgctgaccggcttgttccaggcttttgaggccgagtatggagccatggacctgatggtgaacaacgccggcgtcagtgagttccatcctcttctggaagtgaccgagcaggagtgggagcgtgtcacccgcaccgactggaaagcagcctattttggcacccagatggcggcgcgcaacatggttgccaatcaaaaacggggcgtgatcgtgaatatcacctccaaccatattgacggctgcttccccgacgccaatatctatgcacccagcaaggcggccgtggataccttctgccgcaacgctgccatggaactggcgccgcacgggatccgtgtggtgtcgctggcaccgggctataccaatgtctgggatgacgacaaccccatccagcaggtccgtgagcggatccctctgggacgttttgccacacctgaggagatcgccaatatcctggtatttatcgcctcggacagctgtgcctatatgaccggcacccgcgtcacggtagacggcggcgcgctgctgcccgtcgtgccggaaaacaccttcaatggcggttcgctgctgccgctgaagatccatgaaacggaggctccccatgaaactgtctaaaatcgagacattccgcctgcgtccccgctggcttctgctgcgtctggaaacggacgacggttatgtgggctggggtgaaccggtggtggaaggccgtgccgctacgacccaggcctgcatccatgagctggaaccctatcttctcggtgaggacccccgccaggtggagcacatttggcagaccctgtaccggggcggattttaccggggcggcccggtgctgaccagtgcgctgtcgggcatcgatcaggcgctgtgggatatcaagggcaaggccctgggcgtgcctgtgcacgaacttctgggcggtgccgtccggaacaagatggcggtatacagctggatcgactccgatacgccggaaatcgcggccaagtctgccctggagaaaaaagcgcagggattttcccatattaaaatgatgggaacggacaaaatcggctggatcaccgacagccgtaccgtcacggatctgctggaaaaagtgcaggcagtccgggatgccgtgggccctgatttcggcattgccattgatttccacggccgtacccatcagagcacggcgcgcacgctgctgaaggaactggaacccatgaagccgctctttgtggaagagcctgtgctggtggaaaatgtggacgtctttgaacagctgcaccgctttaccaccattccgttggccaccggcgagcgctgctatactcgctggggcttcaaagagctgctggagcggggctgtgtggatatcattcagccggatctctcccatgcgggcggcatcagcgaagtgcgccgcattgctgcgatggcggaaacctatgatgttgctctggcgccgcactgcccgctgggccctgtggctctggcggcctgcctgcaggtggattttgcttcggtcaatgcatgcctgcaggaacagagcgtgggcatggcgtacaacaaaggtcaggaagtggacagctacctgcgtgacccctcggtgttccagtatcaggacggttatgtggatctcatgcagggccccggtctgggcgtggatgtggacgaaagcatcgttcgctccctgtgcgagccggaccttgcctggaaaaaccccgtctttcatatggaggacggctgcgtgacggagtggtgattcctatggtacgactggatctcgccccctgcgccctgggcgaaggggctttgtggcatcgggaaaccgaagagtttattttcacggacattatcaacgggcggctgtttacctgtaccccccggggagaggtgcgccttttactgcaatgccgttatcagctgggcgctttcctgtttgatcagaacggggagctgctgctgttcacggaagccggtgtctttgcctgcccttacggcggcagcgaaaaggatttccgcttgctgtggaaactgcctatggttccgggagaacggttcaacgatgcagtctgcgaccctgccggccgcattctggcaggaaccaagaccgaaaccaataccgacggcagtttgtggctgctgcaaaaagaccagccgccctgccggctgctgacggggctcaagatctccaacggaatggcgtttgccgatggcgggcggatcttctaccataccgattccggagaccgggccatccgccgttaccgctacgatctgcagcaggggacgatcacgcccgatggcatcgtcgttcagctggacagccccgacggtgcggtgcctgacggaatgaccttggatgcccgggggaatctgtggacggcatgctgggacggcggatgcgtacgtggatatactcccgaaggagaacagatcgcacaggtggatctgccggcccggcaggtcagcagtgtggcattcggaggcaatggaatgcatcagattctggtgacctcggctgcggtggggacatccggcggagcggaaggcggcatctggttgatggatgctcccgcagtgggaatggaagattttcgcgccctgctgtgactttacaaaatttggaaattatcttataatgaattcgatataatactgtattatgtaaagttttcgctcacgaggtgtcgcaggtatgtcttctatgccaacaatcaaggatgtcgcgttgctggctggtgtctccatcggtacggtagaccgggtggtgcataaccgcggcaaagtgtccgagcgcaatatgaaggcggttcaaagtgccattgatgctttgggctatcgccccagccgcattgccagtgcgctggtcaaacggcgcaacggcctgaaaatcggcgtctgcattcccagcgtggaaacggagttctggaacgaggctatggacggcgtgcgccgtgccgaggcaaagctgtctccctttggcgtgtcgatcgtgatggagaccacccgaacctatgatttccgggatcagaaggccagcatcctgcgccttttggccgagggtgtccaggcgttgattctggtgccggtgcagggcaaggaatcccagcttgacagtctcattccgcccgagatcccctatgccacggtgatcgaagatattccggattcccgccgcttgttccatgtgggacccaatgactatgccatgggaacgctggcaggccggctggctacgctgtacagcggaccgggggtcaagtgtgtcatcctggcggcaaactgtcagttttggggtacacaggaccgcatccgcagtttccgggagttcttgtcccggcatgacccggacgccgaaattttggacgtctgcgagatccccattgaaagcgagcgcattgcttaccagagcatctacgagatcgccgaacagcagatggccctgcaccctgaaatgaatgctttttatgtgaccaacggcctgacccagtgggctgcggctgcggtaaaaaacaataaaaagcaggggagcatccgggtattcggatacgagcacaccgagatgaccgatacctttatgaaagagggcattattgccgcaaccatctgccagggacctgcccggcaatggtataacgccatctatattatgaatgaggtgctggcaggggaacgtgccatcgacagcccggtgtttaatgcggagtgccgtatcctcatcgaggagaccatcccctttgttcgggcggattctttttccgatgcattctgagaaaatccgttccgcaatttgatgatggtaaaaccttttcaaagggttttacctggatgtggcatacagaaaaaacaaaaggcctttcggagttttgctccgggaggcctttgtttttttgactttcgaaacgaataaaaatatacgatatgtataaaattgttaaaaaatacgagattttgggccgggggccaactcatcgcacctgccgggcggaaaaggctttactttcggcatataggtgcgtataatgcgaaagggtatctaattttatcgaaaggaagtagaaatcatgaaaagaatgtgttccggcattgcggcagcgatggcgttgtgtgttatgctgagtgcctgcagcggtacggccacgacttccgatacgccggagtcgtcttccgcttccagctcggacagcacttctgcggagaatggcaccgatgcggattcttcggaatccacggacagcgaggaaacgtcctccgacaatacggcaaatgaagagctgtatctgaaatcgaagatcgaatcaagcagaggcgatgtccttatggcgctgtcctaccgctatgatgaaaatggccgtcaggtggaagttgtggaggaacgtcccagcctggattctgttaccactacggttactacctatgatgaaaacggtcagatcctctcggaggagcggaccagcacgacggagtcctataattacaaagcggaatatacccgggacgaacacggcaaccccacccaggtcacccgcaccagatcggacggttctcagtcggtctatgtctacgaaaacgaatatgatgaccagggacgcctgatcaaggccactgagtacgacggtgaagaggtaagtgagtgcaccgagtacgagtatgatgatacccacgagcttccggtcaaggaagtgtataccataggatctattctttacagcactacggtacgcgactttgactcgatggcagcggaaggtttgtatgtggaaacgataagctatcccagaaccgctgcgggagaaccgggagaggaaattttccactatcgtgtcagcgatggcctgatggtttacagctatcgtaagctttccagcaacgttcccgatgaacttacctacgaatatgatgagtatggcaaccagacttccgtggaaggcgttcagtcggcctacgatgttcacaacaccaccgaatacacctatgatgaggccggtcgtgtgttgtccagcaaatgcacctcgaataacggcacctcgctggaaagctggacgtatgaatatgctccgctgagcgaactgctgtacactgagtaagctgcatatttcttgacacttgtacaggccgcactgaccctggtagggtaaggcggtctgtttctttttgcgcagctgtattttcaaaaaagaaaaccttaaaggtgggaagtttcccgatgcctgagcaatagcccaccggaccgctgcgtccccggcagcggccaggtaagccagtttgactgcctatcaccgtaatccacaaaaaagaacccccatgacgtatccgtcatgggggctttttggagcgggtgaagggagtcgaaccctcgtcctcagcttggaaggctgatgtactagccgttgtacgacacccgcatggacaacaattattaaaccatacgcggtgccgtttgtcaagatgagagcggaaaaagagctgggaacatccggtgtcagtattgcttctttttgtaaatcgccgtgctgatggcccagctcgccgcaaatacggcaacgctgaacagcaccatcccgccgatcagccaccagaaatggggattctgtgcccactggaccacggagccgtattccacgtccatggtgacggctgcgccggtcgcggggtcgggaatggtttccggcccgcggaatccgaagaaacgttccgcgttgttcatccattcctcaaacttcaaggtggcttcggggctgagcagatgctgcgggacccaggtcaccaggagaaagacacccagcaccagcaaaagaatggcgctcatgacaacggtgcgggcacggtcacagccgaatttataagtcagcggcaggctcagcgaaaaatacagcgtggcaatggtggcagctgtcagggtaccgatgagtgcttcttcataccccatagtccccttgacgatcccggcggaaaaggcgaaggccagcatgctgatgacacagccgaacaaaatcgcacagccgcccagaatgtatttgctgcccacaatgtgggaatgccgcaccggcagggtgtgggcataaacatcccaatggctgtattcatcaaagcccacggcgctctgtacatacagccccagcacaaagaccagggcgtacagcatgaagggcatgtcaaacaacatggccatgcccacatacagcacaaaaagcagagtaaagtttttcttgtaccgggatgtcagggtacaccagtccttgtacaaaagacctttcattgtttgtccctcccactggtaaaacgcatgatgtcgtcgatgcttgccgggtcacagacagcctccggcagcagccgcagaacttcctcccggcctttgaccagcgtctcacagccgaactcggtgcggcgggtgtggacgatgcactccccgggcagagtggccagatcctcggcgccgcagcgaagaatgccgtacatggacagtaaggtgtccttgtcctcctggaacagcagtttaccctgatgcagataggcaatggagtccgccacctgctccagatcgccggtgatgtggctgctgatgaggatgctgtggtcctcgtcctggataaaatcgaggaacaggtccagcatctcgccgcggaccaccgggtcaaggccgctggtggcctcgtccaggaccagcaggcggggatgatgggccagcgctgtgacaaggctcagcttcatccgcatgccgcggctgtatgccttgaccggtttgccttcatccagcccgaactgctttaacagctgccggtatttcgcgctgtcccaccgggaaccgaaaattcccgccatgcttttgccgatctgctttgcggtcagggattcgtaaaaataagcgtcgtcaaataccacgcccaaatccccgcgcccggcgggcgtacccggggcgtcgcccagcagttcgatactacctgcatccgccggattgaccccggtcaacagcttcaaaagcgtggttttgcccgcgccgttttctcccaccagaccgacaatgcagcctttggggacggtcaggtccaccggacccaatgtgaaatcgggataatgcttttccacaccgcggatcaccgcggcacagcttgcggaactcatactcagtcctcccataaaaggtccagcatttcccggacctctccacggccgatgccgccccgccgcgccgcatccacggcgttttgcaggtgctgctcgacctgtttgagcatttcctcgcgctgaagctccggattctggggggcgacaaaactgcccttgccgggtgttgtcacaataaaaccctcggcctccagatcttcgtatgcgcgcttggtggtgatgacgctgatgcgcagctctttggccaaaagccggatgctgggcagagcgtcgccttcttttaactttccggacaggatctgctgcttgatctgccgcgtgatctgcgcgtagatcggctcctgcccggcgttggagatgtacagctccatggcgctgcctccttatttgagatgtgaactgttcatatctgatatatacagtatatacggtatatacgcggttgtcaatagccgggagcaaaatttttggagcggtctttttcacggaaagaagagcgccgccggtatagcggggaagagcggctgcatatggatgcaacagcccgaatggggcttgaaggaggggagaaaatggcggcaaaacgacggaatgctgcgccgcggcatatcagtccggagcaggaccggcacatgcggctcagaacgcgaatcttctgtatcagtatggcggtggtgtgtttcggggtgctgctctggcgcttgtttgtgctgcagatcatcgacccggaaggctacgcggcgcgggctgccgaccagcagctgcgggatacggtcatcccggcggcacggggagagattttgtcgtcggacggtaccgtgctggcggccagcgagacctgctggaccatccgcgcgtccccgcgggagctggcggatgaactggtggagccggcagccagggccctgagtgagattttggagatcgactacgaggagacgctggaaaagttttctcagcgttcctccaacgactgccttttgcggcgccgagtcgacaaggagatggccgacgcggtgcgggactggtgcagcgaaaacggcgccgagggcatccagatccgccaggacaccaagcgggtctacccggaaggggacttcatgggctgtctgctgggattcaccgacgtggacaacgccggactgtgggggctggaactgcagtacaatgaactgctgaccggcgaaaacggccgggtgctgacggccaaaaatgcctggggctatgacatgcccgaaaactataccacgcttgtggaagcgacccccggggcctcgctgaccctgaccatcgacgcgaacatccagcattatctggaaagcgccgtctcggcggcggtgcaggagcacaatgtggcgtctcgggcggtgggcatcgtcatggatgtgcagaccggggcgattcttgccatgacggtcaagccggactacgaccctaacaatccccgcaccattgtggacgaggaggtccgggaccaggtcaacgccctgtcgggggaagaacgcagcgccgtgctgcaggtggcccagcaggcccagtggcgcaataaggccatcagtgacctgtatgagccgggcagcgtgttcaaactcattacggcggcggctgcactggataccggcgtctgtaccccggatagccagtttgtctgcgcggggtccatcaatgtggcggggacccgcttccgttgtgccaacgggcatatccatggccttgagacctttgcccaggggctggcggtctcctgcaatccctgtttcatccagatcggcgcacgcctgggcaaggaggctttctgtgattattttgaagccttcggcctgcgggaggccaccggcattgacctgcccggcgagatcaaaaaaagcgagtattataccgccgaccggatggggctggtacagagtttggcaccatgactattttacataataacgatagaaacgtgcagcccccacgggctggcacgtccttgcgtttactgcatgaaattcttcgactttgtcagcctagaatcaatcgccagaccagcccgggtgcagggagatactgtccagaatacttgcatgattgactatgcttttgttttggacgggcaatcttatgtcagtacagtggatctcaatgttgcgatagtacagaaatacattcgagaataagaaaaacaagatcaaacagaggaccgtttgaaccggaaaaaatacaaagacccttttaatgaggccaataatccgattgctaggacttgaacaaagttcaagccagcgccatttaggcgctggcttgtttttcagccttgtagaccgtgtgtcaagctattaaagctttaggtctccaatattgcaggtgtcaatctctctgtcccaataatattgaataatctccagactgcgcctgtcaaacaaaaagtgaatttttcgggttggccatttcaatatcatggcaaagcgttcatcttctgtcatacgttgtgtagaaaaataaaagtatagggtaccgactttttttgaatttctctgtttcaatgctttagagccaaacacgccgacttcctgcacttccttccagctgtagctttcgggcggaagaaaccatacctttcgggagataccctcggcatcgatgcggacaacggcactgtacatggcagctaggagtaagtacagaaatgccatggcaagaaagagagtgccgcctacccagctttttacagcgtacagtgcaagggccgcaatcagaaacattaagaaaaaaaatgcctgcaatactgccatggttcgattcaccatcacctgtcgggtcatgcttttcctccctttattgctcagtatcgaaaatattctgaatcttcaatgtggcaggggcgacctcgtgacagttggatacatgcgtcagcagccgggtacgcaaagattccacaatatcggtatacgcgggatcggaagccatattgcggtcctcttgcgggcagacagaagtatcaacaaaaaatagatcttcattcgttcttgtcgcgtaactgccgtcgatgcgggtgttcaaatccagtctgtaacgggcggtgcggatgcagctgcggcgtggccagcctctgccgtcgggaaggcgtccaagttgccgggcgggaaaggcacagctctcgggctcaccgtacccgatggtggcgtagacatattcaggataacccccggacagtagatcgtgtcccttaaactgtgatggaaccggtacaccaagcatggaaagaagggtacgggcaatatcaatattagagcagattttgttgacacgatgtcctgcgcaggagctgtcgggatcagcgatgatcagagggacggcatggctggcccgattgaaaacgtgtttgccgagaccgcggcattctccacgcagggcaccatggtcggcattgaagactaaaatggtatccttgaggagattcagctctttaagcgtctgcaaaatctgtcctacttgatcatcgacccaggcggccagaccgtagtaataaactttggcaaggcgaagctctgctggagtcagggtatccaaatggaccgctgcggcgagtgcctgttcaaactcacttagctgactaatgtctggtagctgatcatcgaacggataatccttgtaaagcagttcgtatccacgtttgagaataattggtgagtgcggctgcgtgtaggagactcgcaaaaaaaaaggatgcttctggctgcactgctccttgagccaacggacagcgttttgtgtgacagtctccggataataaaaggatttttcttccgggtataagctggcaatattcatggagataccctgacgaggcttgaggcggggtagataacgcatctcctctttggtaagtcccaggctcatctcacttcctgactgcacattcaattggaaagggtgcatgtccggggtgacatgtgtcttgccaaaattggctgtgtgataccctgaagccgccagcacttggggaaaagttgtgacctgtacaggaattcgaaaagaggggagcgcggcctcgttatcgtagacgccggtatcttccggatacaatccggtcagcaagctaaccctggacggaacacaaacaggagaattgcaaaagcagttctcaaacaggattccatgtttggcgatggcatcgatgtgaggcgtttgcatagggcctgccgggtttccataacaccccagcgcgtcctgccgcagttcatccgagaacagatagacaacatttttcacagtggattctcccttcggacggtggatggtaaaaatcagaactcctcaatatcgggataatacaggatggggtgaatagaggctttctgcggttttttgtcgccatccaacatgttgagcatggcttttgcagcggcttgaccggcttcttgatggggaaaatagtaggaaatgcttcgctttttccaaaggcactcggcctcattcccgtttcgaatggcttggatgtataaaagccgggaaatcatttcctgtagctcccgcgaatagccgagaatggcggtgtcgttcggtcgagtccggacaaattcttgcaggagttgaaaaacctccgactcaaatgtagtgattccattatggtacatacggtgaagccaagcctcatccagacaaggaatattgtatacctgtatggagatgtcatctcgctccatttgcacgcttcggaccccttgctcacgtgccgactctttaaagttgtgataagcagggcgaaggtacacaaattttcgatagccgtttttgatcaaaatgtccattcggtcgcgggaagaagaataataatcgtaaccgacgctgcttatctctgattcgctggccatgcagtcaatggttgccaccggaatattttgctcatggatctgttccattgtatccggtggaatggcaatgccgtcggcatcaatataaataattccgtctgcctggccgctcatacaggcttttacgcatccggccaaacttccctgttgatcataactggtcaacaaaacgctatatcccttgggagaaagatggtaacgaattccttgcaagatattatggtaacgaggcatggacagattgttgttcaaacgtaccgcaatgcacttggtctggttggtttttaaccgctgtgccgaagtattgggtacgtactgaagctcttttacagccgcaagtacccgactgcgggtctgctctgaaatgctcttacccggggtgtgattcaaaatgtaggatactgttgcaaccgataccccggcggcatcagcaatatttttgatggtaatgcgttttggcataatgggctccctctatcagtcgcggaatgaaaatatagtgactgtatggaaaattataacaaattcacagaatgtaaacaattcctgataaggcagaaacaataggatacctatatgaatatttgggattcccaaacaaataccgccaacctcgaaccgcattcagggatatagcgagaaaaaagataaacgattaaatctgtttattatagtttacgacgacggaatggataaattcaattgactaaaataataaaaaatagatattttgtttgtatatgctgcgtattgaatttgaattcatcagagtgtagacttgaatacagattaatcgtttaaccaaaagtcggctcgcttcgacgtgcattttatacagaagggaaaataatgcgatggggaaaaaaccaaatatcctgttctttttcagtgatcaacaccgaggggactggatgccttatgaggcaagaacccgaaaacagcagggaatccaggcactggagctgcacatgcccaacatcaactctatgatgaaacgggggactacatttacaaatgcctattccccggcaccgatctgcggtcctgctcgtgcttgcttggctagcggacaacgataccggcgctgccgtgtctatcaaaacaatgtgaattatgacccggcactgcccagcttttatggagcgctgaaagatagcggatattatgtgacaggcacaggaaaatttgacctgaataaagcggatctgtattggggtgatggcttccatgaaattctaaaacagatggggttcaccagcgctcatgatagcgaaggaaagatggatgccatatgggctgccatgcagggacaacccggaccctatggccgtatgcttgaggaagcgggatggctagacatccatatgcaggatatggtgacgcgggggggcaaagatattccgacgcctcttcctccggaattgtatgccgataattggattggcgaaaaaagcaaagaattgatacggaatatgtctcagcataaaccttggtttttgcagattaatttctctggacctcacgatccgtgggatgttacccgccagatgaaagaggctatgagggaacgcaaattcccggatgcagcggactgcaccattacggaaagcaatcagggcgtgcgacagaactatgccgccatgattgaaaatattgaccgcattattggtgaatgcattgcaacactggaagagcagggaatgctggaaaacaccctgattatttacagtgccgaccatggcgaaatgatgggggaccatgacctgtatggaaaatccaaacctgaacaggggtcaatccacattccgatggtgattgacgcttccaagctggggggggcgccgggacgctattataataaaccggtggaattgcaggatctgacggctacgtttctggactatgcaggggttacgcctcctggccagatggattcctgttcgttaaagaatatcgtggaaggcagcgatgaccgggtacgtgaatttgtcgtgtcggaattgatccgtaacgacagggacggtcccatttcctccttcacagcagtcacagacggcaagtggaaactgattctgcaggcaggaaaggaaaccaggctgtatgatctggagaatgacccatttgaatgccacaatctggcggctgaatatccggaccaagtttcccggctacgccagggatttgtaaatcgtggaggagagttgcctcctgcgttgaagctgtacgcgcagtctttccatgccggataagtttcggcatgtgtttgggatcactctgaaaaacgtgccggaaaccggcttttaaaaggaggcgttgccagaaaatcccgccgattaaactacatacggatgaacatgaaaggagattccaccatgaaaaaagcatttacgaaaattctttccgggtgtctggcggctgtaatggcattttctctgacagcatgccaaggaaattctggaggggcaagcggttccgagacgcaggtgtctacctcggataccgtatccacagagcctgtacaagtgactgagctgccggaagcgacagggattgtcaaagacagtctgaatattggtacaactgccttgtgggcaacattgtctcctttccagacgaccaataaccagtacgggccttttgtcaagacgctgtatgatcgtttggcagtcgtttacgatggcgagtatgtcccccaaatggcagaatcgtgggaggtggccgatgacggtgtgacctggacggttaagatccacgataatatcacagactcggaggggaccctcatcacggctgatgatattgtctggttcattcaggaaagtatggatcgcaaactgaaaccgcagttcaacaagattgcggaggtttctaaagtcgatgattataccttcaatgttgttatgaaagaaccggtagtgggaacctttgaactggtgttggcggctgtctatggtgtttcggaagaagctttcaaggccagctctgatgaattcgccagtacggttgtttcctccggaccatataaggtggtggaatttgttccgggctctcatctgacactggaactgcgggatgactactggaataaggacgccgataatcctgccttgcagaataatgtgaagaacctgacgtacaccattattacggaagcctcccagcagcagatcgcactggagactggcagcgtggattgctttgaatcactgacggcttcccttgtttctgcttttgatggtagcccggattacgatatggttacagcccccagcggcaacggttaccagatgtatttctcaggcagcagtgaccggttctgtggtcgtagcgaagatctgtgcaaggcaatcgcacactgtatcgatattgatggtgtgattgccgcagcctatgatggtctggcaactccgatgcattccggagcttcggaaatgttgattgggtataacgaggcatggaccagtgagccgtattttgaatatgatgtggaaaaagcgcaagaatatctgaaaaatgccggatacaatggggaagaactggttctgatgtccagcaacgagggcggcatggaccgtctgactcagcttttgcagggttatatggcagccattggtatcaactgcaagatcgaacttctggacaacgcactattttccgcttcccgttttgacggctcgcagtatgatatgatcctagtatctgccggtggtgttaccattacaaactggtggggtaaccgttttgatatgaatgcatacgagatgggggacggaaccggacgccgtgatgagacgctgaccaatatgatttacgatgcctggacgacagaaaactacaatgaggagcgcattgatgatatcaacgactacctcaacgagcattgctatgtatacggtctggtcaacccgactgtttgctgtgtataccgcacggattcaggcattatgggagcgcctgttacctgccagggtgcggcagatttttctgcagccgtttttcagtgatccggtagccttccgatccagagcaatttaatccaacgaaacagttttccgcccccacacttgtgggggcggaaaacaaaaggaggcaacaagtgggtcgttatattttgaaaagattgttgttcatgatccctatcatcctctgtgtggcaatccttgtttttactatgatgtcattctgtcccggcgatccggccgaaatcgtgctggggtcttctgcctcccaggaagatatcgaactgatgcgggagacgatgggcctgaatcgcccgttccttgtgcggctgggagtctttttaagggacactttcctgcggtttgatctgggaacctcttacctgacccgggtcagcattgctgattccattcgggagtatctacctcgcacgatgattctcacaatctttaccatgctgatttctattgcgctggcactgccgctgggaatcaatgcagccacccatcaggggcgctggcaggacaatgtaagcatggtgtttgcgctgattggtgtttccattcctaatttctggctggcacttctgctgatcatcgtattttccgtgtctcttggatggcttccggcaatgggaattggtggacttgaatattacattctgccgtctatcgcaggtagtttgggcggtgtggcggcattggcgcgtcagacgcgctccagtatgctggatgtgattcgtgcagattatatcactactgccagagcaaagggtgtgtcagaaagaaacgttattgtccgacacgcgctgaaaaatgcgctgatccccatcatcacggtgatcggcacccaatttgggcgccagttgggcggcacgatggtgattgagacaatttttggcattccgggtatggggcaattcatcattactggcgtgaatcagcgggattatgcggttgtccagtctggcgccattttcctggcaatcgtattcagcctgtgtatgcttctggttgatctgatgtacgctgttgctgacccgcgtatcaaagcccagtattcccgtaaaagaaagaaggcgaacgcatgagtgaagatatgtatagccgcgtgaaacaaaatgctcagggaaaacccaaaaagaaatcggaagtagttcggatcctcaagcagcttagctataaccgtggggctatgattggcctgatcatcttcttggctgaactgattctggttttgggagcaccgatttttgcgccttacgactatactgccatggatgcacttgctatccgtcagggacccagtctggctcattggtttgggtgtgacgatctggggcgggatatcttctcccgtattttgtatggtggacgtttttccattaccatgggtattttttcaattatgatttccgctacatttggctcgattatcggatccattgcaggatatttcggtgggcaagtggataacgtgatcatgcgcattttggacgtcatccaatctctgccgagtctgctgctgaccattgttatctctgcgattttgggatcgggatacctgaatacgattcttgcactttctgtaaatggtatccctggtcaggcgcgtatgctccgcgcacaaatgatgaaaaaccgtggagaagaatatgtggaagcggcacagtcaatcaattgcagcaaattgcggatcattggtgttcacttattcccaaactctttctcaccgttaattgttcagatgaccatgggcgtggccaatatgattctgatggcgtcttccctgtcgtttatcggattgggggttcaaccacctcagccggaatggggagccatgctttccggtgcccgtcagtttattcgttcttctcctcacatggtcatcttcccgggcttggcaattgccgttactattttggcattgaacttgttgggtgatggattgcgggatgcactggatcccaagttgaagaaataagggaggggaatgatatgagtgaaaacaacaaaggtgatgttcccttcctggaagtgaaggatctggttgtggaatacttcagcaaggaatctgttgttcatgcagtcaatggcgttagtttaaagctgggtaagggagaaacgctggggctggttggagaaacaggagcgggcaagacaaccattgcaaaatctatcctgagaattttgccggatgtgggagctcgcatactggggggcaaggtatttttgtgtggggaagagatcttatcgattccagaagcggaaatgcgccgtgtccgtggtcaaaaaatctcaatgatctttcaggaccctatgacggcattgaatccggtacaaaccgtgggagaacagattgcagaagtggtctccctccatacgaaaggtacaaaagcagattttcggcatcgtgcggaagaaatgctggaaatggtcggtatcccgaaggaacgctatggagattatccgcatcagttttcaggcggtatgaaacagcgtgtgattattgccattgcattggcctgcaacccggaacttttgctggcagacgagccgaccacagcgctggatgtgaccattcaggcacaagtgctgcggctgatccggaacctgaaagacaaaatgggtacctccatgatcctgattacacacgacatgggtgttgttgccactacctgcgactatgtggctgtggtttatgcaggaaacattattgagtacgggagcaaggaacaaatctttgatcaccgctgtcatccatataccattggcttgtttggtgccatccccagcatggctgtgcgggaaaaacggctgcatcctattgagggccttccgccggatcctaccaatctgcctttagggtgtgcattctggccgcggtgcaaatatgctaccgaagcgtgtaaacaaggacctgtccaaatggttgaaacgccggacgggcatcagtgccgatgctgtaatctggacgcggtgtggaaggaggagggaatggaatgagtgttcctgttattgaggtcaagggactgaaaaagtatttcccgacaccgcacggtcagcttcacgctgtcgatgatgtcagtctgaagattgaaaaaggcacaacacttggcgtggttggcgaatctgggtgcggaaagtcgacacttgggcgcacgatcatacatctgctggagcgtacggacgggcagatttttctaaatggtgaagatgtttctgacttgaagggcaaaaaattgcgtcaggcccgtgaaaaaatgcagatcatcttccaggatccgtattcctccattgatccccggcagacggttgaatccattattaccgaacccctccgtgtctgcaaacgatacaacaaacaacaaatctcgcagattgcggaagagctcatgcagctggttggcattgataatcggctgcgggtttcctatccgcatgagctggatggcggacggcgtcagcgcgttggaattgcacgggcgctggccctggaaccggactttgtggtttgtgacgagccggtttcagcgttggatgtgtcaatccaggcgcaggtgctcaacttgttgcgggatttgcaggaaaagagagggttgacctatctgtttgtcacacacaatctgtctgttgtacgacatatttcggataatatttgtgtgatgtacctggggcaggtcgtagagctttgccccacagaggaacttttcagccggccgctgcatccctataccaaagccttgttgtcggcgattccttcggtggatatccacaatcccaacaatccggaaattttggaaggtgaattgacttcgccgattgaccccaaacctggatgccgttttgcggcacggtgcaaatacgccaccgaagaatgccttaagccgcaagtccaggaagaaattctgccggggcatatggtacgttgctgccgcatcagggaaatcaattcggatatccttggttaaggatggcggatgatgcagaaaacggccataagaaaaatcgagttgaaaaatgatggagaggagtgatcatttatgcgagcaattatggttatgtacgacacgctcaaccggcgtacattgccaaattataactgccaggaagtctgtatgccgaattttgagcggctgggacggcaaactgtcacctttgatacttgttatgtgggaagccttccctgcatgcctgcccgacgggatctgcatacgggaagattgaatttcctgcacagggggtgggggcctctcgaaccttttgatgacagcatgccggaaatattaaagaaaaacggagtttatacgcatcttgtttcggatcatgaccattattgggaagatggaggtgccacctatcacacccgctattctacttgggagctggcccgagggcaggagaatgatccctggaaaggggatctgggggacattcaggacacgcacagcttcggtatgaccggcgcctacggggaaaaaatgcgtgaggccagacgacagaatgcggttaatcgcgaatacatacgacgccagggcttttatcctcaggaaaaggtctttgatgaggggctgtcgtttattgaaaataataaagatcacgacaggtggtttttacaaattgagacatttgatccgcatgagccttttgcctccccggaagagttccagaagatatacggcatagacgaaaacagcttcccgtacgattggccggcatacaaccaagtccgtgaggatgatgcttttataggcaacgtgcggaaaaaatatcttgcgctgcttagtatgtgtgatcgctcgctggggcgtgttctggacatgatggatcgatacgatatgtggaaggacacaatgctgatcgtcaacacggaccacggttttttgctcggggaacatcaatggtgggcaaaaaatgttatgccgatgtataacgagattgcaaacactccgctgttcatttgggatccccgcataggtgtgtgcaatacccaccggaaatcgctggtgcaatgtatcgacttgccggtcactcttttgaacttcttcggggtggagactcccaaggatatgatgggaaaggatttgacgccagttattgcccgggatgagaaggtacgggattatgcgatttatggcatgtttggtggtcatgtgaatatcacagacggcagatacacgtatatgcgcgccccagctgcaaaagaaaacattccgtgttatgagtataccttgatgcctacagacatgaatgatcgtaaacctgtatctcagctgaaagaggcctccttggcagagcccttctcctttaccaaggaaatgcctgtattaaagcttcccgccggagcttattttgatgcccaccaattcggcaatttgctgtatgatgtcgaaaatgatcctcggcaattgcatccgatcgtggacgacagaaaagaggcagaactcttgcaggcccttgtggctgagatgaaggctgcggatgccccttcggagcaatatcagcgtcttgggctctgtagcacttgatgaaactacatatgaaactgttcatcaagaacaagcccatgatgatgcctatgatcgctttcggcaccgacgtcttgaccaatgccacctgcagcgccgtcaacgtctactacttcaagtacgtcatccaggatatgtccctggtggcacagttcaccaacgttaccctgtggaccggcatcatcgccatccccatgctgtccatcctgaccaagcggctgggcaagcgctgcctgttctggtggggcgaagctatctccattattcctctggccgttctgtggctggtccccaacccctccgtcaatctgatcgtgatgatgagcatgttcgccttcctgcgcttcggcatgcctatcctgggctatgtggcatccctgatctccatgtggttctatgagatcaccgaggacaagtacaaggagatccgtcaggatctggatgcccgtcacgcacaggcagaaaaaggtgtataataaacccatgacaatatcccggcgcggtggaggacgggcatcccgcccgtcccgccgcggcccgcgggaatccatcccatgaaaaggagtcgcattatgaaaagaaccattcgacagatgcctctgcccggcacgcccgatccggcgccccaggcatgggaggcagagcacgcgtcgctggcccgcagggcggcagccgaaggttttgtcctgctgaaaaatgaggacggcatcctgcctctggcccccggcagcgcggtggcgctgtacggtgcgggtgcggtacataccgtcaaaggcggcaccggttccggcgatgtgaacgagcgccacagcgtcaccgtgcgggaaggcatggaggctgccgggttcgacatccgcagcgccgcatggctggatgcctgcgaggaagtctatgccaaggcccgcgctgactggaagcagaccgtgctggacaagtgcggcggcagcaccaaaaacggcatggaattctttatggcgtattccaccacgccgttcagcttgcccgcaggccccgccgtcactccctgtgacgccgacactgccgtctatgtgctggcccgcatcgctggcgagggcagcgaccgcaatgcaggcccgggcgactactgtctgtgcaatgaggaacacgccatgctggcagacatctgccggatgtacaaaaacgtggtggtgctcatcaacgcgggcggcgtggtggatctgtccttcctggacgaatttgcaaacatcaaggccctgttggtcatctcacagccgggcatggagggcggcaatgccgtggccgatgtgctgacgggcaaggttaccccctgcggcaagctcaccgacagctgggcggtgcattacgccgactaccccaacgcggcgaccttctcccacaacaacggcaacgtctcccaggaatattacgaagaaggcctgtatgtgggctaccggtattttgataccttcggcgtgccggtgcgctacggcttcggtgagggcggctcctacaccacctttgccatggaggcaggacagctgcacaccgctcccgacggcagcgtgaccctggacgtgacggtcaccaacaccggggcctgccccggccgggaagtggcccaggtctatgtggctctgccccagggccgcctggaaaaggagttccgccgtctgtgcgcctttgccaagaccccgctgctccagccgggtgagagcacgatgctgacgctgaacttcggtgcggaggaactggcctcctacgatgaggagcagagcgcctggctgctggaagcgggggactacggcgtctacgcgggcgcatccctggcggcggccaagcctgtggcaaagctgcatctggacggggacaaggtgctggaaaagacctgcaccatctgcccgctgaaagaggaaatgaacctgctgcactgccctgcggagcagcagaaaaagaaccaggcccgggcagcgcaggactttgccgccctgacggcagtggcctatgacctgtcggcggtggagacccgggtggtggattacgccgaccccgcccccctgggggacgaggccgaggccatcgtggacacgctggagaccgagcagctggtggccctggctaccggcgaccctgccaagggccagggcgcgctgggtgcggcaggcgtctcggtgccgggttccgccggtgagaccagctcctgcgcgctggaacagggcgtggcaaacatcgttctggcagacggccccgcaggcctgcgcctgaaccagacctactatgcccgggacggcctggctatgggcatgcccatggaggcaagcctggaacacggtctgttcctggaggataccacaccccagggcacgccgcagtaccaattctgcacggccttcccggtgggaacgctgctggcccagagctgggataccgaccttctcaaagaggtgggccgcaccgtgggcgaggagatggaccgctttggcgtgaccctgtggctggcccccggcatgaacctccaccgcaaccctctgtgcgggcgcaactttgaatactacgctgaggaccccttcctcagtggcaagatggccgccgccatgaccctgggcgtgcagagcattcccggctgcggaaccaccatcaagcatttcgcctgcaacaaccaggaggacaaccgcttccactccaacagcatcctgcccgagcgggtgctgcgggagctgtacctgcggggcttcggcatcgccgtgcgggagtcgtctccgctgtccatcatgaccagctataacctcatcaacggggtccacgcggccaataactatgacctgtgcaccaaagtggcccggcgggagtttggctttgccggtttcttcatgaccgactggaccaccacctgccagggccccgactgcaccgccgacggctgcatccgtgcgggcaacgacgtggtcatgcccggttttgagagtgaccgcgaccagatccgcaatgccctggccgacggtaccctgtccctggcggaactgcggggctgcatcacccgtctggtgcgggtgatcctgcagtccagccgctattctgccgactgctgattaacaagcccggtccgggcagtggcagttcgttcatcttttactaaaaaagcgcttcggcgccgagacctcacaagggtcccggcgccaaagcgcttttttgtatgtgcaaacagaagataacgatgattttgatagttgccgccggatttgttttgtgggatggcggctctgaccatagaaaagtcaggttaacaaatcgaatcccggactttgtggatcagccggggcatagtgcccgtggggcagtagacgcaccagctgcggggcttgaatggggccagcgtcacaaggctcggacggtggaagtgagcgtgatgctgtagaagccgaaaacggactgtgctgcccctggatggaatcgtgtgtcgctgtactgtgatgggatttgaagcatctggatggattcagtctagcccaaataacggggaagcgcgtccctgcgcagtaccaaaaagttcccgatgcgtacctgtttcccgtctttcatgatggtggggcgacagtaccagcgggagcttttttcgttttcgcgaaccagtgccttgcccaggacaggctggagaatttcccgctgaaatcgattgcggcaatctttcaaaaccgacggccagggcgttgtctgaataaaggcatcccaatagcgatcgtaggccaggtacagtttgccgtcctctacccacccaagacagtttgcatttgaacagcgcagatattcttctttgctctggaagatgatcggtgagccgtccggggcgtgagatctccagcaaaactgcaaaaaatagtttgtaagataaggttggatttcccggtaaagtgttttgcgcagcgggagaaccttattcaactcagaaaaatatccgctgaagccactgagagacgtatcctctgggagcgtatcgggaacagaaaccgtgggcatatgatccagaacggttggggcttggctcagcaaaagaatcaagctgagataaggcaggtacggcttgagatcctgttcagagcacagctctgaaaatcgggtgagggtcgtatccgccgggatacgcagaatgctttttgggtcatttttgctgcgctttatggcaagcgaaatgcgcttatataatttataacgaagaagatactcctccacatcggaacctgcgtccgcagaacggattttggcgagggtcttacagtagttcttgctggctttccaatgaatctgaagcaggcggtggttggcttcgacccaggcgtaaaaattgatgagccgatccgaaatcatctgtaaggagaaaaagtcgttctgatttggaaaataaacagccgaagaattttgatcatcggccagtccctctttccggaaagtacccaactcgcgaagagaaatagaaaccgagggacattcttccggcaaccgtacattgcccagcaacagggtagaggcgtagggcaggaagcgaaaacagtcataggcggtgagtgtccgcggttcctgaaacaatacgatgcacagctttcggggagccttggaaaggcgtttgaagaggaggtccagggaggtgcctttcttctcgttgaaaacctgccagaaagaattggtttgcagaagcggggacgaagcattctctggagccagggaatcttccagcgtcagcaaaggctgaattttcagtaaaggaatggcatctttcacttcgctgtgaggcgataaagcccccgggagatactcaccgcagatggaatatagcaatgctgctgtgagaaacgtgcagctgttattgcggctggcgtagagcagccatttctgagcgctttgggtaaggcctctcgccaggagggcctgctggtgttcctccatgaagaagggggaaagcaaaacaggtaccggcgaaaaggatagattgtctccgggatgcaccgatctcaaggagaggcagcggtctgctctgtggtcagctaacgccaggaaggaggctgccttgatttttataccgtttggaggggttatgcccggctgtatacagcagtgggtcagaaatcctgtcagagagttttgaacggtcaggtattggtaacggaaagtattggcgaaagaattgcagatctcgctttcagccaatgtttgctgttttaggcgctcatcttcttctggcgtcagaaacgctccgactgcgggttcgggcgaaaaatgaatgtccttgtgggacagagcccacccttgggtgtgcaaacccaaggaccaaaaatatgcgacggtagggtgcaattgtatagtgtccggcagctttttggtgtttttttccaggaagagaaaggacgggataattccaaacagcagatagatttgttcctgcaggatcttacgcagagaagacagtttctggaccgtaatgccgtaccgagcaagtctctgggagaatctcttgaggggcgtgttttgcagcgtgggcagaaagataaaatcgaccggttcgcagcttgcttttacttttgcccctggcgggtcagtgcgctctacttcctcacgaaaggacagacggcgggctttggtgcgatacaggcatattactaccgaagaagtacagccaaagggttgatcggaagctcgaaaaatagcgatcgggcaaaaatggaaggcttgagatttattcttctttacagagtaggaaagtccttctattgcaagaccgtttggaaattccacagggatagcgtcttcatccaaactgcgaatattgtaaacatacttgagctgggcgatccagtaaaaacattctgaaaatttacagatcgcatccggactgtcgccaagtatacaaggggtggggaatgcatgggccaaccgctggttggcgtttcgtgaccgttgactttgtgcagacgggctgccggagacctcctgatctggggcagtgtatgcttcctcccatgtggccatcaagtcgggattcgccagaaattttttgaactcgctgttgctgtttcgaaaggggggaagaaggtaaaacttttcaaccggcatcagatgacctccttttgtacaatcccaaaattataaaaaatatgatttatatcttttattatatcaaattataatatgaaagtttttcctatacaatagcggatggtgcaggaagttctaaatttttattacggcctgaacaacagattccggccccctccgactgacacccgccgttgaagttcataaaaaaatatacggccgtaacaactaccagtaatcgcagtgacgattgcctcagtaatcgaaaataacgcaggaaagttccgcatattattgcctaaagaaccccctgcaacgctgcgtactgaaaaggaggtgccaatgtatgggcacacaatctgttacggttacattctctaccgaagcgggaagcaggacgctggcggactgtttggagcagctgctgagcaatctgaacctggaagcaacggagggagataacctgtgaaaaaaggtggaatgagggagtccgcccgtctgcaggaagcggcgatctatctgcggctttcctcggccgatggcccggaagcggaatcggactccatccagaatcaacgctccttcctgcgggaatgggcacaacaacatgacattaccatagtccgggaatttgtggatgatgggcataccggcacagacttcgagcgccccggatttcaggaactgaatcaatgcctgatggacggcagcgtgcgctgcgtcatcgtcaaggattattgtgcgataataggactaaatcagaaagaccttgaaaaccaaggcattctggcttagtcccttctttttttgaccgaaaacaaaggactttcacaataatcaagcaagccggagggtgccgctgcacacttccggcagaaggaggatatagtgggtgctatcaaagtcttcttgaaggaagttgtgcttccaatcgcgcttgcgttctgcctcgcgtcatttctcaagccgatctatatgcctgacggcgtatgcgactacttcctaatgtggatctgcgtcggcttgccattcggcatccggaggatgtgcctctggctcgttccaagcggttacggcatctccggctcagtcggcattttcgcattgaacttaatcataggcggtctcatcggaggactcgccttcttcatcgggctgctgctcggtatcattcataccatccgagaaatcatctgaactacatcgtaaacgaagagggtttgtttcttctccaatttggagtaagaagcaaaccctctttttttgttgcccaaaagccggagtatttgctggcgatgcggcgaaagaaaggagtttttaagcatgaaacgcatgacagccggtgatctgcaagcactggaattgctgatgcagaccacacccggctttgagcattttgacagcggcgcggatggcattctccctgagtgccgaagctgccgctttcatcgccccttctggaaatatcagtcctgcgtgtttgcagagtgtccctactgctgcaatcccgtttctaccctcaaaaaccaaagtggcacatctgctgccggaaaggaagtcaatcatggataacaaaatcgaagtcttcaagaatgaacagtttggagaaatccgaacagccctgattgaaaacgagccgtggtttgtggcgatagacgtgtgcagggctttggagatcggcaattcgtcacaagccatttcacggctggatgcggacgagaagatgattaccctcatttcaaatgagggtaataaacgaggcaatcccaacatgacggtggtgaacgaacctggactttacacgcttattctgagcagccgtaagcccgaagccaaagccttcaaacgctggatcgcacatgatgtcatccccatgatccgcaagaccggcggctacatgacggactcccttctggaacgtattcagaaggaaccagcggtcattgtggagtttgctcaggcgttgattctggaaaagaatcgcgtaaaggctcttgagtgtgagctgaacacggcaaagcccaaagccgattactacgacgccttcatcaatccggatgactgcaccaatatccgaacgacggcgaaggaactgaaaatcccggagcgcaagttcgtccagtttcttctcagggagaagtacctgttccgatctccctccggtcagcttcttccctacaacaaggacagcaatgccggactgtttatcgtccgcgattttgtgacgtactgctacaccggttctcagacctacttcacgccgaagggcaaggatgtcatccgaatgaagttccagaaaaagtgcggcgaagagctgctttccaagatggcaaggtgatttctgtggcagtctatcgcgtaaacaagaatcgtggctatacggtcatggcgaacttccaccttcgagacaagagcctgtcactcaaggcagtcggtcttctctcaaagatgctctcgtttaatgatggctggaagttctcaaccaagggactttctgcaatctgcaaggaaggtccggatgccattctctccgcgctccgtgagcttgaaaagcacggctaccttgtccggcaccggcagagagacggtaaaggcaggatgagcaacacaatctttgagatatacgaagagccgcaggagtctacaccagaacgggaaaagccacacacggaaaattcatgtgtggagaagccagatgtggataatccacgcggggataagttcgcacaaataaatactgatcaagtaattacccaagaaagaaatactctctcaaagaactatcaatccatcaatcttgatgggatggacaggatggatgagcgaagcgagtatgaagagattatcaaagagaatcttgattacgacattctctgtcaggatccgaagttcgataaagaccgcttccgggagatcatggacatcatgctggatgccgtctgctctaccgctccgaccatccgtatcaatggcgaggatatgccgcagcaagtggttaagtcccgctttctcaagctgaatagcagccacattgagtacgttctggaagcaatgaacaagaacccgtcagacatccgtaatatccgggcgtacctgttgaccgctctgtataacgcctctctgacgatagacaattactactctgcgcttgtcaaccatgatttctacgggcaggacagatcggcagggtcaaagaagccgaagacctacgattatagcctttgtgaagacactctttaatgaataccatcgtaagcaatgctcggaaaggaggacagtgtaaatgaaaatcatctatcgccggattgtgccgccttagctccggcagcagtccccataatcattccaacgaaaggaggtaaacgccgcaatgcaggatgaagtcaacaccaaagttgttgcaattatgatcaagggcggcaaaatctcagccgaggtgctgaaaaaggcactggacaagttcgtgcaggagattgagaaggcgcagaagcagatgcagcagccaaaaacctatcgcggcaagcagtccatcaagcatctaatgagccagaatgccgcaatctccaacatcgaagtgacggatggcaacatcaaatcctttgagcggaccgccagcaaatacggtctggactttgcgctcaagaaagacgtttccgttgagccgcccagctatcttgtcttcttcaagggacgggacgttgatgtgatgaccgccgccttcaaggagttctccgccaaaacggtcaagcagaaggaacagccgtccatccggcacaagctggatcaggagaaagcccagagcaaggcgcagcacaaggagaaggtcaaggtcaaaaccaaggatcggggtgtggagctgtgaacaaacccgatgtgaagaagctcattcttctgaaccttccgtatgtcttcgccttctacttcgcggataagatcgccgccgtgtttcgtctcgcccccggcgcagcgtttatcgacaagctgacaaacggctttgctgtatttggcactgcctttgcaaatccgctgcccagctttcatcccgtcgatctgctcatcggtctgattgccggtgcgctgctcaagctggcggtctacgtcaagggcaagaaccgcaagaagttccggcagggcgaagaatacggatctgcccgctggggcaagccggaggacatcaagccgtacatggacccggagttctccaacaacgtcattctgacgcagacggagttcctgaccatgaacagccgtccaaagcagccgaaatacgcccgcaacaagaacatccttgtcatcggcggttccggctcaggcaagacgcgcttttttgtgaaaccaaatctgatgcagatgcacagtagctacgttgtgactgacccgaagggtacggtgctggtggagtgcggcaaaatgcttgaaaagggcggctacgtcatcaagtcgctgaacaccatcaatttcaagaaatccatgcactacaacccattcgcgtacatccgcagcgagaaggacatcctcaagctggtcaatacgatcatcgtcaatacgaagggagacggcgataagtccggcgaagatttttgggtgaaggcggaaaagctctactacacagctctcatcggctacatctggtatgaggcacccgatcacgagaaaaactttactaccctgctcgaaatgatcaatgcctcggaagccagagaggacgatgagaccttcaagaaccctgtggatgtcatgttcgacgagctggaagcccgcgaccctgaccactttgcggtcaagcaataccgcaaatacaagctggcggcgggcaaaaccgccaagtcgatcctgatttcctgcggcgcaaggcttgcgcccttcgacatcgcagagctgcgggagctgatgagctacgacgagatggagctggacaccatcggagaccggaagacggcgctgttcgtcatcatttccgataccgatgacaccttcaatttcgtcgtggcaatcatgtattcccagctcttcaaccttttgtgcgacaaggcagatgacgtttacaacggacggcttcccgttcatgtacgctgtctgctggacgagtttgcaaacatcggtcaaatcccgaagtttgataagctcatcgccaccatccgaagccgggaaatctcggcgtcaatcatcttgcagtcccagtctcagctcaaaaccatctacaaggatgcggcggacaccatcacgggcaactgcgactgcacacttttcctcggcggaaaagaaaaatcgaccctcaaggaaatcagcgaggtgctgggcaaggagacaatcgacctttacaacacctcggaaacccgttccaacaacaactcctatggcttgaactatcagaagaccggcaaggaactgatgtctcaggatgagatcgccgtcatggacggagccaagtgtattttacagcttcgaggcgtgagaccttttctcagtaacaaatacgacatcacgaagcatccaaagtaccggcagctctccgactataacaagcggaacgcctttgacatcgagaaataccggcagcacaagctggtagtcaagcccgatgacacattcgacctctatgatatgggcgaggtcgaagcggattaaagccccgtcgctgcactgcgcagtgggtaaagcctgatggctcccaaagcagaacagcgacggggcttcttttttatgcccattttcaaaaatacacactcaactttcatcgattcaaggaggaaaatctatggctttcatcaatcaggctgtcacggttcttcagacgctcgttatcgccctcggcgcaggtctcgcagtgtggggtgttgtcaacctcatggaaggctacggcaacgacaaccccggcgccaagtctcagggcatcaagcagctcatggctggcggtggtgtggtgctgatcggcacgaccctcatccctctgctctccggtctgtttggttaatccggcagccgcgcagaagtaaccatcggggcgggtgctggaaaaggcactcgcccctcacaattcaccaacgatttaaggaggaaattcaagtatggcatttatcaatcaggcagttacggttctccagacgcttgttatcgccctcggtgcgggtcttgcggtgtggggtgttgtcaacctcatggaaggctacggcaacgacaaccccggcgctaagtctcagggcatcaagcagctcatggctggcggcggtgtggtgctgatcggcacgaccctcatccctctgctctccggtttgttcggctaatccacggcaagcccagcttaaccgaagggtggtgaaatattgggcagcattttagaaaagattgagcaggctctcaaggatatgctgatcggatggatcgagagcaacctgaccaatatgttcaccgatgtcaacgagaaggtaggaacgattgcagccgaagttgggcaaacaccgtccggctggaacggcggcgtgtaccagatgatccggggactatccgaaaacgtgatagtccccatcgctggtatcatcatcacctttgttttgtgctacgagctgatttctatgatcaccgagaaaaacaaccttcacgacatggacacatggatgttcttcaagtggtttttcaaggcggctgtggcgatctatctcgtaacacacacgtttgacatcgtgatggcagtattcgacatcgggcagaacgtagtttccggtgcagcaggagtaatccacggcaacacgagcattgacattgacgcgacgattgcgcagatgcgtaccggcatggagaacatgggcgtcggagaactgctcggtctgtcaatagaaacgcttctgatcagcttgtgcctcaaaatcatggcgatcctcattacggtcattctctacgggcgcatgattgagatttactgcaccgtgagtattgcgcctattcccatcgcaaccatgagcaaccgcgaatggggcagcatcggcacgaattatctgaaaggcttgtttgctctggcatttcagggctttctcatcatggtctgcgtcggcatctatgcggtgctgatcaacggcatgatcatcgcagacaacattcattcggctctgttctctgtggcagcgtacacggtcattctgtgcttctcgctgttcaagaccggaagccttgcaaaatccatcttccatgcgcactaaggaggtcggcagcatgaagaagtacagcatcatctacgccgatcccccttgggcgtatcggacttactccaagaaggggcagggacggtcggcagaaagtcactacccgacaatgtgcattgaagacatcaaggcacttccggtcggtgagcttgccgcgaaggactgcgccctgttcctctggatcacgttcccgtgcctctgtgaagcactcgaagtgctgacggcatggggattttcctataagaccgtggcttttgtatgggtgaagcaaaaccgtaagaacgacgatctctttaccggcatgggctactggacaagggcgaatgccgaaatctgcatccttgctacgaagggacatccgaagcgtgttgacgccggtgtgcgtcaggtcatcctcagccacattgaagagcattccaaaaagccggatgaagcgcgggagcgcattgttcggctcatgggagaccttccccgcgtagagctttttgcccgtcagtctcccgaaggctgggatgtttggggcaacgaggtcgaatgcacggcgcatcttcctatggaggaaacaccatgctgcggctaagacccatctctcttcgtgacgccaacgagtacgtccggcagcatcaccggcatcataagccggttgccggtcacaagttttccatcggctgtgaagcagacggtgagctggtcggcgtaatcatcgctgggcgtcccgtcagccggtatctggatgacggcttcacattggaggttacaaggctatgcaccaacggggcgaagaacgcttgcagctttctctacggcgcggcggcaagagctgctgcggctatgggctataagcgcatcatcacctacacgctggaaagcgaaaacggtgcaagccttcgggcttccggctggatttgtcaaggcaaagcgggtgggcttcgctggacaggcaagcgtcagccgaaggaggatcaatatcccgcacaaatgaagctgcgctacgaaaagcagcttagaaaggaggaaacagtcaatggcatttgttccggtcccgaaggatcttaaccgcgtcaaaacgaaggtcatgttcaacctgaccaagcggcagctcatttgtttttccatcgctgcggcagtcggcgtcccgatcttctttctggcaaaggcgcatctcgacttgtctacggcggcaatgctgatggtggtgatcatgctcccgttcatcttcttcgcgctttacgagaaggacggtcagcccgccgagaagtatctgtaccacatcgtacagtccatgttcatccgggacaaggtgcgtccctaccgcacgaacaatctctacgctgagattcagcagaaaatcaaagaacaggaggaattgcagcttgaacaacagcacagcaaaggcaaagcctaagatgaccgtcaaaaacggcgtcgtttacggcgatgccctttccgctcaggaaaagaagcggatcgtcatgcagaagaaaaaggacaggaaggcaaagaaagtccgcaagtccgcccagcagaccatcccctatgtggagatgtgccgtgacggtatctgcaaggtgaacagccgcctctacacgaagtccatcgcctttgaggacatcaactaccagcttgcgcagaacgaggacaaaactgccatctttgagaactggtgcgactttctgaactacttcgacagctcaatcttcgtccagctctccttcatcaatcagaaggcaagtctcaatgagttccgcaaacgcatcaacatcccggcgcaggaggacgccttcaacgacatccgctccgagtattccggtatgctgcaaagccagctcaccaagggcaacaacggactggtcaagaggaagtacattaccttcggcattgaggcagactccctccgcacggcaaagccgaagctcgaacgcattgaaaccgacattctcaacaacttcaaaacccttggtgtgagaaccgagctgctgtccggctatgaacggctgaaagtgcttcatgatgtgttcaacatggacaccaatgagccgtttcgcttttcctttgacatggttgcccggacgggactcagcacgaaggacttcatctcgcccacttcctttgacttccgtgaaggcaggtgcttcaagatgggcagaaccatcggcgcggtgagcttcctgcaaatcctcgcgccggaactcaatgaccgtatgcttgccgacttccttgagatggacagcaacatcacggtcaattttcatatccggacgattgaccaggcgaaggcaatcaagagcatcaagtcgaagatcaccgaccttgacaagatgaagattgaagagcagaaaaaggctgtccgctccggctacgacatggacatcatcccgtccgatcttgccaccttcggcggtgaggcgaagcgtctgttgcaggatctccagacccgcaatgagagactgtttcttgtgaccatcctcatcatgaacacggcaaccaaccgccagaagctcgaaaacgcggtgttccagaccgccgccattgcccaaaagtataactgtgcgctcaagcgtcttgacttccagcaggaggaagggctgatgtcctctctgcctatcggcgtcaatcaggtggagatcgaacgcggactgaccacttccagcacggcggttttcgtgccgttcaccacgcaggagctttttcagggcggcgaagctctctactacgggctgaacgcgctgtccaacaacatgatcatggttgaccgcaagcggctcaagaaccccaacgggctgatcttgggtacacccggttccggtaagtccttctccgccaagcgcgaaatgacgaacgccttcctcatcacggaggatgacatcatcgtctgcgaccccgaagccgagtatttcccccttgtgcagaagctcggcggtcaggtcatccgcatctcgccggtcagcacggattacatcaatccgctggacatcaacacgaactactccgaagaggaaaacccgctgacgctgaaatccgacttcattctctctatgtgtgagctgattgtcggcggcaaggacggcttgcagccggttgagaagaccatcattgaccgcagtgtccgcatggtctatcaggagtttcttgcagaccccaagccggagaaaatgcccattcttgaagacctctacaacattctgagaaatcagaaggagccggaggcacagcgcatcgcaactgcccttgaaatctatgttcacggctctctgaacgtcttcaatcacagaacgaatgtggatgtcaacaatcgcttcgtctgctatgacatccgcgaactcggcaagcagctcaagaagctcggaatgctcatcgtgcaggatcaggtgtggaacagagttaccatcaaccgcgcccagcacaaggcaacgcgctactacatggacgagttccatctgctcttgaaggaggaacagaccgccgcgtacagcgtggaaatctggaagcgtttcagaaagtggggcggcattccgaccggaatcacgcagaatgtcaaggatctgcttgcgtcccgcgaagtagagaatatctttgaaaactcggattttgtctaccttctgaatcaggcatccggtgaccggcagattctctcgaaggcgctgaacatctcgcccagccagcagaactacatcaccaattccaatgccggtgaggggctgatcttctatggctcgaccatcgttcccttcaaggacgatttcccgaaggatacgcagctctaccgcatcatgaccacccgcttagaagaaaccgtacagaactgataggaggatttttgaatatgaacaacaagatgattaccattccctacgcggacgctatcgaatacggagagaacacctccgcgctgtttaaggctctgtgggagctgaccgatctgatccgactggaaagcgacctcaagaagcatcaccgcgcctacctccatgtgagggaggacatcgacgaaaaggtcaaggaggcgcgtcagattatgaccaaggtatctgtggatatgatcggtttctacttcaaggttgatgttcccaagtgcagcaacagcgatgagaatacccctttcgctgacgcggcggatgatgagaccgtatctatccccaaggatgagtatgagctgatgatcgacgatctgctcacgatgtccgaaatcattcagtgcgtcgcagatatgcgcacgcaggatgtgaaggcaatccgcgagttcggcaagttcgtccccgcctttgccgcctttgagaagaaccgcctgagcctctatcgtgaagcagcgaaggaagcagaggaaatcttcgaccgttgggcggacgagattgacgatctcgacgaggacttcatggaagatgaggactacgagccggacgagtattactccgactgatatgcgctcaaatccgaagaaaggagctggtttttatagagcttgacatcattcataccggcgattgccttaaaatcctgaaaactctgcctgatgacagcgttcattgctgtgtgacgtcccctccgtattacgcgctccgtgattacggtatggaggctcagatcggcagagagacaacgccgaaggaatacatctcgcgcctgacggaagtgtttaccgaagtcaggcgcgttttgcgtccggatggaacgctctggctgaacatttcggacacctacgccggaaagggcaatcagggcgattttgttgacccgaagaaccccaacggcagaaccggtcaggctgtggctctcaacaacaaggttgagggctgcaagccgaaagacatgatcggcattccgtggatgttggcttttgctctccgcgataccggatggtatctgcgcaacgacatcatctggatgaaggataaccccatgccggaaagcgtcaaagaccgatgcacccgctgctacgagcatattttcctgttctcaaagtccaagaagtatttcttcgactacaaggcaatctccgagccgattgcccctgcaacggcagaacgcctcaagcgcggcatgaagggcggcaacaaatacggaaagcccgttcccggtcagcctcagccgcagtccatcaaccgcccccgtgagcatggcgagatcaaggattgtgacatcaatccgctccgcaacaagcgcgatgtctggaagatcaacaccgtccccttcaagggcggtcactatgccgcctatcctccgaagctggttgaaacctgccttctcgccggttgtcccgaaggcggtattgtgcttgacccgttcatgggaagcggcacaaccggcatggttgcctcacagatggggcggcattttgtaggcgtagagctgaacccagaatacaccgagcttgcctacaagcggatcggaggtgaaatctgatgtccaaggaaccggaactcaaagcccgcgacaaggttgttctgcggatgaagcgggagggcgcggttgaggaaaacctgacggctggcaccgagcagcgtgtgtcaaagcggctggaagatgcggagctggtgaagcccgcagagacagcagaaccttccgaagctctttctgcggaggaacagaaaaaggtgcagatgcgccgtcagcagcgtcagtttcagacggaacacgccgaggataacgacacacagccgccctcggaaacgtccgtcacagaagagaaaagggcagaaaatccaccccagaatgtacctgaaccgctgccctcggaaacgccgttcaagcctccaactttagagcagcacggcgtttcttatcataccggcacggtgattgccgaaacagttgtcacacacaagctgcgcaagacctcggcagtggaagcagtggatgcagatgccgttctctcccaagcggcagagacttcctccgcaaagccggtctcggacgatgccgtcccgcccacgaagcggatgcagaagctcgaaaggaagtctgagaaggcacatgagcgtctggatgctgcccgtgaaaagctgcccacgcacaaggttctcaagaaagagcgtgtctttgatgaagagaccggaaagggcaaaacccgccttcattttgaggatgagctgaaaaagcccaagagcaaaggcaagctgcaatttgaggcagataaaaccgtccgcaaggtcggtgacacccttgcttccggcattcacggcaaaatccatgaggtcgagcaggaaaactcggcggttgaggcggcgcataaaacggagatcgctgccgagactgccgctcggcatttccgtcatcatcgggaaagcagcgtcaacaagccctacgagaaggtctccaagctggaacacaaggcggatgctgctgatgcgaagctccaatatgaaagaaatcagcaggagcatcctgagatgaagaagcagaacatgaacaagcactaccagaagcagaacatcaagaaggaatatgccgcagctcgaaatgccggttctcagactgccgggactgccacgaagaataccggcaagaagctcggcgaaaaggtgtccgacaagctcaaggagttctttgagaacaacaagaaggtcttcatctggatcggcgtcggagttgcccttctcgttttgctcggtgccggtatcagctcgtgttcgatgctcacctctaccggctcgtcggtcattgcgtcctcctatctcagcgaggatgacgcgatgctcggcgcggaagcgcagtattgccaaatggagcaagagctgcaacgctatctcgacacctacgaaagcactcacaactacgatgaataccacttcgatctggacgatattgagcatgacccctatgtgctgatctccattctctcggctctccatgagggagagttcacgctggacgaggtgcagggtacgctccaaatgctgtttgaaaagcagtacatcctcaccgaagaggtcattgtcgaaaccagataccgcacggagaccgacacatggacggatgcagacggcaatacgcacacggaaacctatcgcgtcccgtatgactactacatctgcaacgtgaagctcgaaaacttcaatctctcccatgtcccggtctacatcatgtctcaggaacagctttccatgtacgcaacgtatatgtcggtgctgggcaaccgtgaggatctgttcggtgactctccctatgtggacaagtacatcacaaatcctcccgccgactacgatgtcaacccggaatacttgaacgacgagaagtttgcgacactgatcaccgaggcggaaaagtatctcggctatccgtatgtgtggggcggctccaatcccgacacgtcctttgactgctccggcttcgtcagctatgtcctcacgaacagcggtcttgtgaataccggacggttgggcgcacaggggctttacaacatcagtacgccggtttcaaaggcgaatgcacagcccggtgatctcatctttttcgtcgggacgtatgacacccccggtgtgtcccacgtcggcatttacgtcggtgatggggtcatgatccactgcggcgaccccattcagtacacatccatcaactcttcctattggcagcagcatttctacgccttcggaagacccgcctattaaaagaaaggagttttgcatgaatcccaagtatcagaaggtcctctctgacattgagaaggctgaaaagaaaaagaccgaaatcgaaggacagctcaaggagctgtacgacaagaagacagagctggaaaaccttgaaatcatcaatactgtgcgctctatggtgatggacaaggatcagatcatggcgttcctgtcttccatgaagggcggcaccaagcccgctgaaaatacggaggtaatcgacaatgcgtaagaagtttcgttttctgaccgtccttgcggtctgcgtcatggttctgtcctgcttctcggtgacggcgtttgcctacgccgatgataccgagcagaaccttcccgtcacggaggcaacccagccggaacagcagcctgaaaccactcccacgccggaaaagccgaagggtgagccgattgacgatgagggcaacgcctacacccgcgacttgctctatgacaaggcaaccaacaagcagttcatcaccatccagacgaagaacggcaacaccttctatatcgtcattgactacgatgcacccatcaatgaggacgaggaacagtatcagacatacttcctcaacatggtcgatgagagcgacctacttgcactgctggatgatgacactgcggcggctctgaccacctgtaactgcaaggaaaaatgcgctgccggtcaggtcaacaccgactgcccggtctgcaagaccaacatgagcgaatgcaccggcacagcccccgttacacctgagccggacaaggatgcggaaaccgatgctcccgcccctaaacccgaaaagaaatccaacatcggcatgatcctcgtcatcttcgttcttgccggtgctgcgggtgcagcttattactacatcaagttcgtcaagggcagaaagcccaaggatgaagatatggacttctttgatgatgaaggctacgaggaagagccgtacatcaatgaggatgaagagccgcagattgcggaggatgccgaaacggatggtgatgaagattgatcttagtcattgctgaaaagcccagcgttgcccagtccatcgcaaaggtgttgggcgcgacgtcccgcaaggacggctacatggagggcggcaattacatcgtttcgtggtgctttggtcatctggtggagctggcagacgccagctcctacgatgagcggtatgccaagtggcggtatgacgatctgcccattgttccggaaagctggatgtttgaggtcacgaaggacaaagcacagcagttcaaggtgctgtccgctctcatgaaggacaagcgcgtcaccgagctggtctgcgcaaccgatgcaggacgcgagggtgagctgatcttccggctggtctacgacaaagccggatgcaccaagcccttcaagcgtctatggatcagctcattggaggactccgccatccgcgaaggcttcaaccatctccgggacggcaaggaatatgaccgcctctatgaagcggcactcagccgctcgaaggcagactggattgtcggtatcaacggcacccgccttttcaccacgctctatcacaagaagctggtggtcgggcgcgttcagacgccgacccttgcaatgctggtggagcgcgacgggaaaatctccacgttccagaaggagcagtatttcaacgtccacgtcggcaaggacgatctgaccgccgatctggaaaaggtcagaaccgaagaggaagcaaaaagaattgcggcggcttgcgagaaaaagcaagccgtcgtttcttctctcaagcgggagacgaaaaccgtcaatcctccgaagctctatgatctgaccaccttgcagcgcgaggcgaaccgctactacggcttcaccgcccagcagacgctcgatctcgtacaaacactctacgaaaagaagctcctgacctatccgcgcacggacagccagtttattacggatgatatggaggacaccgcccgtcaggtgatttctattgtctgccgccagcttccgcttttctccggcgtttcgattacgccggacattgcccgcgtaaccgacaacagcaaggtcacagatcaccacgctattctcccgaccgtccagctcgaaaagcaggatgtttcggcgctccctcagtcggagcagaaaatcctcaatcttgtcgggatgcgccttctgtgtgcgaccggcgagaagcacacctacgcagaaacgcagatctcgctctcctgcgagggctacgagttcaaaaccaaggggaagaccgtcgttcaaaacggatggaaagccatcgaagagctgttcaagtcctccctcaagacgaaggaaaaggatgatcccatgaagtccctgcccgaagtccatgagggcgatgttctggatggtgtgtctgccagcgtcaccgaacacttcacaacgcccccaaagcagtacacggaagacacgctcctgtctgcaatggagactgccggaaacgatcagtttgacgatgacaccgagaagaaaggtctcggcactcccgcgactcgcgccggtatcattgaaaagctggtgaagtccggctttgcagagcgtaaaggcaaatccctcattcccacaaaggacggctgcaaccttgtctgcgtcctgccggaacagatcacctctcccgcaatgacggcggaatgggaaaacacgctcatggagattgagcgcggcaaggcggatgcggatgccttcctcagcggcattgtccggatgaccggggatctcgtgaaagcctatccgtttctttctgatgccgaagcccagcgtttcggcacgggcaaggaggaaatcggcaaatgtccccgctgcggctctccggtctatgtcggcaagggcaacttctactgctcaaacagggaatgctccttctgcctgtgggaagacaataagttcttttccagtaagaaaaagaagctgaccaagaagattgcaaaggagctgctggacaagggctggtgccgagtgaccgggctttacacgccgaagaagcctcaactctatgatgcggtgatccgtctggatgacagcggcggcaaatacgtcagcttcaagatggagtttgaccgatgactcgcccgaagtatgttgcctcttgcagcggaggcaaagacagcgtagcgacgctcctgctggctgcacagcacaatgagccgctggacgaggcagttttcagcgaggtcatgtttgataaggacacaagcggcgaactccctgaacacatggacttcatctatgaccggctcaagcccttctgtgaaaaagagctgggcgtcaagttcaccattctccatgcagacaagacctacgatgaggtgttccatcatgtcatcacccgcggaccgcacaagggcgaggttcgcggctttgcatgggctggtatgtgtgcagtcaatcgtgactgcaaaatcccgccagtccgcaagtacaatgccgcactctcgccggacactgtgagctatgtcggcatcgcggaggatgagccaaaacgccttgctcgtctggatggaataacgaaggtcagtctgcttgccaaatacggtatgaccgaggcggacgcctacaagctctgtcaggaaaacgggctgctttccccaatctacgctcactgccgaagaaacggctgctggttctgtcccaacgccagtgactcggagctgctgcacatggtcacaaagcacccggatatgtttgaccggctgattgaatgggagaaggaagataacatattccatcgccggatgacgcgcagagaaaccccgtctgaggtaaaggctcgtttattgagcaaatcccagacagggttttcttctgcccggaacaaataagaaatggaggtttgagatggctgaaaacaaaaatgcacagcaagtccgcgaaatcacggacaagctggaacagggcatcaaggagctttttgaatctgagcggttcaaggaatatctccgcacgatgtccaagttctacaactattccttcaacaacacgctgctcattgcgatgcagaagccggaggcaacctatgttgccggttatacctcgtggcagcgcaactttgaccgtcaggtcatgaagggagaaaagggcatcaagattctcgcacccgcgccgtacaaggcgcaggaagagcgtgagaagattgatcctttgacgcagaagccggtgatcggcgcagatgggaaggctgtcacggaaacggttgaggtcctgcgtcctgccttcaaggtggtgagcgtctttgatgtttctcagacggacggcaaggagcttccggacatcatcgtcgatgagctgaaaggcaccgtcgaaaactacgaggcgttcttcgacgcgctcaggcaggaatctcccgtccctatttcttttgaggacattccgggcggtgcaaagggattcttctcgccggttgaaagccgcattgccattcaggagggcatgagcgaaatccagacggtcaaaaccgccattcacgagatcgcccacgcaaagctccacgccgtcaagccggatgagaaagccgcgccagaagataagaaggatcggcacaccaaggaggttgaagcggagagcgttgcctacaccgtctgccagcgttacggcattgaaacctcggactactccttcggctacatcgctggttggtcatccggtaaggaaaccaaggaactgaaaagctctctggacaccatccgcaagacggcggctgagatgatcgagggcattgacgccaagctcaaggtgctgctggcagagaaagcacagtccgcagagaaggaaagcgaaatgcccgcagagccgatgcaggaagccgctatttaccgcgagacagcgaattacgcctatgaagccggtgagctggagtcatatcgtgcttctctcgccgcaaacgtggaatgccgcaaaacgattgaagcggcgatcagctccaactacggagataaccggctggatgcggatgctgccgtgaagagcgtccttgagcagttctctccggagcgcgtccgatatgtccttgcaaacaccattcagcagaaagactttgacgggcgtattccgcagcccctcaaggaatgggcaaagagcattgatgtctgtccggagaatgcctcccgcttccttgtggataaacccaatcccggactgacagcacttttcgtcgatgcgttccgtcagcagaccgaaccccagaaggaagccacttctgagaaaacagaggaaagagacccggaggtcgttgcatgggagaacgatgaaattgcctctattgaggtaaaaaccgtggaggtcaagtctccctttgctcccttgccggaggaagcagcgaaagcgccgaaggcacaccgtctgactgccgaagagaaggaaatcaaagccgccgtcatggacacgctcaaggggcagattgcctataacaatgacggtatgcgggcgtcctatcgcgcctctaaccactccttcaatctgctggcgcggaacggcgtcaaaattgagggcaacacggtcacgcagaacggtgagccgctgttcaaaatccatcgccgtcatgcggcgcggaaaacacagggctgctatcgtgagctgatgccgacgctggaatatgtcaggcaggagcagaagcaggaaaagccctccatccgcgatcagctcaggactgctgcaaaacagcagccggagaagaagtctccggtcaaatccaaaacgcatgacatggagttgtgagaaaggagacgcatgaagaaatacacagacgttgacatcgttgcggagctgcagaagctcgtggacgatcatgtagacagctacaaggaagacttcgacatcgacaagcgtatcatccgccgcgctgccgaaagccggaaccccgaagacaaaacactgatgtggttctgccgtccgcatggaacgcactgcctcaatgaaaatcaggtctttattcagggaacgcgggatcacaacatcttccgtttctatgcggaacagacctacgacgagtgcattgcccgcgtcatcatcccgaaagccgttaagcgcggcaaggtcttcggagatgtatttgagatcaactaccgggaacaggcggcaaatgtggcgcagaacgcggttgcgccagatcatgaccggttgaccttcgcagacggctatgtgctggacgcaccctgccgcagcagcttcgatgcagcaatggctctggtcggtgagcatggcggcgtaaaaacccaccagacgctcccaaaggatgcggaggctctggcggaagtgctgtccaagcagaaaacccgccgtgacagactgccggatgcaggaaggacagagacgctttcgtctctgcccgttgcagaacttcggaagtacgagacggtcaaaaaggctcaccctgacgcgctggtctgctttgcccagaatggctattttgagctgtacggcaaggacgcggaaaaagccgcgcccctgctcggcacaaagctccttgagaagaaggtacgcggcaagccctccatgccggtgaccggcttccgtgaaagcgcatgggtagccggttctcacaagctctggaagtccggcgcagatgtctttctcagcaaggacggcgagaccttcaaggaactcaaagccgcagattacattcctgtcggtgcgacgctgaatgtggatgggatcaagtgcagaatcgacgcggttgattttgccgccgataaagtccggctgacgaacattgaggacaagaaccgccccattcgcttttctgagagcatccagtatgtccgttcgtatgtggaggatgccgggactgccatctacgacaccatcccgaaaaagcctgctgcccgtgaatccatccgcgacaagctgaaatccgcgcagaaagcacagccgccccacacaccgaagccgcagaaaaacaaaggaaaggatatggaactctgatatgaaaaactttaccgtggaagaaatcaacctgatgtgctgcttcaacacgtccagccggaagcggctgatcgacgatatgaagagcgtcaccctgaacgacatggacggcgagatcgcagagctgatgtataagaccgtccggaagctcgaagccatgaccgatgctgagtttgaggaactgtatatcatgccggacggcatggtagatgactgaaaggaggatgcctatgcccgtattagacggtgattttgaagccttcgtcacgaaccttggcaagtacaacgagggtatgctggtcggtgagtgggtgaagctgcccaccacagaggaagagatgcagaaggtctttgagcgcatcgggatcggcaagcaagatgatttcggtcagccctacgaagagtggtttatcaccgactacgaatgcccgatctatggcgttcagaaaatgcttggcgagtacgagagccttgataagctcaactatctcgccgccttgattgacgagctttccctgagcgatcaggaaaagctcgttgccattatggaggctggctgcgatgaggtcagcgacatcgacgatctcatcaacctgacgttcaatctggactgctacgacatcatgcccggtatcaacgatgaatccgacctcggctactattacgcccacgaagctggtatctactctgaaaaggatctcggtcctctggcaaactatatcgactatgaacgctatgggcgcgacattgcgatggatgagcagggacgcttcaccgatgagggctatgttcgtgtcgcaagcgaacgctgggacaggcagtttaacggtgagattgatgatattcccgacgaatatcggatcaccggctcaggggaagccgccgagcgtgacagcaccatcgccgttctcattgtcgagccaggaaagaaaccttatgtgaaggagattgactcggatctcaagtccttgcagcatgaggtcggcggctgcatcgaggcgatttacccctacgaagaccctgttgccttagtctgcaatgaggaaggcaagctggaaggtctgccactgaaccgcgctctgcgagatgaggacggtgacatctacgacgttgttgccggaacattcttggtagttggcttgacggatgacagcttcggctctctgaccgtagagcagatgcacaagttctctgaccacttcaaagtgccggagcagtttgttaaattgggcgataagattgttgcgatccccatgatctcgaaggagcagcagaagcaggaagctaccgagcagaaggactttgagatgaatgccgacacctccggtctgacggttgccggacacatcgggacatggcacaccattgaccagcacgaagtcggcggtcacagcttttatctgatggagcatgacacctacggcgatgaagctgcttgcatcatcgtcgatgagcgcggcaagctcgtccttgatgatgtctacaacggctttgacgatgacacactccgccttcttgaccttgaagtcaaggaagtgccggaaatgcccgatcccgcgctctccgttcaggatatgaaggactacggctacgcatgggctggtgttcttcccgctggtcaggaggcggctgagaaggctttggagaagggctgcgaggtttaccgtctctattccgataacaccgagggcttgtgcgtagatgcaaaagagattgccgatcatgcggcaaagggcggaatgctcggtatcagcaaggaaagctggatggcggctcttgagaaggaaaactacctcaaggcagcggagatgtcgatggaggatgactacggcatgattgacggaatcatcaacaacggtccgaaggagggcaagaccgcagaggtcaaagcccccgaaaggggcgaaaagtcctccatcatggacaggctcaagtccgcaaaggctgaaaagcagaaggaatgctgccctccccaaaagcacaaaggagagattgagctgtgagcagaagtcagaagtggcggcaggagtggtcgttcttcataggagatagcggacgccggaagtataaccgcttctgcgtccgctgcgtccatagctgcaagcagagcttccgtgcggatctcatcgcctgtccgcacttctcacgcaaggcatcgaggtgtagacagttaggggtcgaaaaagcctgtgatagcaagcctcagagcgacgagaaatgaccgcccagtgtgcttatattccccgcacagttccagcaatagagcgagaataagggtcgatttcggcacttgtttgaatgcccggaaaacaaaccaagagcctctgtcgatgcccgttttgggcgtcggcagaggctctttttttatgacatattcaaaatagcggacagcagctcttgaacctgttgccggtattccggctttatatccgaaatacgtctggcaagcgcaagggcttccgcttctggctcctcggtcccaaagataattcggtccgcactgatgcccagcaaacggcaaagacgctgcaaggcttcaagagaaataccggaagcaccacgctcaatagcgctcaggtgattcggcgtcatgccaagcatttctgagagcgtgtcctgcgtataccccgcctgttctcttgccacttgaatattgccgccgatttcaatattgatgtccttcttctctcgcatagcctcaccacctttgcatttagtgtacctaacggcggtgtcattatccacggtacgccgtcgttgattttactaacgacaatgcgttgactgtccgtgatgagggtgatagaatggagttacctaccaaaagagtgaaagaaggggtgtcatgtcgcgcattattgagtttagaaagtctgctcaaaaagctgaaaagcaatccgttcaaggcaagacttgtgcgtttaccggtcatagaccgcagagtcttccgttcggctttgatgaatccgataagcgttgtacttctttgaaatctgttatgcgggatcagattgtagcactcatcgagaatgagggcgtcacgcattttattaccggcatggctcttggcgtcgatatgtatgctgcggaaattgtactcgatttgaaatcaaaataccctcacattactctggaaagcgcaatcccttgtgagacacaagcgatcaaatggtctgtggcttcacgggaacggtattataatatcgcggcaaagtgtgacaaggagaccatgctgcaacgggagtacacgccggactgcatggacaagagaaatcggtacatggtagatcacgccgattatattctcgcagtatggaatggatgccccagcggtaccgggaacaccgtgagatatgcccacaaaaagggcaaatctatcatcgttatcaatccggtttcccttgatgtcacgcgggaataaggcaaaaatcccactcctgaatcaagcgttgcgaaaaccgtgaagtatttcccgatagtgaatacacattgcactactcggtgattattggaaacgtgtacggcgtatgctgcccagtgaacatctccacggaacacatcgaattttcacggcttcgtaaaacggaaagtgtcaccttatgaacagtcccttgccgagagaaaaataaatcgctggaaacgggaacgcccccggcactgtgcgtctggcacagtgtcgggggcgtttttccgtgtcttagttatgagccagttcatttaggagcagctttcgatagtccacatccaagacgcagcgatggaagtccatcaggcggtgttcgtcgaacagctttttacagagcttggtcagcggatgattcatcagctttgcagaaatgccagtctcgttgaaaaaccttgcccatgtgaagacctcttctaaatcctcctgcccaagcgtggcaggaatgatggcgttgcagaggcggacaatggggctgtccgcaaatcgctctgccacttcctccggtgtgcattcatagcggtcacagtcaaaggaaagcgcatcctcaattttaagataattttcggtttcatcccgtgtcaaggttatggtgtagtctcccataccggacggcacatcaatattctccatgacatcaagctcgtaacgggatccgccgatgatcgcttcaaaggagaaggactgacagattactgctgggttcttgtctatcttgtcctcattcagaaaggacagcggattatactccgtcagttcccagtcgatttttcctctctctgtttgctcggcaatctgctggatcagatgttgttcttcttcgtgcagattttcattgtacatcatgatacacctccgttttctgattgtcgttttttgggggctgttctatgtttccgaagagaatgccgtttctatcatcattccttggctgagggcagaccttcgtaaaacttcctcagttcctccaaactgcttgtccgatttttgataggcagggagtcccatgtaatgtcatgataacgttccggcggctcgtcccgcagtcttcggtcgataatgcagacaatgccggtgtctgtgaaattgcggatcaatcgcccgataccttgcttgagcttgataatcatttcgggaacgcggacatccatcagggcatcctttgcgacggaacacttatactcgataattggatcggggacagggaacggaagccggaaaatgatcacattggaaaggctttttccttcaatgctgataccttcccaatatgcgcccgtccccagaagcacggagttcgtatcttccttaaactcattcagcaccttgtcctgcgacgatcccggctgttgcatcaggattttgtacggaagatttttctcactgagaatggagtagacctcttccatgtcggtcttcgccgtaaacagcacgagtgccttcccgttggaaatgttcaggatctcaagcaaccgctccacgcccttttcaatgaaggcttcgtgttccttggtcggatgcgggagatcgtcgcagtagtagatcatggcgtgttcatcgtatggatatggggaaggcttcggttcggataagcagccgcgttcaccaaccggaaagccggtattgctgataaagtaggaatactgttcttccagagacccgctcgtggcgttcgtcagcgtggcagaggtcaagatggttctttcatcaccattgaagtataggcggctcacaatttctcttgtgtttttagggcaatagacaagttccgtgttgctgccgtgctgctcaatccagatcaacatatcatctatccggtcaagaagctccgaaagggattcgctgacggcatccagatcatcagaagcagcaaaggaacggttgtttctgaaatccatgctggaataaatctgaatgctggacgaaaggttgtgtatggcggcgttcatttccgtaagcagctcaaccgcactgccgctttggtcaaagaaaaagcggtcagcgtagcgcatatcctgttctgcctcgtcgatctgcttttgaacttgtgctttcaggcagttatagaaggcgatgattgcgctctctgcctctcgcttttcaccggacacactgctttggtcagagggtcgcagttcatagaatgcgcttttaatcattccaaagagcataccttgcccgaaacgctccgttgtggcactccgcaccttatcatccaagttgtgcgcttcatccacgacaagcagatcagcggcggcgttaatcagtccgtcctgcccgcgtcgtagtttcatgagatgctgggtaagaaagtcctgattgcacagaacaacaccgtccgtgtattttaacgatgcacggaccttgtaatacttgcatttcttttcgcaggagccgcaattcttcatgctgaaccgctgcacgtttaccttgtcccagacgccttgcggcaaaacctccgggaaatccttgcgttcctcatacccctgctggattccttctttgagcgcgtccggtgggtctgctttcgggtcacacatatactcgtctgcgcgtttgttgcagagataatgggtctgtccttttgcgaggatgacatctctgttcagcccaagaaggggcattaccgcgtggacatcgcgccagagctgttcttgaagcgcaatggtcgaggttgcgatgatgaccggcttgttcatgcgtttgctgtacagcagcaccggcacaagatagccaaaggacttgccaatgcccacgccagcttcaatcgcaaaatgctgatcgtttatgagggcgtccacaatctcaaaggacatatcctgctgcccttcacgcatttccaatccatgctgcggggcttcatcccaaaagaaggtgctgacttgctcactcatggagtacagctctgcttttctgcgctttttccgttcctccgatgtattgaatccaaaatagaatctgttgtccatccacattcctcccggaatagaaaccaaggctatccgcgtttcaattcaatgctgacgtttccgttctcgtcgatggtcagcgtcatgtgcctgatgtgcttctcatagaactgccgccgctctgcgggagacatttcgatcctcgtgtttcgcagagctgcatcaaacatatcgttgacgttcaggtgaacggagttgtcaatccagcggtacatctccttgaacagtgcgtttttcttgatgtcctcgctgttgccggagtagaagtcatccagatagcagtagaatatcccagattctgcaagtgctgccttcatatccggtccgcatttttcccgctcaatcatgacaaggaatctggcgtccggtaaggaagagatcagcccccagtagtcggaatcgcttgagacgatgacgaaggaatccacttgcttctggtagtgttcctgacaggctcttgcggtgagcttgatgtctaccagtgatttgttctgcttgatccgctcaatcatgatatgttcaacggggatgcgggtgtagttttcaagaatccgccatgccgtagcggtatgtacgtcatcaaagagaatgatcgccgtaatcttctgcatgacctcataatcaagatttttgagcgtggcacacagtttgtacgggtcggagttttcgcagtccaccaccaatacggttttctcgctgtcatctatgaagtcgtagatattgttttttacaaaagcccctgcatcagagactttactgtattccgtgaaggcgtcgcaatgccattgataaagcagggtagcaaacttcttatcattatagaggacattaccctcgtccatcggtacccagttgatatacatttgataggggtagtaggagagacttgcgtaataaatatcggcagcatctttcgttccgtcctctgtcaaaccgtttggcataatgaacagctcttttatgtacgtccagttaatccagattggaaagaggcttttgcagttgttaatgcggtctgaaatcagccggttaatctcgataatgtggtggcagagctttgtactcgactttttgataaagctgattccgtcatttgaaagctgctgcatactggaagccgggatgatctctggcattgaaagcagccctcgatactccattcgcatgatgtcatttattttccggtagttgcgctcaatggcggtgcggatgatacatagattacgaatgatacgggcatttttatcctgttcaagccggtcgtatatctctatcttcggcggctcgtgttcattttgaaaaatacggagcgggacgccgatcaggtaagcgacctttgacacaagctcataggtgctgtctttgtaggcaatctgttctccggcatattcgattccattcaacatgactgaattgcccatgatctactcctttctcgtaggggagtcaagcggtcattacattgtccgtccacatctcacactggctcatgacagtctggacagcatcatccataccctctggcggatatttgtgttttttcagcaaccttttgaccaagcggcgcattcctgctcttgcgctctctttcttttgccagtctattgtctggtttttgcgaagcaaatctgtcagctctttcgtgattgcaataagctcatcatgctcgtaaaagtccttgattgcttgcggcttcgtgagggcatcatagaaagcaagctcatccgctgtcaatccgagtttttcaccctcggcggcagcagcggcaatgtctttcgccagcttgagtaattcttgaatgacttcctcgttggtcagcattccgttcaaatagcggttcattgcgctctgaatgatttcggagaacttttcagacttgacaatatttgttcgacggtaaacagagacctgttcggaaatcagttttttcaggagttcgactgcaagattcttctccttcatgtttgccacttcttcaagaaacttcggatcgaacaacgaaaactcagtctggacatcggagaagaggttgataacaccttcgctcttgatgctgtgcttcaaaagctcgttaatgcgctcatttacttccggaagcgtaaacttctttccggtaccgcctgaaaccaagcgcacggtcattgttcttacggactcgaagaaagctgcctccatgcgagtttgctcgtctaccaagctgctgcacagcgaaagtgcctgcttgagaagcagggcttctttgataaacacattctgtgtcttctcatggtcgggaagctcgtactctgcaacactcttgccgagtatgaagttcacgccgccgctgatgagcttcgccctgtcgaggtcgcttccggtcatgaatttctcataactgaatccgtggaacaaatctctgcaaatagagagcttttcaaggaacttcggatatgcagccttgcttacatctgtatcaccatagttcttcttgtctctggcagtatagtcgttcattgcctgtttcagtgcagccgcaataccgacgtaatcgacaaccaaaccgccttctttatctttgaagacacgattgacgcgggcgatagcttgcatcaggttgtgtccagccatcggcttatagacatacatcgtagcaagggagggaacatcaaagccggtcagccacatatccacgacgatggcgattttcagcggagagttgttgtctttgaatttccgcgccatatcgtccttatgagctttgttgccgataatctcacgccattcttcgggatcgttattgccttgtgtcatgaccactgcaatcttttccgtccacgctgggcgtagctcaagaatgcgcttataaatcttcattgctatgggacgcgaataagcaacgatcatcgccttgccggttaggatattctcacggtaattctcgtaatgatcaagaatgtcatttaccaaggaattgatcgtctggtcggcaccgaggattgcttccatctgaccaagttcttttttgctcttttcaatgacatacggatcggcgttgtcagccataatgtcatattcattgtcgatcagatggagggtgttctcgtcgagtttcaggtgaatcacacggctctcgtagtagacgggtctggtcgcgccatcttcaactgcctgtgtcatatcatagatgtcgatgtaatcaccgaagacctctcgtgtactgcggtcttttgtggagatcggtgttccggtgaatccaatgtaggtagcattaggaagcgtgtctcttataatgcgggcagtgccgataacggttttcgcctcgacttcgccgttgtccttctgcttgaccacaaccttctcattgagaccatattgcccacgatgcgcttcatcagccatcacgataatgttccgacgctccgaaagagcttcgttgctttcttcaaacttctgcatggtcgtgaagattatgccgtttgcctgtctgtttgcaagcagttctttcagattcttgcggctctcagcgtgctgcggcgtttgccggaggaagtccttgcagcgggcgaattgtccgtaaagctggtcgtccagatcgttacggtcggtaatgacaacgatagtggggctttctaacgcttcttgcagataatgagcatagaagaccatagacaacgattttccgctgccctgtgtatgccagaagacgccacccttaccgtccgtcacggttgcgtgttttgtagactcaatcgcctttttgactgcgaaatactgatgatacccggcgagtatcttgaaagtattctgtccatccacattaaagcagatgaagtttttcacgatgtcaaggaagcgggtcttctcaaacagtcctacaaagaatgtgtcaaatgatgcgtgttgcgtattctcatagctgccgtctgttgttttccactccataaagcggtcttcgccggacgtgattgtaccagcctttgaagtggtcaagtcgctcatgacacataccgcattataaatgaacatagaggggatctcatacatatagttccggagctggcggtatgctgcggaagcatcggtttcttcgcgggacggagacttcaactccacaatgacgagtgggagaccattgacaaagagaatcacatccggtcttttttcggagttctcaatgaaagtccattgattcgcaactgtgaactcgttactggcaggatttttgaagtctacaaggtaaacaagggtagagcgttcttcacccttgtcatagtattttaccgggactccgttttggaggtagtccataaagaccatgttcttctgcaaaagcgttccggtttcaaagttcttgagcttatagattgcctccgtcagagcgtccataggcaggctcttgttgatccgctgcaaggaaggtagcagaacatcctcataaagcggcgagtgataatcgcgctccacgtccggtccatagatatagttatagcccagttcttcattgagaagctgcaagacggcattctcataatttgattcggtaaaatagcccgacatttgtactcaactccctctatataatatccgcatagatgcggttttcagcttttgtgaagattacctcagcaggaaataaattttctcctgtatttgccattgaaaccagcgtcattgcccattcgttcaactgtacaggcagcctataacatagattttcaggtgatgcctcaacagtgactaatgggatgccgccctttgcaataccgacagaaagaactacaaaggcgttttttcctttggtgagttccagaatgggttgtctgtctacatcgtgataaacttttgcgccgcgtcgattcctaaaaaaatccttttcttgatctttcaccggctcaacaggcagcttgtttttcatctgctcaaaatgggtttcaagtctttggcagatgcagctattacaatactccggttgcatatcaaagtcttgttcgatgtctttagctgaattgaaatgattcatgaaatccagcagtcccaaaaagctaacaaggtcatctgaataattaccggcatagaccttataccaatcattgttgatctcgaacacgatatgataaagctgcttgtatagctgtaactgcccatcggttagtctgaaccattctttgctaagaagagtcttcgcaatgcggggactgtcctgcgtcggtgtcaaggaatggtatagcgatttcatcagtttgccgataattcctaccagcatatcagccattctaattccaaagtggtctatcgagtctgcctcttcgcaattcttcaaactggcttctttcgcggcaatgagagttttgctttcggctcctgcttcaccttccttgtcaagcaagactgaataatcaagaatgcccttgctgctcaggaaatttccaaacccgacaaactgcgaatggtagtcccaagtgagggactgcggaacatcgacgttattcaggacataaaggacggcttcaaatgccgtgttttcctgcgccttcaattcgcggttttctttgttacgcctaatccggttcgtcaagaatgtcattaacgcagctacaaactccgctggacttttatacaggctttcaattacttctgtgggtcggtatgtaactatcgctttgactattgagtagcgtgcagcgtccatatcaaagaagacgctattgcgatagcctttgaaaatttgggtgataacgtattcgattttgcttgcacagaacagatagatatagctgttctcatcaaagatggagaagaaatctccaagcagctttacatttgcttcgttgagagaggcaaatccatgaactaactgcttcggctttatcgttccgcttttcaactccccatttttctttctgtcagcgtatttttcttcaaaagcatgataactctgctcaaatgcagtttcatgatcgctgcgccacccgataatagctgccagaaaaccatcataatatgtctcaccagtaacggttgagagattgatgaccctgctatgctcagactcatcatagtaaaagcagtatttcatcttatccctcctaacgtaaacgataatttagagcagcaagcaatggcattatatcgacaaatgtttgttgaaaacaacaatgatgcccgccgagagagccgcgctgatgaatactttgatatttcaatcggtaagactccaccgcgcaaggaagcacagtggttttccatgaatcctactgattgcatttgggtgtcaatttctgatatgggaagatgcggtatgtacatcgcagacagttcggaatacttgacccatgaatccgtggataaattcaatatcaaagttgttcctgataacactgtacttctcagtttcaagctgacagtgggtcgtgttgcaattaccgatggcgcaatggtgaccaacgaagccattgcacacttcaaaacagacaagcccgaaatcaacgagtatctgtactgctacttgaaggatttcaactatcaaacgatgggtagtacctcatccattgccacggcagttaattcaaaaatcataaaagctatgccgtttgttattccaacagacgcagaattagtgtcatttcactctgcgactgctccaatgtttgagatgatcaaaacacgccagcgagagaacacacgattggctgaactccgcgattcactcctgcccaagctcatgtccggcgagattgatgtctctgccgtccaactctaagccgctaaattatcgtttatctgctcgttgcaggtgatcttatcttcgaggcattgcatcgtttgtacgataacttcttgtacagcaagcgaaggaacgggtatggtcaaattggcaacttcggaaaatgtaatctgagggaatgtgccagatcgcgtttcagctaacagttgaagttctgcaactgtggaactattcttcaagaaatagtataggtacttaggagataccacatccttttttgcacgaattaccatcagtttagttgaagcgatatagtctatgggcgaaaaatccacataggcaaaccgcctgttctgtggacggatctcgctatataaaatatcgtctcgctgaaaagtcttcttgaactgccctttcaaattggagtttggaactcgttcgtggttgagaactctaccctctaaaacgtccgaggtattgataagcgtcaccatattctttttttcgcgataagtgtccgaaatagacgaacaaacttcaccaacgggcatatatattgttccattcatactacccaccatcctaaccgatgtattttctatgtgccagcttcacattctgctgtttcaccattgcatagtgcatggtggtgtcgattttctgatgccctaagagctgctggacttgctctatgggcattcctttgtctatggcagttgtagccagtgtacgcctgaacttgtgagggtgaaccttcgggatattcagacgctttcccagctcccgaaggcgtgtctccactccgccaatcatcaatcggtcaaagggagctttcagggaaacaaacaaagctgggttttcatccgttcgcccctcaaggtagttttgaaggtggattttcgtccttgcgtcgaaatagaccaatcgttctttattacccttgccgataacaacgcattcgcgctcattgaagttgatgtcttcgcggtttagtgtgaccagctcaccaacacgcattccagaggaagccagaagatcaatcatcgccaagtctcgtgctgttgtgcagttgtcacgcatcagctctaacacttcatcggtgtaggtgtccttgaccacctttgcagtcttaactttgtgaatacggcgtaccgggcttttcacaatgaaatcctcatcttcaagccatgagaagaagctggacagtatccggcggatgttgtctatggtcactttgctcgacctgcgctgaacttgatagtttgtcagatagcggcgcaaatcatctgtggtgatctgtcgcacagcctttccaactccggcaattagagcctcaatcgtcttccggtagtagctcagggttttctccgaacagccttcgatccgctttgccgtgataaatgcttcgactgcatctgcttcgtctgctggaattgagccactatcataggtgatcgttgccccttccaatgtctcagccattgcatcccgaaggtgcatgagttgttcgttgttaagatacggcagcatttttcgctgtatctccgtgatgagttgttctgtcattgtcgtgtctcctttcgaggtaagagaacgacattcagtggcagtcccttttgtaaaactctcgccactggtgagagttattcagacggtaaacgataatttagcggcttagaactggacggcggagacatcgatctcgccggacatcagcttgggcaagagactatccctaagtcgcttgagtctatcgttttcgatggcgttaattcgtatttgcgcgtacatcggtgaaacgagagaatgaaactctgccagatcgtcctccgaaggaagaattaactcataagagagcgtgtccgacggtgttgttctttgtctactgcccgttgagccagtaacatgactacacataaagtcggaaaaggaattgctatctatgactgagtacaggaaatctgtaatagtcttatcttttgctttatagacgatgaactccgtagagcatactgcattcccggtcagacaatacggcttccaaacacgcttcgttgttgggttgagttttgagatcatgaagcacgaagcatcaatgatgaatttattgctcttgattgatgtggatagatcaaagaccggaaatctcgcctcgtcaaaagccgggatgctgtaatgctcaagcagcatctcaggctctttcagtgggttgaaactcttatttaagatggtcgcaacctctccaagcgttacagtacgccaaccggaatgtaaatcatcaggagaagcagtttcaaaacgctcatgatatattgcttgcgcttgctgctctaaattatcgtttagctcttgattgttcacaatcattttttggattgtggaaataatctcgacaacacgtttctgaatacttaattcaggcaatacgacctcaatctgttgaaaggtcgaagatggtctcgccaatgcagggacgccaacctgtgaggcattgcttagaagtttatgctgtcctattggagtgtggaagtaatagacaaggtattcgggcaaaaccttgtcgttgcatcgcaccctaaactgagattgcgaaatcacataccggtcatattttgaatcttgaggaataaacactatttgcccaagcgttcctctgtgtgttattacaatatccccgcgatgtgcatttgccttgttaagagagtcagctttttcccttgtgacatagcggaatgtcttttcggatagagaaaagccctcaagattactaccatttaggacaggtacgccactatccacaaaacacgagactttaatatttgatccgaatggacccatcgcaatttcatcaattaggtcagcaatacgatacgtttcatagcccatatccaatcgcccccaaacgttctttgatctgagcttcaagctcatgagacttagtgaaaagctcagacagttcagaagtcagacgccccattttctcttcaaacggttcgtcatcatcttcctgttcttcaatgccaacataccgtcccggcgtgagaatgtaatcctgctttgcgatgtcctgcgtagtaacaacagcacagaagcccttttcatcttcaagcgttccttcaacgaatgcgttgtaggtgtcggcaattttcttgatgtcttcatccgtcagttcgcgcagcttccgcgtaaccatagtgccgagtttccgtgcgtcgatgaacagcgttttgcctttttgcttcttgttctttgcaaggaaccagagcgataccgggatctgcgtcgtgtagaatagctgcgtcggcattgcaacgatacagtccacaaggtcagcattgataatgttcttgcggatttcaccttcaccgccggactgcgaagaaagcgaaccatttgcaagcaccataccgatacgcccattcggggcgagatgccagatcatgtgctgcaaccacgcgaagtttgcatttccagcaggaggcgtaccatactgccaacggacatcatcaacgagcttatccgcaccccagccggagagattgaagggaggattcgccataatgaagtctgccttgagttgagggtggcagtcgttaaagaacgtgtccgcattaaacttgccgaggtcggcttcaataccgcgaatggcaagattcatctgcgccatcttccatgtggtcgggttggagtcctgaccaaaaacggaaatcttgttgatgttgccaccgtgattttcgatgaactttgcggactgaacgaacataccgccagagccgcagcacgggtcataaacacgtccattaaacggctgcaatacttcaacaagggtacgcacgacacaagagggagtatagaactcaccggcaagtttgccttcctgttcagcaaacttggagagacagtattcgtatgtacgaccgagaatgtccttgctgctcccatgctcgatcatctgaatgttggtgaagagatcaaccacttcaccaagacgccgcttgtccagctccggacgggcgaagttcttaggaagaatatctttgagacgcttgttttctttctcaatactgcgcattgcatcatcaattaccgtgccaatttccggcgtgtgagcggcagcagcaatcgcactccatcgtgcattctcagggacaaagaagatgttttcggcagtgtattcgtcctgatcctcttcaaatccatcgccttcttcaaccagttccttgtactttgcctcgaagcgatcagaaatgtatttcaagaaaatcaatccgaggacgacggacttgtattcggatgcgtcgatgtttccgcgcaggacgcaagccgcgtcccagatttgtttttcaaagccgatattgcttgtgttattctcagccatttcagcaacctccaaagttatagtttcacacttactatcctacaaaaagagctgtacgaaaaaccggacttagttcttgtccgttcgcacagcctcacatatatctccgatgtcacagttcaagtaatcacaaatgcgcagcaaaatagagagggacacttcttcccccttattcagttttgtccatgttccggcagacaaccctacttcatgtcgtagagaagccctctttatgtcgcgttccagaagaagcatccatagtttcttatagcttatgcgcacggcaaccatcctttcgcttgcttgcattcaacatcgcttataatattataccggatttcattctcaaaagcaatccgttgatgcagaaattaaagaaaaagtttcaacttctcgaaccttctctcaaggatgcagggcatctccggtcaacagaagatgccctgcttttgaagagattattcgcgctgtgtgccgcgcagatgatcacggtcatggtcagcagaaggagcgagaaacgtatcaacattagacttgattgtctctatttgctttacttcttttttgagcttcgcacgttcatcatagagtcgctgctgctcgtcaagaagtcgctgctgttccgcttgcagtgtcttcaagctcggcagtttttcatcgccctgcatggcaagcagcgtactccgcgccgcctcaaagatcacaagttcggcttcatgctttgccttgaagctcggcttgtctttcgccttctggaaggcgtcatatacgggttttaggcgctggtagttggagatgtttttaataagcggctggacttcccgcagacgtgcttcaacgactttcagttccttgccggtacgatcataggagctgtgaacatcctcgaccttcttctcaagatcggcgtattggagcaagttgttgtccgtgagatagttgagcgtccgtgccgcttccttgaggatagtgagctttgctttatgctcgtaacccttgctgtcgataagcctgatccgctcctgaatatctccgatgagagagatgcccttcggcgtggtctgtctctgactttttcggggcgtccgtccggcaatccgctccttgatgcgttcctcggtgtagttctctccgatggttttagaccgggtaaaccgctcctgaccttcagcgcggaaggagatatatttgccggtcttgatttcataaccggcttcctgcatgagccgcagaaagtcatcgtagtccttggctgtgatgacaagccggtcgatggtctgcttgagcttttgcttccagctcgtgccgcgcttggcttcggtgtactccttgtagcccatgcctttgttctgagagggcgggataacagagagaccgttttccttacagagccggtcgctgacctcgcgcatatcgtagtaaatccgcttgtagctcttgtatgcgtggtagtccacgaagtcaaccgcattgaaaatcaggtggttatgaacatggtctttgtcaatgtgagtggtcagcacatactcatattttccttcgaggatttcatctgcgaactgcttgccgatctcgtgggcaagctccggcgtgacctctccgatttcaaaggactggatcacatgacgggctatgatcctgaccggattcatccctttttgctcggctattttccgcgtccattcaaattcccgcgctgcggtctcgctggcacagccgtaggacgagaccagcagcttctcgtcggtcttttcgggattcagaatgtacgcgattgccttgctcaaagttcctcggattgctttgattttagtaactgccataccgcgtccatcttttctttcagctcgtcaatatcgtcctgatagaatcgtcccgtcgagttgatcctgcggcagacggtattgatgttcacgccgatcttgttgatttcggcggcgagctttttctgctctgtgtagtctacgacaatgatgtagccgtcaatcagcatcttccttgcatacgcaccgaagttctccgtgccgatcatttccatcttctttgcaatcgttcgttcttcctgtggtgtcagccaaatcttcttctgaatgtctcgtgttcttcgtaccatgctgcgccctccgtcgtaaagattagaagggtttgggactatcccaacaagcaaaaatctaatgttaagggcagggtccccttaactgatttttctccggtgggtactcaccggatttgcttgctaatctcccaaaatcgtattccccgaagactcctccgtgaaatgtcccttcactttacaacggacacaataagagcgtttgttgagtaccggatttcaaaaaagtcaaaaaatcattggatttcccatgtgaaagccacggtgtccgacacgtcaatatcgtccggctcgatctctggcgcagagcatttactcatcgccataagaggctgaatgcagtcttcgacctcatagcttgttctggaatacacattgagttcgccccagttgtagtcgatattgagtagctgcccaagcgtactgcctgatgctttgcaaagaatctccgccttcgctctggcattctccgtcgcgctgatcagcagcttttcgctgaccgctgatgggtttcttacagtgaatgcaatactgagttccggctttgcaccgcaatccgcaatcgcagaaatgacctttgcaagctgtttgctgtcaaagtcaaatgcaagtttcaagcgatagctgcaagcatatccgacaaactctcgcttgtaatttccttgccgatccttgacgttctcgtatcttgtctggacatcaaagctcgtggttttcaagtcttctttgcgatacccaacgcagactgcggcaccttgcagtctttcgattctctcggcagcttccgacattgcacggtcataggttttagataaggtttcaatgttcaaggagaggatgatgtaatccggtcttgcggagacattgcctgtcccttttacggtgatcgttctcattgctttctcccgtcctttctggaattaaagtcctcatcaatacgctttttccaattcgtacccagtggtacgctgcaacggacagcagaaaccgcttcgctcagaacctcatagttgagctgcgttcccttatggtcagagtgataattgaccgctcggtctgctccaataccgaagtgctttgccgtttcaactgcgtcaatatttgcgccgaggaatagaaactcccagccgtacttttccttctgccgctcgatcattttcttaactgtctcgctgtcataacggcggcttgcattctccatgccgtccgttgtgatgacgaacagcgtatgttcagggacatcctcatttcttgcgtacttgtggacattcccaatgtgatgaattgctccgccgatagcatccagaagggcagtacatccgcgaacggaatagtccctgtcggtcatcggatccaccttctgaaccggcacacggtcatggataacctcgctcacgttgtcaaagagaacggtagagatcaatgcctcgccattctcttttttctgcttttcaatcatggagttgaatcctccgatggtgtctgtttccagtccgctcatagagccgctgcgatcaaggatgaatacgatctccgtcatgttctttctcatgttttgtacctccgtatataaaaaaatgactgcttggtgtctcaccttacagtcatattgtacttcggtattcacttcatttggtcgcatggcaagcgacattattctaaggataagaacagctctccgtcaatgcttaggatgtcatccatcggaatcttcgtgccgtcctgcatggtaattaggcgctcaaagtcatcaacctttatgactgcgccggttgcagttacatacgcaccgccagctttgcgctcatcaggtttgaagtaggttatttcaacctccggctcttcatcaagggcatccatgagaagctgatacctcatgttcaaagcggtcaaggctccctcatcaagctcaatcctttcgtcagtcagacgtccggtttccttgattgcagaatcatagccggtgagggcggcaaagggcgcaaactgcgctgcacgatctgacattggcatttgtggtcgcgttttggaaacgtggtgaggaagtcccatgatctcgtcgtattttccgttcacgccttatgccctccaatctgcgcattgcggtctttcgcggttgcaccttcttcaagattcattgccttgaggatggcgttctttccatacttcttcttgatggcaagcgtggcggcttgtatcttccgctcacgctccaaagcggcatcttcggctttctgtttttcctcttcggcggcatagtcggtaaagaggtcgagctggacagcaccgtcgtttttcttcggcgcatcggcttccggcaggacatgatttgccacaacatacatacggcggacaagcagattcttgtccacgatccggtcaaacagctctgacacggcacacattattttgcgggtagaggatgtgtgaccgtcgaggttgatagacccgtgcgcctgtttgggaatctcccgcccgtaggggtctttctccaccgcaccgtgatactttgcccgtcgtgccggattggtaaggttctcgatgtcgtagcctactgtgagaaccatctgatcagtgacaagccccttgtccaccaagtccagcacaagcaagtccgtcatttcccgcacaaccagcttcgccttttgcgactcataggggcagtgcaaaacctgaccagagctgaggctgttggagctggggcggtacgccttgattgctttaatggtcataggctcccagccccacgcatggtcaatgagtagttccgcattcttgccgaacagcttataaagcaagtcctcgttccgctctgaacaaagggcaacatcgcccatggtgaacatcccgttctgctcaagtttcttggcaatgccccgacccacgcgccagaagtccgtgaggggctgatgagaccaaagctcacgccggaacttcgtctcatccagctctgcaatgcggacgccgtttttgtcggcggggatgtgcttcgccacaatatccattgccactttgcagaggaaaagattcgtgccgattcctgcggttgctgtgatgccggttgtttcaagcacatcgaggatgatcttcatggcgagatcatgggcggagagtttgtaggtgttcaggtagtccgtcacgtccatgaacacctcgtcgatggagtagaccacaatatcttccggggcaatatacttgagataaacctgatagatgcgggtgctgtattccatgtagtacgccatccgaggcggcgcgatgatgaagtcaatcgccagagaagggtctgcttgcagctccgagaagaagtgtgatgtaccgtccagcctgtgtcccggcgcatcgtgctgccgtccggcatttgcttccttcacacgctgcttgacttcaaacagccgcccgcgtccggagataccgtagctcttgagggagggcgtgacggcaaggcagatggtcttatcggtacggctttcatccgcaacaacaaggtttgtgtccagaggatctaagccgcgctcccggcactccacggaggcgtagaaggatttcaggtcgattgcgatgtaagtgtgttgtttcaccttctttgcctccgctttcttcttagatcagccctaatgacatttcattggagcttttaatgttgaatacgatacgccattcaatatcaccctccaccggctcaaagtgtagagaggaacaaactgcatgaagtttttcttttgagctgtctccacacacgattgcgattggaccgtccgctccgccgataatgccgatacaagcaatatcgtttcgtgcctctggtgcatagcggtcagagcatggcgcaatttccaaaggcttgtccccctcagcgcaatcacagatcgtaacatcgctgtcaggttcaggagaaagtgtatagctcatagcagtaaaatgcgtaggataaaaccagcggtcagaaccgtaacgcttttcggaaattgtctgctgctctaattcctgtacagtcaatgtgtatttttttccactgaccggatggaggaaagaaaacgaatcaccgggagcgtgtgccttgaaatgtggtcccgggacacgacacgactgctgctccattgtaagggagagggcttttatttcaggacggcgtttgcttgtccacggaaaagctgcccgaaaaatcatccatccataggatgtatccaaatcatagtgttccaatgcccactttgcttccgcttcattgatcaccccgtctggcaaacatggattaaagaccacggaacagccgtgggaggtcagcattgttttcccgttcaattccaaacgaggaataaagtcaaggcaaagtggattgtctaaatctatctgcatttgctgctcctgcgtgaagtattcgcaggagtcgttttcggggtgtaaatcccatttagttatgaacttgcgaatgtcttcttccggggtacgcatacaaaagtccatgacgagtcccttgctgcaagaatacgccgcaggaataacccaatgatgcctcgcccagtcaaattgcttattcaaccggatttccgttccggcatggtcttttcccgaatgtccccagaagtttccctcaaagtagaccttccactcaggcatggtcggttctgcttctgggttcatatcaacatcataatagtcctcggtgtacttgatcttactataatcaaaagatgcttgcagctttttgatgtatacccacggctgttccataggcgtcaatttcattttctcagcaagctctgatagcgttctttgctgatcctgcgttggagggttgtcctgcaaaaaggcttcaaactgggctttatcccacatccacgcctgttccagcgctgccgaatcactgcaagcaaggagcaacctcagaaagtcttcaaaatcgtttgccagcggatgaacaaaatccggagccgagttcatgggactgacggaaaataccataccgccaaagtctcgaacaaagcagaagtggatgccgtccacacccgcccagccaaaaatagatgcaccttttggcgtgcaaaagtatgggttgttatcttcacgacgctccacccctacgggcgaaaggtcaataccacttcgcaaaaatttctgaaacactttatccatagaccttatgctcctattaaactttggtcgaaggcaaacagagcctcgttgatctcaaagacgttatagttcccatgctcaacgaaatactccacgatgatgtcaaacttgttggagtgggagagcgcaaagccagccttcatgagcatatccttcatttcaacaagcggcagctcaagggcaatggcaaacgcaatgaccgtgggcttggaaggcttataagacttgtccgagcggatcttcgagaagagcttccggtcaatattcgccttcttatagcactgcgcgtccgtcatgccgcgctcatcaatctttcgcagaagcatctcggaaaaactctcgtcgatctgtcccagcgcgtcatcaagggttgccgcctttttgggggcagccgccgcagagacgggaggcatgagctgttcgattgcctcttcacaaacggatgcctcgcaaggcatgggttcttccatccggaaggcgttcatcctgcgcagacgctcggaacgattatcagtatgctcgtccacatagcggtcatctatgtacgctgcaatatcggcaaacagcttgccgctgatctgataggctttgcggtcaaaaatgacgatgtacaccgtcatttcgttttcgagaaggaaactgctaatggtgtcaatcgccactttgagagcctgatccttcggatagccgaaaatgccggaggaaatcagagggaacgcaaccgattcgcagccgtattctttcgccagcatgagcgaagtccgatagcatgagatcagccgttcgcgctcaccatgccgcccgtcataccagcgcggaccgacagcatgaatgacatatttgcagggcagcttatagcccttcgtgttttttgcgctcccggttttgcagccgtggagcgtttcacattccaccagcagctccggtcctgcggcacgatgaatgcagccgtccacaccgccgccacccagcagcgactcgttggcagcgttgacgatggcgtccacattcatttttgtgatgtcatttctgacaatttgaagcggcattattctatcctccgtcctatcaaagcggcatcggtgtccgggcgatcagaatgaccgccagaatcgcgcccacaaatgccgctgcccctacgaccgccaacacctttttgtcgagcttcttcttcgctgccttgccaatcagcgcagcgcaagccatgcagacagccgcagcaacaagcgcaatgcccagcgtttcccatagccaagaaagttcatgtaggattttcatgcgatcatcatctcctgttcgttaaactggaatttatagtcctctcaaaaccaatttgctttttcttctcgaaatacgggaatatcactatctcgatatggattgtaattatgaagattgcaaccaaactcttttaatgattttattttgttatcctgtgtccatacaattaaagatattccgtcaaattcttcaacatttccattattcattttgcttttaaaataccactccacgattgtttgattgccttgatgaaaaaattgcttaatctcccagacaagaacacttccgcgtgtattccattcgtcaaaccagtgctttaccgttttgcggttttcatatttaggactccaactctcagtatatacaacatcatctgtaaaaatattgtcaattcctaaatctgctttcttaatccacatatcaaaccataatcggataattttttctctctcgttcataaagtacctccataacttccgagttgtctgtcccttaaagtccaagtccttcaacccacgccgcaagctcctgatgcccgacgttgcccttgaaaactttgccgtccatcagctttgcgcctttacagctcggcgcaaggcgttcgttcgtcttgccaatgccgcttccgccggaggtcgcaaacgggatgatcgtcttgccggtcatatcatagctctcaaggaacgtattgataatcgtcggcgcgacataccaccagatcgggaatcccacaaagatggtatcgtagtccttcatgttgtcccgcttgacggcaatctcaggacgggaggcaggatcgctcatctcaatcgtgctgcgggctttcttgtccatccagttcagatcagcttccgtgtaaggcaccttcggctcaatctcaaagatgtccgcgccgattgcctctgccagcgtctcggcaaccttcgcggtcacgccggacgcagaaaaatatgctacaagtttgttgctcataattgcctccatgtttattcgtcttgatccagaccaccattcagcacgaggtacaacagtacctccatcaagttagcaatctttccaagtgtaatgtcctcatctttggacttcataatcaactgaaatactccatagaacacgtcgttccggttaaggtcagtttccgtttcaaaccgctcaagaagtgcttttatgcgctccaagtccggctcgtcttccggcttaaatgaatcttgcattcccagcagagaagcaagttgctcatccttcatgatagcgtcgtattctacaagctgctttgcctcctccggcatccactcgtcaaaataattgatgaagatgtggacgcgaatgccgccctccttatcaggagagaaacagacggtatgtgccttatccgcgatttctttcaggaaagcgaggtcttccggatcatcgaactccacgaatgggagaaacagattgatttcggaatgccagtggtggtagtctacgatcccttcaatgcgcccgtgatgctgcttgacgaactcatcacagcgttccagaaggtactcgtaattcttcttatcctccggtacaatgatcttaggtatcttatccattgcatcagagaacgatttcaacatatcgccgttgatcacacggtcaaagaccgcttcgtaccattcgtcatgctcgtcaggctcgactttccgataatctttctcatagattatatcgtccatagcgtcacccctttacgattttctcaatctgctttccgtctgagctgggaagaagtgattgcagatgtctcagaatacgctctctggattcttgcgggtctctctgatatgcagacgtaataaagtcatatccaaaaagcgtttccggtgttgcgtactccgcaataccccagccataaggtcttccatatttgtcctgcatatagacgaaatccgcaatgcagacatagctctgcatttgcagccttgtgatacacgtttcaaagccggtgttgccacccttgcgatagtttcgcacttctttcagacgcttggaaagaattgtgccttcgttggctatggtctcataaagctctttgtccttataggacgccaagccatcatcccaccgagcatcaaagtcatagccgtcacgccggaagtttgcaaaatccggaatccaatcgcggctcacgaagccagccttcttgccgaaaatcttgccatagagacatttgccgctccgtgcagccggtcctttccattcccacggaccatctacatcatccgcaaaccataactcaggtgggcaaagttcctcgatggagaagccgtgaatctcgttccgaaagaagggcagaaagccgtattgttcgacggcggcaatcaaaccatctgcactatgtagttgtctggcatatctctttgacattactccgcctcttcaatcacgccataatcaatcaggatgttcttctccgcatactgcgggtaaacaacacccatcatctcatactgataacgtcttacgcggcgatgctcctgaattggttccggtgcatacgcagcggtttcacagtgcgcatactccggcatttccgcaagatcatcccgaacatcacggataagcgcttctgccacatcatcaatgttcttgccggtctccacggcaaccagttcgtgcttccggactgccttgtccagattaccgggggagcgaaacagcttatatttcatatcgttgcccgtcctttctctctttcggtctgcctattcttcctgaaatctgttctttagggacgcaatcatcgcttgtgcggcaatgctcagatacaaaactccaatttcatagataaagtcgcggtcgatcacgataaagtattctctaacgtgtgtaaaaaccagttccagcaagtccctgtacagcggatcatcaaagggcttgaaccgcgtaaacttgcttttggcagcgtcccatgtcatagacgcttcgccctcagcactggtcattgcctcacagagaatcatgctgacgcccatttttccgttgccggtcaggagttctccttcgtaatagctgagtaggtctttcttgcgtcgaagcggaactacatcgcagttgtcatccagctcaaatgcaatcagctccgcaatcagttcccgccagaccgcataaccggcgttaatggttccgtcctcttcgcggctgatggtatcatccatgcagtatcgctcaaagaaattatctccgccaatctcgttgcgggtgcagaagatatgcgccagctcatgcagaagaatgtgcttcaactctgccggatgacgcgctatgtctgtgcgcagaaggattccgtccgcgccgtctcctgtgccgacgaatgcagaggcgtgaaagtcaaaatagccgtcctctgtatatcggtcttccagccggtcagggaaatactgcttgcagaactgctcaaagacttcctggtgattttccgtttgaaagcaacgcaacacaaggttgtcctcgctgaactccgtccccaagcgttcgttaaagatggaagcagcatagaaaagggcttctttatagtcgttgttgttcatctaattactatccttcatcctcattcagccctccggtctaacatttttcaggaagtcagagtgcggtacatacggcaagttgagctgccagcccatgcggttcagctcgttgagcttgatcagcatcaggttgatgtttgttcccattgcagccgagagctgcaccacatcgtagtcctgcttcatcaggtcaatcagctcatcatcgtcaatgatcaggtgagaggcaaacgcattcgcctcatattcgtgttttgtgcgcatatcgaacagcacgaactccgggagcggttcgttccctttggcaagatcgcgatgaaaggtatcatgcccgatctcgtgaccgcagaccatttgcatgatcagatactccatattggagttcagaagaatatgccgctctttatggcggtaggtgtacattccgagcagatcgttcagattgtcaaggaaatggagatgaatgcccagctcacgggcaatcttcaaggtatctcttgttccacagcttttgacaatgctgttcgcctttttgtatatttcctcggagcgaattatcacgggaccttcacccctttcatgttgaatacagtcaaagtaaatccgtcgggaagccgagacgcagacagttattcctctgcgtccgtctcggtcttcttgtatttcttcggcgtgtatttctcaacattccgggctttggattcccaatatatatcctgcaacgccttcatcaccgcatccttgtcctgctcggacagggtaccgcccgcaaacaagccggacatcccttcaatcaggtcctttgcctgtttcatgccacgggagccgtactgctcggatgcctgaaccacaaactcttcgtcctcggtcagcagatagttcacatccaccttgaagtattccgcgatttttctgtaagcgtccttggtacgggggaaggaaatgccgttctcgtaccgggtaatcatacgcctgttgatccccagtgcatcggctacttcctgctgggtcagcttccgcttctcccgttcagccttgaatttctctccaaacgtcattttggtaatcactcctgttcacaaaaagtttgcgacatcaaattgcgcaagtctattgacaaaggcacttgaagtgcgtataataatgactgagcaatccaactactcatagtatatcctgaattgctcatcctgtcaaggggcatgagtagttgtacacgaaaaagttacatcttttgagcagttcaaatggacaggcatttatgctgccgaagatcatccgtaccggcatacaccggtatgagggaacaggagtgagaaaaacggaaatggctacacagtacagaaaagcatacgtcccggttacgctggatgtagacaaggagggggcaatccttcctcgccttatctggtgggacaacggtgtaatctttcaaatcgaccagattctatacaaatgccgcgccacatccaaaaaggttgggggcggaggcatccgttacacagttcagattcgcggaaaggagtcatttcttttccacgaaggagacaagtggttcgtcgaagcaaaggaggacaactactcatgattttatcccagcgccaacttgaagaaattgcagcctcaacaacgaaggacttcaaccggttctttttcggggatgaggcggacaagcccgaccgatcagctttgccaacacccattgatcagtttgcaaagaactatctcggtcttcgcgtatcattcgcccgtctctcgccggacggaagcatctgcggtgtcactgcctatgccgacactgagtacaagatcacggaacttggtattacgcgcacactggctttgaagcgtaatcaggtcatcttggacgagagcttcattcgatccggaaatgtgcagcggctctgcgccaagcgcagatttacccttgcccacgagtgcgcccatcagattctcttccaactggaatcggaagaggtaaaggcgtcctgcgaaatgaaatattccgcacggacagcctatacgccgcgagagctgaaaacccgcgaggactggaacgagtggcaagcaaatgtcttgggcgcggcgatcctgcttcctcaaaaagaggttgacctggcaatgcgtcggtttgcagaaacgccgctgatcaattacgaggggaggtattcgtatggtgatcacttaacgctgcgccttttctgccggttgttcggtgtctccaagacaacggcgtctatccgccttcgtcagctcggctacatggtagatcgtccattcagtgagtatgttgacccattggaggtgtggtaatgaagagagcatccattcgggttcaggaaccgacgccggagctgatcgaaaaaatccgcagggcaagagttgccatttcccagcagaagccccgatacctgaaatgtccctattgtcagcataatgccattgctgtctacgaggacacgaggggtcatgtagaatccaagtgcaagaaatgcgggcggatcacagtctttgatgtgctgaatatgagaagactgcgaccgcgtaccaagtaagaaccggaggacaagcctctgttctaaaataaaatatatgtcatagctgagctgtggagccgcctgataggtgaagtcatcctaatgccgcatgagacagagtttaattgctctgttttatcggcatgggattcaaacctcaccgtcatgcggctctttttctgccttcacccttcccgctgctcccgcgcagcggaaaggatgaacaatgaaaatccctaaaacccctatcgcgttcgattacgacctctggactacggaggacggcaagtgcatggtgcgcgtgaaacgaaccggcgaagtttccgaggttgaccgcaaggttatgagaatccttcgcgcagaggaaaagcggatcagacgctcgtatggctctgacaacacctctgaggatgaggacggcgcagagaaaatttctgataccgtgctgtcccttgacgctatgccggaggacgatgtgaagtccgctgcatggctggcagactcccgcgactgcatggaggaactgatcaccgctctcaaagagaaggagcttctttccattctgaccgggaagcagcgcgaattgtatcttgcgatgacccgtgaaggactgactcttcgagagtttgcccgaaggaaaggcatcggcatcagagctgcatttgacctcaaagcagcggtgcagaaaaaatttcaaagaattttttgagcggtactcaacaaacggcaaaaagatgtccgttgtaaagtgaaagggtcaatcagaccacttcactgctccttgaaaactgaatagttcagtgctgcggatctttccgcttctgcgaagcaacacagcttccgacgccaagacctcccgaaagggagtgagcgacctccggagagctataacagtcgtgtggtgcggctgcttgcgacgatgcagatgccgggtataatgatacttccgtcttttctttgaatgggcggctcggagcgatcctcggaggggtgagagtcccatgataccgattgaccattggtagtccgcagcattcccggaactgcaaagttcttctggcaggggcgcgagctgcaaatatgccggacaatgaaacaaacccaaaagaaacttactatatagtttcaggatgaaaactatgtggcagagtgtcttcacaagatgctctgccatatccttttgtcctgaatatttccacgaaacaggaggtgcttagaatatgatgggcattgaaacaatgaaaagcgtcagcccgaaaacggttgaccgaagcacactcgttcagagaagcagcatccggcttgatcctgcggcaccgcgcgaggacaggctgagggagttcatcaagcagatcagaaatccctactgttatctggacgggaaaactgtggtgaagatcagcttcgccgcgacggacacgacaatggaagattgtctggaacactatctgagaggtctttgatttatgaacagtctgaatcctttcacccggttctatggacaagcgattgagcctgtggtataatgaaatcggtcaaaaaaagaagaatacggattaagccgcttgcctagatggtcatgtggcgttttcgtgttcctctcataagagttgaagcaagccttcgtctttctgatttgatgtaccacaccaaacagaaaaacggaggttatttttatgccagacaaggtttaccgcacggcgatctactgccgcctgtcccgtgaggatggagacaaagtagaaagcaactccatcgccagccagagagccatctgcgaggactatatcgcaagacatgaggatttggagcttgtctgtgagccgtttgtggatgacggttacagcggcgtttccttcaatcgtcctcagttcaaaaagctggaagaggcaatccgcaagggtgcgcttgactgcattgtggtcaaggatctcagccgattctcaagaaactacatcgacggcggacgttacattgagaagatattcccgcagctcggcatacgcttcatcgcaatcaatgatgcgtatgacagtctgaccggtgatccgcagtccgactcctttgttatcccgttcaaaaacctgattaacgattcttactgcaaggacatctccatgaaaatccgaagcagtttggaagtcaagcagaagagcggtgagttcgtcggctcgttcgcgccttacggctacatgaaatcaccggagaataaaaaccagctcatcgtggatgaagcggtcagcgaatatgtgcagatgatcttttccatgtacaaggacggcttctccatcggacgtattgcaaagcgtctgaaccagatgggcgtcctgtccccaatggaatacaagcattctgccggtgtgaagtttgataccgtcttcaaaaccggcgataccgcaaaatggacatacaaagccgtccagcgtattctcaccaacgaggtttatatcggcgttctggctcagggcaagcgcggcactcccaactacaaagtccgcgtcgtgaaaagcaaggatgaatccgaatgggtcaaggttgaaaatgcgcatgaagctcttgtgtcctacgaggacttcatggcagtcaaggtcatgatgcagagagatatgcgctgttcacccgatcaggacgaggcgcatctgttttccggcttcctgttctgcggagactgtcagcagccaatgatccgcaagaccgtcccgtcgaagacaaaaaagtatatctactacgtctgctccaccaataagcacagccggacgtgcagcccgcacagcatcgccgcaaaagaggttgaagagaaggtcttccgtgccattcatgaccagatcgagcttgtcatcaatctggaacacgcgcttgcgatgatagaacggcttccgtctcagagccgtaaggctttcaattacgaagctcagatcgccaaaatcgaggaagagattgaacggtaccaaaagctcaagctggggctttacgagaacttcatcggcggcgtcattgataaatcggaatacttcgagttccgcagcagctacaccaaaatcattgagggcaagcaggacgcgcttctgcgggtcaaaaaagaaatgaagcagacggtgacaaccggcacgactgaacggaactgggtaacacttttcaagcagtatgaaaacgtcgaagaactgaaccgccgtgtgctgatgtcccttgttgaccgcattctgattcacgaaaaccatgcaatcgaaatcgtcttcaaatacaaggacgaataccagcagacgcttgaatacgttctcggctatgccgacgaactggatattgccgtataaaggagggatgagcaaatggcaagaaaaagcagaaagcaaattgcagtcgaagagccggttgttgaatctgtctcttccgaggtcttctcaacagccatctatgcccgtctttccgttgaaaacagcggcaagtctgaaaaggtggatgtcatcgcaaatcagattgagatttgcaagtcctacattgcagagcgtccctacctgaatctgatagatacctatgtggacaatggacgaacgggtacggtttttgatagaccggagttcaaccgtctgatgaacgacatccgcaccggcaggatcaagtgccttgtggttcgtgatctcagccggttcgggcgagactacatcgaggcaggaacctatctggaacgggtctttccgcagatcgggcttcggtttatcgccatcaaggaaaactacgacaactttgatacggacagctccggcgaaagcctcatcatccctctgcaaaacatgatcaacaccctctactcgaaggacatctcccgcaaggtttctactgcgctcaaggcgcagatggaaagcggagagttcaagaagcgcaatctcccgtatggctaccgctgggatgaagaacactgcaatatggttttcgatgaggaaaccgcgccgattgtccagaagattttccaatggaagattgaagggctgtcccttccggcgattgcagaccggcttgatgccatgaacgcgcccaatccggagtttcagaagtatcaggtcggcgtccgcacaggcaatgctacggcaaagaagatttggaacaaatcttcacttactaccattctggataatccccattacgtcggagataccgttctcggacggacgctgaacgccatctacaagggcgtcaagaatcagcacattgaccgtgaggaatggattgtttttcccaatactcacgaggcgattatctcccgtgaggacttccagaaggtacgagaaatgcggaacgctgctgcaaggacaagggttgagaagatggagcgcacggaagaaatccgcgctacgctgatcaatctctttgaagacaaaatcgtctgcgcagactgcggcaaaaagctctacttccatcgcaagcgcgttgacaagcgcaaggacggcgcatggtacgccttctatgagtgcagttcatccgtcaagcgcggcaatctctgtacgccacactatacgcggcaggacaaactcgaagccgatgtgcttgcggcgattcagcttcaagtcaaggcggctctcaattacgacaagctgcttgccaagctgagaaacagcgaaggtgaacgcagcatccgagatcagcagaatgcgctcattacaagcctgaatctgaaactcagcggtatttccaagaagcgtacccgtctctatgaggacttcacggaaggcgttctcgatgaagaggaatacgcctttgccaagaaagcctacgatgagcagtatgtcgatctttcacggcggttggatgaagcggttcagcggaaggtaaagtttgccgaggcaatgtccgaggacaataagtggctcacgctgatgaaatctgtcagcggcgcagcaaaactctctcaggagttgattgatgagtccgtagagcttgtaaaagtccatgaggacggctcaatcgagctggtcatgaaatacggcgatatttacgctctgaccgttcagagtatcaaggaagtacaggaggcgatgtaaatgagcaaggaatacaacatcggcatctacatccgcctctcaatggctgatgaagataccggctatggcagcaaggcggaaagtgacagcatcggcaaccagcgtatgctcatcaatcgctttcttgacaatcatccggagctgtctcactgtcagcggtctgagtttgcggatgacggttataccggcacgaactttcaccgtcctcagttcacgcagatgatggagaaggtcaagcgcggcgagattgatctaatctgcgtcaaagacttttcccgcttttctcgtgactacatcgaaacgggaaactatctggaatgcacctttccgttcatggacgtccgctttatctctatcaatgacggctatgacagtgacgattacaaaggcacaacgggaggtctggaagtggttatgcgcagcatcatctatgcggcatacagcaaagacctttccgtaaagaccacatcggcaaaaatccagatgatgaagcagggcaagtatgtcggtggctacgccccatacggctacgtcctgcatcccaccattcggaacaaacttgccgtagacccggaggcggctgatgtgatccgtcgtattttccgcgaggcgctggaaggcagcaacacctctcagatcgcccgcagcctgaatgatgacggcatcccgacgccggggcaatacttcaagagcaagcatcccgacaagaagaagttcagtaacatgagcgagaaaatcagttgggaaaccgtgatggtctataacatcctcaaaaaccttgtttacaccggaacactggtcagccgcaaaatgaagtcctgcggtgtcggctcaaaaaagcgtgttgtcaatgagccgattatcgtagaaggaacgcatgaagctattatcagcaaggaagactttgagcttgctcagaaggtcattcgaggcggaggacggaatcccacgcgcaagcagcatgactatccgctcaagggactcgtccgctgcggtaactgtaaacgtgctatgacacgccgaaagaacaaggctggcattcgatacttccagtgcattcactcggtcaacaacggaaacacagactgtccggttggcaggagctttccggaaatggatattgagaaggttgtcttccatgcccttactcagtttcttgctttggcacagaaggaagcaatacagaaccgcgaagtcggtgatctgcggaaatctgccatcaaggaatgtgctgataaaatccgcactctgcaaaagcagaacgagcagaacaaggcgtccaagctgaggctctacgagaagtatgcagccggaagcatcacgaaggaggcgtacattcagcagaaggcggcagcggatgtgaagattgctgaaaacgatggagcaatccagcgcagtcacgagcggatgaaggagcttgactccgagaccgcctgttcagatgaaaagctggatgcggtctgcgaacagtacgccgactgcaaagctctgacctatgagctgacccacgcattcatttctgcggtctacatttacgatcttgacaacatagaaatcgtctggaagttcaaggacttcctcactacatcagaaggagaagccaaatgaaagtatttctttatatccgcgttgcctgtgcggatcagcttgcggcagcagaccagcgggaagagctggaacgctatgcgaaggacaaaggctatgaggtggctgctgctgtggcggcagacggcatctccggcgtccatacggaaggtatcatgaacttcctgctgaacgaagccaagcgtcaggacatcggtacgatcctcacccgcgacacctcgcgaatcagccgggacacttcctctttcatgaggtttgagcgaaagttccgggaaaacggcatccggttcgagtatctgtccaagcctgacaacgagcttccggtcactccgatgttggaggcatttgcggcggcgtataagaagcgtcgcacaaagaacggcacaagagcgtagagaaaacgcaagccgttcacgggtggttgtccacctatgaacggcttgtaaattctcaaaatttttttagtccctacttgacacaagaagacctttctcgcctgggacgaaactatgccgagaccgggcgatacctggaacagatcttcccgcgattgggcgttcggtttatcgccgtcaacgatcaatacgactctgccagcaacaccgacagtgtccagcagatggccgtattcaaaaatgtattcaacgatttatacgccgccgatgccagcgccaaggtgagaacctcgctgggcatcctcaagcggcagggcaaattcctggggcggcaggcaccctatgggtaccgcatcgatccccgggacagatatcatcttctgcccgatgaggaaacggctcctacagtgcggcgtatctttgcactgtttctgggcggggtcagccgtacccggattgccaagatcctcaaccgggaggggatcctctcaccggcagcccaaaagcaaatgacggacaagagccgccgctttacggggctgtggaatgcggagaccatccgccggatcttgagccatccggtgtatcagggcgatatggcccagcagttcacccgcacgatcaattataaggtacacaatcgccgccgggtcgatcctgaagattggattgtggtggaaaacacccatacgccgctggtcagccgggaagatttcgccctggcgcagcagatgcagacggtccgtacatacgaaaccaccgaccatcctcatctgcttacaggcatcgcctactgtgccgactgcggcagtccgctctatgcaaaaaagaggggaaagtattggtatctgaattgctacgggtactatcgtgatcccacagcacatcaatgtacctcgcacagcatccgggaggatgtggtggtgcaggcggtggtggatgcgctgcgtaccttggcgcaaaatcaggtggattctcaagcgatggcccgtaagcgcgttcaaaagcagcagggacagcgggatttgaaaagtctccgccgtaagctggagcagcagctggaatcggcacgcaaaacccgattgggagcctacaaggataaagccgccgggattttgagtgaggatgagttcgcttatatctcaaaaaatcttcgcgaggaggaggagcgctgccaaaaggaactggagcagctggcgcgcctggaagataatagagaccagacggatgccatcgaaaaaaagatccgggcgtttctgcaattcgagtatctggaaaaaggacagctgcaacagctggtgcgccgtgtggaggtggatgcgcacaagcatattactattacctttaatttcatagaccctggcaaaagggccgattgagtcaatccgcaattatgcggagcgattcagccggccttctttttttacctattatggcgtcctttttgtctgaaattctttcagtttttggggagtgaatttctctggaggcctatattttccgatagaaacgaggatttgtatgcacgaaaattgctgggagcgtttttcaattccttcatgtcgtttatatcatcgagaagtcggaattcacacttttgaattactctattttttctcggattctaatcgatatgagcgtatcgaaagggtatggcagtttttgaaccaaaaatgcaggagatatgcccataatcgttatcaatttattctttgcccgggtttcagagcagaaatcctgaatacgattgtagggcaaagcctgaagatgcttgtgaacccacgggtcatggtggatggcgaacttgggtatctggggatcacagactgcagaagtgatatccttacggagtgtcggtttatattcaatgccttttgggagcggcatggcctgtccttcctcaagatggaatattgtctgaccaaccgcattgatctttgcatgggaattgaatttctggagcccttctccatttcggagtatcttgacctgctgaaaagaacacctcacaaaagtacatatcgtcttttgtcattgcccaatcaggaagatgaacggcacagtttcaaaattgccaatcaaaggcgcgggttggtggtctatgacaagggatatgagcaaaaacgtttttcaaagagcgctgttgtctccggactgagcctgatgcgaatcgaatatcagctttatccggcagggctgcgaaatctaagcctgaaactggatatcgttgaccgatacgctctgttcaaatggcttatggacaatgcgcctgaaaccatctgtcagggcatccaacactgtctggagatcacgccttaccggtccatcgaaaaggtcaaggcagaaattgaaaaacagacatcctggcatgagagtaccaaagtgaaaatgaaaaaggtgcagcaatacctgtatcagcagggaacctatgattctctggtggaagagatgcgcctccagaaaaaatgcccgaactgtataggattctgggacggtatcggcaactgggattatcccccacaactctgcgcaaacgaagtgggcagatttatatgcccagcttatttatgttggctttgcatgtgatgcaaaaggagtttgaagaatagggtataccccagacttaccatcccggcggacccttttttgtaaaagaaagatccatatccgacttgattgacacgatgtaacgcaagtccctcttttgacaagagaaccatgcaagggtgtttataccatactgccaaaaaaagagggctccttcccggaaccctgctgatggcggtgaacggggaaggagcggagagcctttggtcaacgatttgtgcgctctgcaaactccgccagaaggcggtctagtgtggggcgggagattcccagtaaacgggccatttcctttttgctgatctcccgggtatgatagcgggcgtagacggcttcaaaacgttgggaatccaatcggatgggagcgcggcctttgtatctgccgtgtgctttggcaatggcaatgccctcccgctgccgttccagaatgttctgcctctcaaattcattgatggcaccgatcatggtaagcatcagcttcccggtcggggtggaggtgtcaatattctccttattgctgaccaaatggatcttcttgcggtggagcagctccacgatcttaagcaggtcagaagtgcttctggccaggcggctgaaatcgtggacgtagatggtatctccctcacgggcaaattccagcatggcctgcagctgggggcgattggtgtctttggcggaaactttctcggtgaaccaacgctcgatgttatacttgcccagagcatcgatctgacgctgctcgttctgttcggcggtggatacacggacataggcaatcctcataaccaatccccctgatagacagaatattcataataggactcctgcaaggctgctcggaacagttccggatcctgcaggagctcttctatttcgtccgaacaatagccgcatccctgtaagatcagcacatcctcctcttcgaatcccaggttgcaggcggtatgaaagagatcttccgaaagcgtccttttagcgcctctggaagattgccaaccccagggagcatacaaaaggctttgcagcctgcgggtatcaaaggtacgggtcgtcatctgcccatcggcagacaggtgtaaaatctctccctcctccagccagacgtgggagaaaggctgcgtctgtaaaaagtccagacgggcaatggcattctgaaggatatcagaagtactggcatacacgaataatcccaaatgaggaaactccaccaggcaaagggggttattgccccgcacaaagtagaggttgtcctgcttgtccagaatggtcagcgtgaaagtgccttccagttgttcggcaagggcagccaaagacgtcaaatccagtgttccggtggatgccagcatctgtacggctatgtaactgtctgtctcgatcctcgtcttgggaagatgcagctgatggcgcaatagcaggtcgttgctcagaatgccgttatgggccagagcaaagtcgggaccgctgccgggaagatgtccatccaaatcgccaggaaagggatggttgttatagttggatcgtgcattcccttgcgtggtcatccgaacatgacccatgactgcgcgggcagaagcggacggcaaaagcagtgccttgttggcggcttccggacgtttgtagatgtgcagtcggccatggctgttgtaggcgatgccggtagcatcggtaccacgtaccatactgcttaccgacaaggcacgaagaagttgacgggcctgccgtggatgcaggctgcgggacggatcactgaatccaaacaatccgcacatgattatacctcccattctgccgttaccggctcattgatgtacagacgacgttctttcagatattggatcagttccgaggtgctttcgtcggtcaagcggagcacaaattcgggccagcttaggtccttgatctcgctctcggacaaagaaagagccacccggcagatgcgatccacaaactgcagggtggcaatgagcgtattgagcttgagcgtgccccggaaagcccggaactcaatggtgtcgtggttggtcaagtttacgcaggcataacgtccgttgcccgagtcgtatttggcatgttccagaatttccttggcgctgttcttatagccatagcgggcagcccaatgattcatctggctttcggtgcggcggctgaaacgcaggatctcctgccagaaccgctcgaacagataaaggattttggagatggtttcatcctgggcggcactgtgttcccccaaaccgttccggttcacatggacgtgcaggccgcaagttccggcgttgtggctgctgtagtgcatctctcggaaggcagccaacgtttcggcccagggaactttggtacagtgttcttccagagtacaaggatgggtcaccagctccaggccatcatccaggctgccgtcagttttcatgtaggcgtattcttccgagcggttgatcacgttcaagactgtgcgggcatgggaagcactctgcccggccccatctacttccagctctactcccagatagagtggccctccaccatagaagataggggagggcttgtagctgtaggaatgcagtgcgtcgcctactttctcacggtaacaggattcacagtatggaggcgcatcgtcgcaatcttcgtcataccaggcttcgctgttggaaatcagacggccgcactcgctgcaagcgacaaagtattcctcccggcaggagggacagaggtcataccggccatccccctggttgtcactgttccagtggcggaaaccgcagttgtcgcagacgaaggtctcctcgtcggcacagttgcggcagataggctgatcgcctacaaaataggcatcatcgcggtggacctcggcaccgcagcatacacaggtcaatgtttcgttcataggtcattcctttctggggcatctcagttatctttgttcaggctggcaatgatggcagtgacgacagccaccgtcaaagctaccagcgcttcggctacattttccgaaatgcgaaaatcctcagcacagattcatggatatagcctccttgcaaaataaaatagagccgtatggaagcaatttccatacggctctatttttataatatatagcaaaaaggaaaaagattttcaaagaaaaggatcggtgcggtcccaagctgctttttatgccaaggataacacttcggaaaaagtcaaaccaacgataaaatgggatgcaagacaatacccagcagcaacaatcccaaatcagtcattccatatccgcaaaggaggccggtaaccaagcgccttatgtttgtggaggaacgaattctcaaaaattgaaccgtccagtccagcagcatcaccaggcagaagagaacatccaaacgccagaaactgccgacaatgaaatgcccgaacagggagagcaactcacctatgtatacgccagtacatcgggcacagacgggaaactgatacccgcgccaataaaagcttcgctcaggcaactggtgacaacccagttttttccccagattccacaaccgcaaccacatcaggaacccgtattcgcttcggctttcaggccctgataggcttcctgatattttttcagttccgccttgtgccgggctgcctgttctttttcctctttcattgcccggagagaggggctggcgtattggccaaacagtttgtcatctttctggctgaaaaataccaaaacagccataccgatgattgcaagcaagatcccgtaccctacagcgttgctggttagcagagcaatcacaaatatcaggacgccaagtaaagcgatgatggatcctgccgccattccgtatgcagtagcctgccatgacccgattgcttttcgttcttcatcccaagcggctcgaaactttttgtctttctcttcctcttgccgggttgcttcgtcatagagtgcggacaactgttcgggagggtaggggcagctttccatcatgctgtgccaggtggccagctgtgcttctttttcctgctgctttttcgccaggttctgctcttgctgcaacttttgagttacggctcgctgggcttcctcagtggtgaacttggtgccgcagtcacagcagacccagctttcgttggttttggtagaaccggcaccgcaaagcccgcagagcaaaccgagcgggcctaggcatacataaccgcagcaggcatcactcaccgaaacgccctgcgttttcacggtggtggtgtactggagccgtgtggaaccgcagtgcgggcaccttaaagtcccgtcatattcgtgaggtgtggagacagccggtgccggagcaccaggcgcagattgtccggcagttccgttttgaggatggccgcaatagttgcagaaagcgctgccttcgggcaattctttgccacaatagttgcattgcatggtttgtctctcctttagcgcgcagtgcgcaggtatcggccaaggacatttccggagtcgtcatagatttccaagtacaaatcctctccttcggtgacaaaaccgaagttggaaaatccgccttctggtggcacgataaaatacgcaccccaggtgccgtcgccataatccacaagctggctatacggagcattgccgattcggaaggcatcgatgataaagttttcactcgggccatagaaagtggtgaggctgctgtaggggttgaattcactgatggtgttatcttccatcaaagtataagaaccccagtaggcagtaggcagcggcgtggcagccatatcataggtgggacggacataagattgtaccagattcccatctgcgtcttgctcggtcagcgttgtctgatccgcagagaacgtgaaaacagtatccaccaagctatttcgagagtcagcgcggtaaatggtagtgctgccgtccgcgtttacaatggcattgttctgggcattcattgtattttcaaaaacaaacaggccactaccatctgaataagcccaggcgcctttccaaggctcattctcggtgacgaggcagcaatcttccacgggccgcacatcggcgatggactcctgcacggggcgggcaacagaatcttgcgccgtcgaagattcagcaggaaggggcgtttcttcgggaaagatttcttcttccgctggctcgctggcactggggatcgaatccggcaaatcggtatgggaagaatccaccggggaaagaagatagcctacgagtagggcggcgatggcaaaaaatagaaggacaactccaccaagaaccggaggaagaaggctggccggaatacggtcggcgtcgccccctacctgcttatacaattcttgcggatagtatcggctgacccaaatactaacaacaacaaagcagatggcgataagcaatagcaggagcatggcaattgctgaaagggtggttgcggtcggtactgcggtatatgcgtaagaaaacaatcccaaatctacgatcagggcaatgcagcagggaagataagtacgcttgaacaggccatagcttttgtgatacagcagctggaagaaaccgtaaagataggtgaaatagctggactgaggtttctgtcccgcagcgattgcatcgaactgtgccgcaataccccaacgctttttggccgttgccggtgcggattgatcttgggaagacgccgcaacaggctgattctgaaccgatgtggaagcgggcttatgaggtgcggttgtggctggaacaggagtgccgcagtgggggcagaacttagccgaatcgcttagctgggcaccgcaattaggacaatatttcatgggaaattcctcctcatacaaattatcttgtcgtattctgcaacgcctggccgaaagaagaacgttggtacaactcaaaggccgagcagataattggtaaggctatcgaccaaggcctggtcaacgttgtcatatatgacggcgatggcataattgatgtccgaagcctccatactcccgttgccgttgacctcgccatagattggctcgtaatagacctggtcgtcgctgatttcggtaacgccgatcagcagggaaacggttgcgtcttcgttggcgttgtaacccgataccgtgacggtccagtaaccgtcatcctgatcgtaacaagtccactctacatcgcggaggttggtttcgaccgcttcgcccaaggtgacattgctgctgtccatcgtgaatgtttttgcggtttccaggatctgacttttagaagttcccgaacactgtacaaaaatcacgacgatgacggccaagaccagtagaacgcagaaaatggaaccgagtggacttttcttggaagtggttgatttcgctttgcagtcttcattcaacggtttttggttagattcattcaaaatttctgatttttcttcgtttgaattctcggctccgctttgggcgtcgggagtggcagtttctgcatggggagagggacttgttggattttcagtagaagcagacgccaaagttgcagattgatcttcagttgtgggagtgccacagttatggcaaaattttgcatcgtcctccaatggggtaccacaattctgacagtatttcataagactcctccatctttttatgatgtccttactgtgccgcctcctgattgacaaatgtctatacaggagatccataaagcctgttttgagaaaatcattgcagggaatcaggctcattcaatgattcgagccctcttttgaaaagatgaatacttggcatatacacaagaaatgtgcaaaatgctgatctttaacacaatcatatcggcaaagtgtgttaaagtcaagaataatgttgatctttagcatattctgagacggcgaggaaacgcttaccggtatgaagatatatgattataatggtaaaaagaatatttccggtgaccgaatccgagaggcacggcaaaaaatgcggatgtctcagacagatttggcagccagaatgcaggtggaaggtatcctgattgagcgggacagcatcagccgtatcgaaatcggtacccgctttgtgccggattatgaattgccggtcttttccaaggtgctggatgttcctgtcgattggttgctgggattataaaagaagaaactcctcttgaatgccttttcattcaagaggagttttgtattagcccgacgattggcaaaaagcggaaaggtcccggcgggagactcgccaggattttcctacacgaaacgcgggcaaatccccctttttgatcagtttatagacggtatttttatgaatgcacaaaaattcagccacctcgattggcttcagaatctccggcaaatcctggcattcttcaggggaaacgtcataatagagcatggaacatccttctttctgtgtgcagaatgtagtataaggatatgatgtaaataaaagcacatcttacaacattgtgcacacaaaattaaacgttcatagcgtagcataattgtgctgcactaaaaaataaggtgattgttatgcctgaaatcaggccggtgtgtgacctgcgcaatacgaatgctctgtcctgtaaaggatgaaatgattggatttttgtgatacttatattatcgcactatcgcagaaaaagaaaaagtgctatacctgttttaagggtatgcccaagaaatagtccaaaactctgtaccaaccgggtccggtggagctggccagctgttctttcgggcagagcagcaaagtcagctatctgcaaatgatcacggcggtgtccgccattgtgaacggcggcaaactgatgcagccttacgttgtggccgaagcccgcgacgccgacggcacggtgctgtggaccacggaacccaccgtcaagaggcaagtcatctcggaggaaacctccgagaccatgtgcctgctgatggaacaggtggtggccaccggtaccggtaaaaatgcctcggtggcggggtatcgggtgggcggcaagtccggcaccagccagaagctggacagtgaggacgccagcgcccgcattgccagctttgtggccgtggcaccggtggaggaaccacgccttgccgtgctggtctgtctggatgaaccccacagctggacgacgtcgggaggttcgctctcggccccggtttgtgccgaggtgctggccaaggcgctgccctacctgggcatcgagcccaactacaccgaggaagaacagcagaccctgtttgccgaagtccccgacgtgaccgggtggcgcaccgaggccgcaacccagaaactgaaagaatacggtctgactgctcacatcgacggagacgccgagcgggtagtggcgcagtacccgctgccgggagtgcaggtgcgcaaggaatcggttgtatttctggacacaacaggggagaacgaccccaccttggaagagtaagcaaaaacaaaaggactccgccccatgcgccgggcacccggcaaggcatggtgcggagtcctttattatatggtgagatgatggatgccgaaaaggtatttgctttgaaggaaaggggcacatcctctgcatggcttcaagctgtgataggggaaccggaaaaacacaaaagaaaacccgcagcaaatgaaaaagagcgcaaagaaagaggcaatgcccggcgaacctggttgatttgcatttcgcgtttacagctttaccggaaccggcgcggcgatggttaggctgtccggtgtgacggcacattccatggccaggacctccacacccgcggcggcagcccggcgcagggcatccccgaaggcggggtgagtgacatcgttgggggcaaagtccttcatgccgcccatctgcaaaacaaagcagacggtggcctcgtagccttccgcccggcagagagccagttcctccagatgcttgacgccccgcagagtgggtgcatcgggaaagcgggcgtggccctggtcctccagggtgacacccttgacctccacaaagcctttgcggcctgcggcgtcctcccagtaaaagtcaaagcgggagttcccccacaccgtttccgggcgcagcagcgtcagcccgggacgaaactgcccggccccggcccactcgccaaatacacggttggtagcctgggagtccatattgaccatcaggggacctttctccaccgcaataagatcgtagcgggtcttgcggttggggttgtcgcccagagccagatataccgttgctccggggaccagcagttcccggcagcgcccggtgttttttacatggacaacttcctcaacgccgtccagcagtactttggcgatgaaccggttgggccgtgacaaaaaacgacccggtcttacagattgatattgcattgtgtttctcctgcctgtatcctgatagagagagtatagcatcgggcggcggacagtgcaaaccgcccgcaagcacgagcggcatcggaaagcagcagccctgcaagagggagatgctgtaaacgacgcatgggaaatgcgtggcgtttttctggccgatccgcgcaaaaggaggtcttttcatgcacattcccacctgcgataccgcccggcaggagattttgcccttcgaccgcgccctggaggacgcgcgccgtcccaacccggactacgacgtcaaccgctggctgtatgttcccagtatgtactgcgattaccgatatatcctcggcacggcaggggaaaagcccttgatctgtgtgggcatcaacccgtccacggctgcgcccaatgatctggataacaccctcaagtcggtggagcgcatcgccctggccaatgggtatgacagctttatcatgttcaacgtctatgcccagcgtgccacccgtccggatgatatggaaaaggagtgcaaccccgtgcttcatcgggaaaatatggcggcattccgctgggcgctggaacagacccggaccggtgcgcccgccgtgtgggccgcctggggaacgatcattgaaaaacgcccctacctggcggattgcctgggggatatgatccgcatcggcaatgaactgggagcctgctggtattcggccggggcacggtccaagaaagggcatccccaccatccgctgtacctgcgtaaggactgtaccctggacctgtttgacgtttctgcctatcaggcgggattgtggccggaaaaagtccggtaaaatatgcggtaaatcggggaaaagaagttccagtaattgaaatttatacagaaatgtgctaatatttcctataaggccaggaaacgggcaagcattggctgccgtgctcccgtgccgatcctgattccggaaacaagcgggccgagggaactttttgtgtggcccgccgtgttcatgcgtctgtataaaacaatttgaaaggaagcgttgttgtggcacagaaaaaagcgcagtctgccaagaagcagacagctgaagtgaaagctgctccgcctgcagccaaaaagactgagcctgccgttgagaagatcgaacccgctgtgaagaaagccgagcccgctgccaagaaggccgagcctgccgccaagaaggccgaacccgtcgccaagaaggccgaacccgtcgccgcgaaggccgagcccgccgccgtgaaggtcgagcccgctgccgcgaaggccgaacctgccgtcaagaaggccgaacctgccgtcaagaaggctgaacctgccgtcaagaaggccgagcctgccgtcaagaaggccgagcccgccgccaagaaggccgaacctgccgtcaagaaggccgagcctgccgtcaagaaggccgagcccgccgtcaagaaggctgaacccgctgccgtgaaggccgagcccgtcgccaagaaagctgaacccgctgccaagaaggcaaaacccgccgccaaaaaggcgaagcctgctgccaagaaggccgctccggctccggcagccgaggcacccaagccggcggtacaggaacctgcccccgcagtggaagaagcaaaacccgttgtgcaagaatcggttcagatggagaaggaagtgcctatggaaccgcaatatgtttccccccgcagaagtgttgcctttatcggctctgaatgccatccctttgtcaagaccggcggtctgggcgacgtgatgtacgccctgccccgtgaactggtctcccagaactgcgacgtgcgcgtcattctgccccggtatgcctgcatcccccagaagtatcaggacaagatggtgtaccgcggcgagttctacatggacctgggcaacaccggccgcaactactatgtcggcattatggagtacgtctgtgacggcgtggtctatgacttcatcgacaaccaggagttcttctccgccggcaacccctacatcggtctggtggacgacatccccaaatactgctacttcagcaaggccgcgctggctgccctgaacttcatgaactggatccccgatgtcatccactgccacgactggcaggcggcgctggtgccggtgtatctgcgcaccatgttccaggattctcccatcggccgtgccaagacggtcctgaccatccacaacctgcgcttccagggcatctacaacattcccaccctgcagtactggaccggtctgccggatgaagtgttcaacatgggcgccatgaagcagggctatgaggatgccaacatgctcaaggccggtctggcctatgcggaccgcatcaccaccgtcagcaacacctacgcccaggagatccagacccccgagtacggcgaaaagctggaagaccatctgcgctaccacagctacaagctgcgcggcatcgtcaacggcatcgactacggcatgtggaaccccgccaccgaccccgccctggctgtcaattacgacatcaccaatgtgctggatcacaagtgggagaacaagctggccctccagcaggagctgggcctggtgcaggatcagggcaagtttgtcattggtctgatttcccgcctgaccaaccagaaaggtctggacttggtcaacgccatcattccccaggtcatggacggcaacacccaggtcgtcgtgctgggcaccggcgacaaggagtacgaggacaccttccgctactacgaaaatgcctacaagggcatgttcagtgcctgcatccagtacgatgaatcccgcgcccaccgcatttacgccggcgctgatgcgctgctggtgccctcccgctttgagccctgcggcctgacccagctcaatgccatgcactacggcacgctgcccatcgtccgtgagaccggcggcctgaaagacacggtgcagccctacaacatcttcaacggcgacggcaacggctttacctttgaccgctacgatgccggcctgctgctggatgccatcaaccgtgccaagaccgagtacttcatcaatcgctatcactgggacgaggtcgtccagcgcgacatggccaaggatgtctcctgggagaactccgcccgtcagtacaaggacctgtacctggaactgactccgtggtgatctgaatccaactctggcgcgtaaagcgtgaatacaaaaggcttccggaaggatattccggaagccttttgctgtttattcgctgtaaatctgctggctgcccgagatggcctgccccagatattcgtcgatccaatgtgcggcgccctcctgatcccgggcgcggatcaggtgatagagcttttcggtgttgcggcagagcgctccgataccgtacagccggcagaaccgggtccacagggtgatgacgggggacttgaaggagtaatagatcagcggcaggatgctgttgccgctggccagggccagctcgtgctggaatacccaggccgcttcggcagcctgggcggggagctcgcactcggcaatgtcggccagtaggtctcccagatggtccagtgcttcgtcggaagcatggcggatggcgttggacacggccagatgctccagcgccaggcggacttccagaatggagcgcacttcctccttgcccaatatgccgccctgatactccatgatggcaatgagggtgctcagattaccgtggcgccggtagtcggccaccacggcgccctgccggggccggacctccacaaaaccctgctgggccagttcggccataccgccgtttaccaccgcccggctgacctgcatctgctgggccagctcccgttccgggggaagctgggtccccacggccagttctcccgataagatcatgccccgaagctgctgaacaaaaaggtctttcaggctgggcgccgacagctttgaaaactccatgggaaacctcctctgtgtgttgtggctataccacataccacaactcgattttatcatacatttccacaaataaaaagtgtttcttttcgtctcttcactgaaatctccgggatttgttgaccgtctgacagggcagtgttaaactattaacaataaatgaaatactctgcccgccgctgcggctgcatgtggcagaaccacaaaagacgagaaaggataccggctttggataacgtaaaaattcttgagatcaagcagagcgtgtttgcttccaacgaccgtcaggcggacgaggtccggcaggaactgaaagaaaaaggtgtgtttctgctcaacctgatgtcctccccgggatcgggcaagaccaccaccttgcgccgtaccattgaagcgctgaaagacgaactgcgcatcggtgtcatggaggcggacatcgactcggatgtggatgcccgtgccattgccgagaccggcgccaagtccatccagctgcataccggcggcatgtgccacctggatgccgacatgacccgccaggggctggagggcctggggctggaagatgtggacctggcaattctggaaaacgtgggcaacctggtctgcccggcggagttcgacaccggcgcggtgaaaaatgccatgatcctctcggtgccggagggccacgacaagccgctgaaatatcctctgatgttcaccatctgcgatgtggtgctggtgaacaagatcgacgtcatgccctactttgattttgacatggacaagtgccgggagtacgttctcatgcgcaaccccaacgccaaaatcattcccatctgcgcccgcaccggggagggcatcgacgcctgggccgactggctgcgcgccgaagtggccgcatggaaaaacaaggataccctgtaagatgacctgtgaagagaaaggatgccgaccatgagtcagacccatttccctctggacgagagtaagctgcccttcaagatccccaaggacgaaaagccccgggagaaaattctgaagctgggccagaaaatcaccgaccgcgtccccgccaagctgcggcccctgaccgccgaggacccggaatactggggcctggcggggcttgtcaccgatgagatggccgacgtggccctcaagatgaaagtccgcaagcccatgaccctgcccgagctggtcaaggccaccggcaaacctgctgaagagctggaaccgctgctgtaccagatgagctacatcggcctgctggaatacaactgggagaacgagcgccgcgaaaagcagtatgtgctgcccatgttcgtgccgggcagcgccgagttcttcaacatgcagaaaagccagatcgaaaataatcctgaagtcaccgccttctttgagcggatgaccttcctgccgctggagcacatcaccgccatggtgcccccgggcggcgcgggcatcggtatgcatgtcatcccggtggaaaaggccatcgagacggaaaatcagtcggtggatattgagcacatctcccactggctgaaaaagtacgacggcaagtatgccgccagcccctgttcctgccgtatgtcccgcgcccgtcttggcgaaggctgcggcgatgaccccgaggactggtgcatcggcgtaggcgacatggccgactacctggtggagaccaagaagggccactacgtggactacgacgaggtcatgcgcatcctcaaacgggccgaggacaacggttttgtccaccagatcaccaacatcgacggcgagaacaagatctttgccatctgcaactgcaacgtgaatatctgcaatgccctgcgcaccagccagctgttcaacacccccaacatgagccgctccgcctatgtggcccatgtcgccccggaaaactgcgttgcctgcggccgctgtgtggaatactgccccgccggcgcggtcaagctgggccagaaactctgcactacccacggcccggtggaatatccccgccaggaactgcccgacaaggtcaagtggggccccgaaaagtggaccatcgactaccgggacaaaaaccgcatcaactgctatgacaccggcaccgccccctgcaagacggcctgccctgcccacatcgcggtgcagggctatctgaaaatggccgcccagggccgctataccgaggccctggcccttatcaagcgggaaaatcccttcccggcggtctgcggccgtgtctgcaaccgccgttgtgaggacgcttgcacccgcggcactgtggatcaggcggtagctattgatgaagtgaaaaagttcatcgcccagaaagatctggatgcggccacccgctatgtcccggccatcaacccgccctccaaccggggcggctttgacgagaagatcgccatcatcggcgctggtccggcgggcctgtcctgcgctttctacctggccgagaaaggctaccgccccaccgtgttcgagaaaaacaaaaagcccggcggtatgctgacctacggcatcccgtcttacaagctggaaaaagacgtggtggaagctgagatcgacatcatccgccagatgggcgtggacatccgctgcggcgtggaagtgggcaaggacgtgacgctggatgagctgcgtgctcagggctacaaggcattctatgtggccatcggctgtcagggcggacgcaaggccggtattcccggcgaggacgctcccaacgtgatgaccgccgtggatttcctccaccgtgtgaacgatggggaaccggtatcgctggaaggccgcattgtagtcgtgggcggtggcaacgtggccattgacgtggtgcggtccggactgcgctgcggtgcatcggcagcggatatgtactgcctggaagcccgggatcagatgcccgccacccccgctgaggtcgccgaagccgaggaggacggcgccaacgttcactgtggctggggacctaaagaaatcatcaccagggacggcaaggccaccgctgtggtgttcaaacgctgcgtgtcggtgtttgatgagacgggacgctttgccccgacctacgacgataacgacaccatcacggtggaatgcgaccatgtgttcctcagcatcggccagagcatccagtggggcggcctgctggacggcaccaaggtggaatgcggtcacggcggccgtgctgtggccgacgccctgacttaccagaccgcccagcccgacgtgtttgtgggcggcgatgtctacaccggtcccaagtttgccattgacgccattgcggcaggcaaggagggcgcggtgtccattcaccggtttgtccagcccaacaccagcatgaccatcggccgcaaccggcgggatttcatccagctgaacaaggacgacctggcgctggaaagctacgataccaccgcccgtcagacggcgggcatggccgaggacatcgactatcaccgttccttccgtgacggccaccttacctttaccgaggagcaggtgaaaaaggagaccgcccgctgcctgggctgcggcgcctcggtggtggaccccaacaaatgcatcggctgcggcatctgcaccaccaagtgcgagtttgacgccatccatctttcccgcgaactgcccgagtgcagtaccatggtgcgcagcgaggacaagttcaaggccattctgccttacatgatcaagcgggaattcaagatccggttcggcaaaaaggaagactgatatgcacgaactgggaattgtatttcacatcatccgcagcgtggaggagattggccgccagaacggtgtcaagcgggtcaacgcggtaacgctggaactgggcgaggtatccggcgtcctggaggattatctccaggattgctggaactgggccgcggccaaatcggagatgctgcgcggggcaaaactgcaggtggaagtgatccctgcaaagacgctgtgtgaaaactgcgggcttgtctatcccacggtggctcatggccggacctgtccggaatgcggcagcggaaagacccatctgatacagggcaatgagaccatgatccgggatatcacggtgccggaaacggaagaaccggaagcttcgcccggggacacacggtaaacggttggatatcattgtgattggagaaatatcggtatgttgtttcaaatttacggcgaaaatgcgggctggcagctgttcggatggctgctggtgtttgtggggctgatcctcgtcaatgagttggcccgccgtaccaaacagggcggcatcttctgcttcctgatcctgcctgcaggtcttacggtctatttcattgccgtggccgtgggcgctgccatgggagcggagtgggcactcaacaaccccacttatctctatatgaacagctggttccactacgcaaagctctacgccgccaccattggctgcatcggctttatgatgctcaaatacaagtggggcgtgggcaagacccactggttcaaagccttcccctttgccatcgtggccatcaatatcctgatcgccgtggccagcgactttgagtccggcatccgcggcgctatggccctggccgagaccggcagccgctggtggctgtccagcgagaatgtctggctgtacggcggctggtggaactgggtcaacggcattgcgggcatcctcaatatcctgtgcatgactggttggtggggcatttactcctccaaaaagcagcaggatatgctctggccggatatgaccatcctctatatcattgcctacgacctgtggaactttgagtacacctacaataacctgcccacccatgcctggtactgcggcctggccctgctgctggcgcccacctttgccaacgcgctgtggaacaagggcggctggatccagaaccgcgccaatactctggcgttgtggtgcatgtttgcccaggtgttccccatgttccaggatcagggcgtgtttgccaccattcccgtgctgtatgttgacggcgtgatggacgcggccacccacccgacggcggccgatcccaccatgcagggtgttatcgccatcctggccctggctgccaatgtgatcgtcctggccatcatcatcaagcgggcggtggaacagaaaaagaacccctacaccaacgagatctttaccgataccaaggacttccagctggctctggcccgcgcggaaggcaaataaggttttccatttcggttttggctccccctccggctctctgaacagggcaggggatgggatttctgcaaattaagccaaacaaaaagaccggcttttccacaaggaaaggccggtcttttgctgttccgaacgctataaaagtgtttgcgtcgatgtctcaaaaaatgtttgccggacgttccggggactagtcggtgaacgaaaacctccgcccgcaacggaaagaatcccgcctgccggtatcagtgacagcaccgggcaggggggcacggcgcgattacctgctgccgaaaaaacgctgagcaaagcatcagaagtatttccgcacccggtcaaagaaaacggactacacggaaagcccctcgcattaaatggaaaacaaaagaatcgccgctctgttttgcgaagatgcaaaacggaacggcggattttttattggggttccggttcgtttcccaggcgcttaagcagccgccacagagtggagcggctgatgcccagctgccttgcggcggcggagtggttgccgttgctggcggccacggcggcgcggacagcgtcgagggtgatctcgtccagggtgcgcagcggagcggcctgcggggcggaagtgcctgccgcacaaagggcttgctgcttgtccagcagttccgccacggagctgccccggatgtaggacgagttggccagggtggccagttccagcaggacctgcttgaactgggtgtagttgttcggccacggataatgcatgagcagctcggtggcgtggggcgtgaacccgatgatctgcttgcccagctcctggttcaggctgcccagataaaggcttgccagggaggggatctcgtccacgcgggtgcgcagggcgggcaggttgatggtcaggcagcccagccgtgtgacgaaggaccttaccacatcggacagggagccgtcctgagcgcagacgccggaaaagatcaggcgttcccggcgggccaggtcggtttccaggatctgagaaaggaatgcactgcctcggtcggcgggcagagcgtcaagatgctggaagtacagcgtcccgcctacatcgttgaggggcgaggcgtgatggttcaacagaaagtcccagcttttttcgtctgccatggcgcagtccaccaccaccagaggaaactccttctgcgggccgttgagatagagcgcccgggcgatctgctgcttgccggtgccgggctcgcctgcgatcatcaccggctggcggcttgccgcaatggcgttgaggcggggttccagttcacccatggctccgctgatgctgtaaaagctgctcataaacagttcgcggcattccggctcgttgagggtgcggataccggcgcggtcaaagcgcacggggatctgggagggacggcagcggaacagatacagttcctcccggttgaccagaatgcgctccgccgagatccggtaaagctggccttctccccagtgataaaactgcatggacccgctgcggggaagctcccgggtgtgtgtatgcagcagggcttgcagctcgctgtccggctcccggggggcggtataacagacggtcccgtcgccgcgcaggacggtcacgaatcccttttccggctgtgccacccgccgcagcatctggttttcccgccagatccggcgataggtgcggccctgctccaccgcctgttccatggcggagtgcaggctttcggcaccggacgtgatgagaaaggcgtcaaagcccatctttcgggcgacggtatgggtgaccatgtcgcctaccaccatccggtagccgccttgctgaagccgcctgagggtggtctctgcctcggtgctgctgtgcactgtcaggatgtcgatgtcgtagcgcagcaggtcgcacaggatatgggcggcctcagtgatgtcgggaaagccgacgatggcgtacaggctggaatagttttgcgccaggcggatggcgcgcaaaacgtcgtagaccgacatctggatggagatgacggggatctcggtcaccttgcggatcatggtggcggtgccgccgcgggacacaatggcgtcatatccttcggacatggtgttctgtacgatctccacaccctgctgcaggtcgccggtgtagacgtccagctctacgtcgggaaaagcctgggcggcccgcctcattccttccagcaacccctcatagggggcaatgcccaaaatacgcagcgattccttagacatgaaaactcctcctgttctgcgttcgaccgaatgtaacgcggacggccgtaccgctgagataacaggtcttttcacatattgtatcaaattgaatcgcatttgtcgacgagaggggcgaaaaaaatcaggaaaaagccgcggattttaggaccaaaacggaaaaaagaggaagcgttatggaaagaaagcctgaattgtacggggaaaatgcggttcgcggcagagaaaaaatgatataattgaacatgtagttcaaaaatggctggttttggaaggcgaaaatgttgaaaaggcgtacagatgcagattgcggattgaaaaaagagcctttcaacaagttttacaaaaggaaactttgcaaattgaacaagtgatgcaaaatgaaacattacggccaaggcgagaaaagcatatgtgtcaaaataaaacgaaaagatgccgcgatgaagcgaaaaatgcagaaatgattcaaattgacacaaaacaaaacggataaccgggtgaaaggggagagcgccgttgttacaatatggacaaagagaaagccaaaggagcgtggatgtatgattcgactgttgatcatcgcggacgactttaccggcgcgttggacagtggcgtacacctggcatcacggggagcgcgcacgctggtcgtgaccgatgcggccgcccgcctggctgaactggacccggccgttgaggtcctggtcatggatgcggaaacacggcatctttgccccgaacaggctggcaaggtcgtcgcacacattgtggaacaggccgcccggctgggcgtgccctacatctataaaaagaccgactccgcgctgcggggcaatatcggcgcagaactcagcgccaccctgcaggctgcggggggagaacagcttttctttttcccggctctgccggaaatgaaccgctgcacggtagacggcgtccattacatcgccggcacgccggtggcgcaaagcgtattcggtaccgacccctttgagccggtgacccgctcccgtgtgtgcgagctcattgcccagcaaagcgacgtgcccaccacctcgctgccgcccctggacgcggattctccgctgccccggcagcagggcattgtggtgatggacgccagcaccgaagaacagctgctctgcgcaggccaccgcctgatggaagcgggcaaactgagactgatggcagggtgcgcagggtttgccgcggttctgcctgaaattttgggtctgggcggggacgcccggcctgaagtgccccggctggacaagcggctgctggtactctgcggcagcgtcaatcccatcacggtacgccagcttggcgtggcggaggccgcaggtttccttcacctgcatatgacgccccgccagcagctggaagcggggtactgggacaccgaggaaggcaaagcacagcttgcccggtggacccggatgctggcagaagccggcaacggcatcctggacagcaacggccctgacggcaacgaacccacccgccggtacgccgaggaaaacggcctggaaatggaggaggtccgcaccaggatcgcggcatcactgggacgggtactggcgcagcttcacgcggacggcgtggaggggacgctgctcatcaccggcggcgatacactgctccagtgcatgcgccggatcggcgtcagcgaactgcatcccatctgtgaactggcctcgggggtggtgctctcccggttcacgctggacggagcacagcggtatgtgatctccaaatcgggagggttcggtccccccgacctgctggttcaactggcccaacaactgcaaaaccaaaacgcaaatgcataaagccaacaaaatgccaaggaggtagcccatatgacttaccctgacctgcccgccctgacctgggacggaacgatatatcataacaccgacatgaacaccgacgaggctctgctgcccaccggaaattaccccacggcccacgctccggccatgctggaactgccgaacggcgacctgctctgctgctggtttgccgggacctatgagggcagcgccgatattcatatcatctgctcccgccttcccaaaggcgccgcagcctgggaggctccggtagaagtttcgggagacgccaaccgcagtgaacagaacccttcgctcttctacggccccgacggcgcggtgtggtgcatctacaccgcccagctggaccgccaggcgggcaaggacaacatgcagtatacctcccagatccgctgccagaagagtgttgatggcggcaagacctggggcccctacgaaaccctgtttgcccgggaaggcagtttctgccgccagcccatccaggtgttgaaaaacggccgctggatctttggcaactggctgtgcaccgattccgccgaaggcctttccggtgatcctaccgtgttccagatctcggacgatcagggcaagacctggcgtcaggtggatatgcccaacagccggggccgcgtccacgccaacgtggtggaactggacaacggacatctggcagccttcatgcgcagccgggaagccgacttcatctatcgctccgagtcctttgactggggcaatacctggtcggagccggtgcccactcccatccccaacaacaactcttccatcagcgccattcgtctggcaagcggcagagtggccattgcctgcaatcccacctgcacccccgatccgcagcccggcaaggctgcctggccgggactgcgctgcccggtggcggtggcactttcggaggacggcggcaagaccttccccatgatccgctggatggaacggggcgagggctttatgggcgaagaaaaccgcaccaacaaccgccagtacgaatatccctacctcatgcagactgcggacggcacgctgcatctggcctacgccgcacagacccgcaagggtgtgaaatatatgcattttaccgagcaggacgtcatgggcgccaagcgtgagcgggtggggctgtacaatcccaccgccgcccagagccgctgaaccgccccgccccgaacaaaaaaaggagacgataccatgcttacttcttatagcctcaaaatgccccatgccgtttacggcggtgaaaattccatcgataacatcaccgccatcctcaaggcaaacaatgcccggcgggtggccatgttcaccgacaagggcatcgaaggctgcggcctgtttgccctgcccgaagcggcagtcaaggccgcgggggtaccctatgacgtgctggacgatctgcccgccgagcccagctacatggcggtgcagaccctggtcgaccagttcaagcagagcggagccgacttcatcgtggcctgcggcggcggcagcgtcatggacgcagccaagctggccagcgtgcttgtgaccgacgagtacggcgtcaaggaactgctggacgatcccggccgcgccaaaaagtgcgttcccatcatcctgatccccaccaccgccggcaccggcgccgaggtcaccccaaacgccatcgtggcggtccccgagcgggaactgaaagtgggcatcgtcaacgacaacatgatcgccgattacgtgattttggacgcccgcatgatcaaaaatctgccccgctcaatcgcggcggctaccggcgtggatgcgctggcccactgcatcgagtgctacacctccaacaaggccaatcccttcagcgacctgtatgcgctggaaggcctggatctcatcctcaataacatcgaaaaggcctgcgacgatcccgaggccatgaccgagaaaaaccggatgcagatcgctgcctactacggtggcctggccatcacggcgtcgggcaccacggcggtccatgcgctgagctaccctctgggtggcaaatatcacatcgcccacggcgtgtccaacgccatcctgctggtgccggtcatgcgcttcaatgagccggcctgccgggaacgctttgcccaggtctatgaccattgctgccacgacggcagcgccctcaaaacggcggaggaaaaatccgcctgggtcattgaccgtctggatcagatcgtccgccatctggatatccccaccagcctgcagagcttcggtgttccggcggaggacctggaaggtctggtggaagccggtatgcaggtgcagcggctgctggtgaataacccgcgccccgttaccgccgacgatgcccgcgcattgtaccgtcagatcctgtgacccggcagaaggaggaatcccgaatatgaaacaagtggaaatcaagggcatcatccccccgatcctgacgcccatgaaccccgatgagaccatcaataccgcagagctccgcacccaggtcgaccgcatgatcgacaacggctgtcacgccctgtttcccttcggcaccaacggcgagggctatatcctgaccgctgcggaaaagcagctggtgctggaaacggtcatcgaccagaccgcgggccgcgttcccgtctacgccgggaccggctgcatctccacccgtgagaccatcgaacagagcaagatggcccagcgcgcgggcgcggacgtgctgtccatcattacccccagctttgcagccgccagccaggaggaactctaccgccattacgccgcggtagccgaggcggtggatatgcccatcgtgctgtataacatccccgcccgcaccggcaatgcgctggcccccgcaacggtggcacgcctggcgcagatcgagaacatcgtcggcgccaaggattccagcggcaactttgccaacctgctggcctatatcgatgcaggcaagaccaaaacgaacggcaagttcagcgtcctgtccggcaacgatcagctcatcatctggacgctgctggccggtggtaccggcggcatcgcgggctgcgccaacgtctatccccacaccatggcatccatctatgacctgtttgtggagggcaaggtgcaggaggccatcgacgccaacgccagcatcgcttccttccgtgcctgcttcaagtgcggcaaccccaacaccatcgtcaagacggctgtcgccctgctgggtcataacgtcggacgctgccgcgcacccttcaactacgtcccggaggagggcatcgaagccctcaagaaggtcctggcggaaaacgcggccaagggcatgcactgagaaaggaaggccatccatatgaatgataagcccattgtcggcattaccatgggggaccccgcgggcaacggccccgagatcaccgtcaaggccctggccagacccgacctgtatgaccgctgccgtcccattgtggtgggcgacgcaaagatgatcgagcaggcggccgggtttgtccatcgccccgacatctgcgtccatcgctgtgagaaagtttccgatgccctgtttacccccgggaccatcgatgtgcttcacctggacctgatcgccgacccggcaaagtttgaacttggcaaggtcagcgtggagggcggcaacgcggcgttccagtgtgtgcgcaaggtcattgagctggccatgaatggggaagtggacgccacctgcaccaatgccctgaacaaggaggccatgaacctggcactggaggcggccgacggtgccaactcggacggctacacccacttcgacggccataccgagatctacgccacctatacccacaccaaaaaatacaccatgatgcttgctcaccatgacctgcgcgtggtgcatgtgtccacccactgctccctgcgggaagcctgcgaccgggtcaagaaagcccgggtgctggaggtcatcgagatcgcggacaaagcctgccgcgatatgggcattgcccagccccgcgtggcagtggcggggctcaacccccactgcggcgagaacggcctgttcggcaccgaggagatcgaggagatcaagcctgccatcgaggccgcctgcgccgagggcatccatgccatcggaccctgcccgccggacagcgttttttcggaagcgctgggcggttggtacgacattgttgtctgtatgtatcatgaccagggacatatccctctcaaaacggtcggctttgtgtacgaccgggaaactcagagctggaaggccgtggagggcgtcaacgtgacgctgggcctgcccatcatccgcaccagtgtggatcacggtacggggtttgccctggcgggcaaaggcaccagcaatgagctgagtctggtcaatgcgatcgattacgccatccgtatggcaaagggaagggaggcttgatttccgggaggccgggctgttctgtgacaaaaggaatacctgttgatcgggtaaggaaaaaggagagaatataaaatgacgctttcgatgatcattacattggcggttgttgtgctgatggtcgcgttgattatcagtgataagctgcctttcggtgccccgcccctgatcgcctgcgcgcttctggttgtgctgaaccaggctaccgttgcggaagcattcagcggctttgtagacaagaacgttatcatgatctgcggctttatggtctgtatggccggcctgcagaaaaccaccttcatcgtcaaagtcaaaggccttctggcaagaatggccggaaaaggcggaatgcgcaactatgctctgctgatttttgtgattatgtttgtcgcaaacttcctgagcggcacagcctactatgtgttgattttgtctgttgtttccacgattccttaccgcaaggaactgcccaactcccgcattcttcttccggcggccatggcttccagctttggcggatggatcccggctaatgtggcattttatatgggcttgatggccagcctgatggatgcggccggccttgacagctccatgtttacactgggcaacattgccattacccgtattgtgtcggcggttgctttctttatctgggctatgctggctttccgcctgctgccggaccacgatattaacagcgacggcaccgccaagacagtggaagtgaaggaggatgcaccttctcagctgtccaaaaaacaagaaatcatcgtctatgtctgctttatccttctgctcggcagcatgctgactctgtcctacctgcccggtgagatcggctacgcaattcccggcctgatcgccagcgtgtatatgtgtgcaggtatcgtcaatttcaaggaattccttggtcagtggttctctcctctgtgcgttatgatggccggcgttattggtgtggcggcagctatgtctaactgtggcctgaccaccctgattggccagtacattgtgggcttcctgggcgctgctcccagtccgtttgtggtcgtactgtcttttgcactgcttacttccatctgctctacgtttaccggcgctgccatgggctccatgttcattttcgcaccgatcggaatttcggtatgtacccaactggggtataatccggctgcggtcgtttatgcctgtgttctggtaggctgggtcaactacttcatgcccatcgacggcctgcccgctctggccatgggtatgggcaagtacaagctggtcgagttctggaaattccaggtcccgctgtggttgattcagattctggtcattgttggctccgcagtcttgctttatcccatgatgtgatctctgcccgggccgcacagtgcctcccgctgtgcggccaatttttgaacattgaatttcatcgcccaaaggaggtctttatgaacgatcccatgaacccgctggtgcagttttctccctttgcgggcactctgtatgccgagacggtgccgggagagacatcccgcactgtggaatatgaaaacgatgtccatgccgctgccggaaacagtcggaccatgtattgttatgcaccgcgttccggatgccccgatcccaagcagacgcaggtcctcatggtcctgcgcaagggggacgaccaggcttccgccgaatcggtcatgaagacgctgggcctggaccgcctggcagagcaggaacatttcctgctgctgttccccaatcccggcccgggcggctggaattataccaacgatcctgagcgtgacaacgatatggattatctggtgcgctgcttcggtttcctgcgcaacagtaaagtgggcgtcaacggcttcaacggcatgatcttttatattgccgcctgcccggaagcctcggcattgctgatgaccatggcagcccggcggcccatcaatgtgccggccatgatgatctcggatttcccggaaggctatcagatcccggaggatgccctgggcatcgagactgccgcctggtgcagcgatccccaggcagccgattacctgaccaaggctgcggatgcctcccagaccggtcccgagacagacggcgtgacagtctggcagggacgcaacccggcggtaaaggttatggtcagcagccgcccgttggatgaggcggcggtcaccatggcctgggacaagctgttctcccagacaaggcgctggcagaacgacacccacggcggttatcatgcccgcacagcatttaccgagcgcggcttcgtcgcccatgtcaatgacagcagtttgggcgtcaacaacggttttgcccatacctggtatgagtatatcccgcctcagctgcgcggcaccaccgaaaaagtcccgctggtcttttatttccacggtgtcaattgtgtgccgctgtacggtgcggagcagagcaactggcatgagatcgccgaccgggaaaacttcattgtggtctatccggccccggcacgcaacaaggcgtggaatatttttgatgttccggccctgcccagtgactttgacttcattctggccctgctggaacatatgaaaacggtacatcccattgatgagacccgggtgtatctgtccggcttctccatgggcggcatgatgacccacgccctgtctgcggcccatcctgaattgtttgccgccgcggcgccctgcaatgcctttgcctttggccgtttcaaggatcctgcggaaatgctggcaaggtttgtcaaaggagatcccgaacagcttggccatgtttcctgctcggccagacaggcggacgagaaaaaggcgcagtttgattaccggatgccggttttccagaatgccggcgccgtggatgtgcaaatcggaacctggccgattgccccggaaacagatgatttccggatggctaccatccgttattggaaggagtataatcatattccgcaagcgcaggaatttgacccgaacaccaccaccggcctggcggcggacgaaaccttttttgaggatgaggacgggcggtattgccatcagcggtggcatgcggacggtgttggcccggccctgatggaactggtggtcgcagccagaatgcctcacgccattgatccggtccagatcgaatgggcctggcgctttatcaaacagtttgcccgcgcagccgacggctcgctgatcgtactgtaaaacaaccgtgcggccggggtgtactgccccggccgcctttggtttttcacaaggaggaacttgcagatggaacaaactgcatatacctatgtctccacccgtgccgcctatgatccggccaaaaccatcattgtctgcccgccttccgggcaggctgcaacgctggaaaatgctgctttgtttgcacagacctccggctggcagacactggcggaatacgacggttctgtgctggtggtacctgttgccccgaacggctggaaagcggaaagcaccgagctgccgggccggctgtatgacgagctgcggggcagcttttccagccggtgcggcaacagcctgtttggccgtgagggaaaaatctggtgctgggaaaccctgatctatctggtgggatacggggacggcgccgatttcgcagggcagtgcacggtggcggaacccaaccgctttgcggcggtggctctcatcggcggggcaccccgggatttctcggcaggggaaaacccctcctctcattggctggtccgaaatgtcagcgcatcgtattcaaaaaagaacaatcagatccccagctgtgtctggctgctggatgctcccgcagacgcagaggataagacggtggagtattttgcgtccatcggtccggcaccgcacagtgagacggtctttctggaaggcgtccgcaccgagcgccgttacggcgatgccgaggcggcgggagaagtcctcatctctcacggcggcttttcctatgacatctgtctggcccaagccgtcctgaacgggctgtttgaccgggtcatccgctggaaaaatggcccggacggtacgctggcccatcatcccgggcgggtaggctactatacctcaggccgctttgcggtggattccgtctgggtgggggcgctgcaatatgcttacggcgtgcacattccggaaggaatgacccgggagcaggtcgccggcctgcctctggtgttcagcgtacacggccggggcgaacccgcctggctgtttgccaccaaaaacgggtgggataagctggccgatgagacccgggagtttgtgctggtcgtaccggattcccccgggaatatctggcagctgagccgggatggcgatgcctttgaagccatgatcgacaagatctgttccgactatgccctggacagaagccgtgtctatctcaccggtttttccaacggcgcagccatcacgcgggaagtgggaacttcctggccgcagctttttgcgggtatttctccctggaatggtccggtcaatgtgcggggtgtgatccagcatcatgccgtgatgccggagtttttgcaggaaggctatgaaatgccctactgggtctgtgtgggagataacgaccctgccgccggtctcgatgtggacggccagctggaaccgatgctggaggccaacggctgtgcaaaacgcccggcggaaggcatgacctcccgcttcgcccccgacgaggttcgcacaggagaaaactggtataccccggaaaagggctacaaacagggcgagcggttcaccaccatggtctaccacggcgcggacggaagcccccgcgtgggatataccgttatgcgggacatgccccatggagccattaccgagcagagcaaagcctgctgggaattcctgcgtgccttccgccgtctggacggggcaaaacaggtggtttgggaacccgatcaccgggagggttgatttatgttgaaaggacaactcaagcacattgtactctgcggcagcaagtccgcgcccggatgccgcaatgagtttgacgccatggctcgccgcgtggcggacccggaacaaccggtcagggacagcgcggggaacgcccggagcatgtatgtctatcttccggcttcgggagtgattccgtgttcgtcgggcattgtggtgatgcgggacggcggggatgaggattctgcgcggcagctgctggaacgcaccggctgggccgaatgtgcggagcgggatcattacgtcattctgctgcccaaccccgcaccgggagggtggaaccttcccggcgcacaggatggtcccgacgacattgcctttgcacgccattgggtgaccaccgcaacgcagcaatatctgctgggctgcaaggcgcaccggaccagtatttacctggccggtttcggccgagcggcgtcgcttgcggcgggaatggtccggctctatggtgcgctgctggcgggcgtgtacctggaaaatgccgccatgcccatgccggaaggggattcttcctttgccccggccccggcctggctggtggactgcgatgaaaagctggaacagtccattggcgatgccgcaaagaaagcgggattcgggtaccgctgcttccatgacccgaagcagccgctgcaccggcaggcatgggatgccctgttcctgggactgcgccgctggcccaccggcggaaacggcaccgtcacccacaagagcaccccggaagaaatgggcctgactacctttgaacatgagacgttccttggggataacggcgggctgccccatacctggtatgagtttgcgcccttcaatcccacaggtgaaaaactgcctcttgtcctgtgcctgcacggcggcggaacgtcggcgcggtattgcgccgagcagaaccgctggcatgaactgggggcaaaatacggcttttacgtggtatatccccattgctgcgcaaatgctgtctggaacgcgggctgcgatccggaatgtcccagcgacgaggagtatctgctggccctgtaccggtacctgatggagaaatatcccattgatcccggccaggtgtattgcacgggcttttccatgggcagcctgatgacgcagtgcatgggcatgctgcatggggaactgtttgcggccattgcgccgttctccggctacctgttcccgtcctattgggagggtcccgagaccaatgagaaacagccttttgaactgacggcgcgccgccttgcctggatgcagcaggcgcaagaggatggccgggatacccggatgccggccatccagttccacggagattgcgacaacacctgggatggcgatgcaggcgtccacacgcgcagctattgggcgcagcgcaatcaggtcgtagaacctgacctggaaaatcccacccgccgcgagggagccgaccaacggttttccgtacatgattgctgcaatgcggatggcacctgcctgtaccggtttgtctcggtggcagggcttccccatgcggtggacctgcggcagccgcagatggcatggatgttcctgtccgccttttcccggaaccccgacggcagtctgcaaatccggggtcagaaatcggaaatcacaaaataagataacggagcatgatcaccatgaaccaccaataccatctggaacacatcggcatcaataccgaaagtggggaacaggcgctggaacttgcccggctgctgtctgctatgttcaatctggaaccccggcacggggaaaagtccgagttcgcggggccgtactttgaatgtatgaaatctccgttcctcggcgccaagggacatatcgccctgtccacaccggatctggaaggagcggttgccgaactgaaagagaaaggcttttcctttcgtcctgacaccgcggcttacagggaggacggtaccctgaaaaacatctacctggatggggaatacggcggctttgccatccatatcatgcagaaatgacatcataaaaaatccccggcgctgcgccctcctgaaaaaacaggagagacacggagccggggaatttttgtattaagggttagccgatgccctggagagcaagacgctcgatcagggcggccagctcgcccgtgcttttctgcatgccgctttgcagccagacctggaacacctcaatggtgccggacacgatgaaggcgttgatgtaggggtaatcttccgctttgtggtcgccgtgcatgggcagccattcagtcagggcgatttcgttgatcatggatttcagcttttccagaaacccggaattgctgtttttctgtaaaagaggcagaatgtccgcgtggtccgcaaaatgagagaaggcttcgtaaatgatgggaaagggattctcgttgagctgctggggggaatacttgtgcagaatatcggacagttcttccatcagctcgttgatcaggcagtccagaagatcctgggtgtcctgatagtgcaggtagaaggtaccgcggttgatgcgcgccagctggcagatctgggtcacggtgatctctttggcggagtggtcccgcagcagatcgagatacgcccggcggatgctttcccgggttttctggacccggagatcctgcttcttttctgtcatggcggcctccttttttataaaacagatgaacaattttagacaaagtgttgattaatgaacgaaccggccaattttacttattgagccgtccaattaattttattataattggattgtaaagaaaatcaacagttgttgattgaggtttttgcagtttggttttcgacatatttcacaattatacgcgaaaaaagtacataaaatgttcagaatcgattgctatactgataccaaaatcggccgggtctgccattcggccggacggaaggagactgcgtcatggcgcgcgacacctcttttgtgacctttgataatgtctgcaaatattaccagatgggcgacacccgcatcgccgcagccgatcatgtgagctttgagatcgagaaaggcgagttctgtgtgatcctgggcccctccggtgcaggcaagaccaccgtgctgaacatgctgggcggcatggatacctgcgatgaaggcaccatcattctggacggggagaaagtcagcgacttcaacgcccgccgcctgaccgagtatcgccgctacgatgtgggctttgtgtttcagttctacaatctggtgcagaacctgaccgcccgggaaaacgtggagcttgccagtgagatctgcaaagaccctctggatgccgacctggttctggatgaagtgggcctgaaagaccgcaagaacaacttcccggcacagctttccggcggcgaacagcagcgcgtttccattgcccgggcactggccaagaaccccaaaattctgctgtgcgacgaacccacgggtgcgctggactacaaaaccggcaagcaggtcctggaacttttgcaggagacctgccgcaaaaagggacgcaccgtcattgtcattacccacaacagcgcgctggcggccatggctgaccgggtcatccgcatcaacagcggccgggtgatcgagatcacccgcaacgacaacccgacaccggtggaaaggatcgaatggtaaatggcacgcagttaccaaaaaaatatcctgcgcaccttcaaggggagccgcagccgctttgccgcgatttttgccatcgtggcgctgggtgtcggctttttggcgggcttgctctccacaacgcctgacatggaggattccatggaggaatacctcgacgcgggcaacctgtttgacctgcgcgtggtgtccaccctgggcctgaccgacgaggatgtggaagccctgagccaggtggagggcgtggacgcggtgcagccggcctattcggccgacctgctcatccaggacgaaaatgccgaggtggtcggccgcgtacacagcctgaccgatgaccccgaaggggagaacgtcatcaaccgcctcaccctgaccgaaggccgctggccgcagtccgccaacgaatgcgtggtggaggcgggcatctcgacccttaacaaggagtacgaggtcggggataccctggtggtcgatcccgaaaatgaggaccttgaggacacgctggaacagaccgagttcaccatcgtgggcaaagtccacaatacctattatttctcctatgagcgggagcctgccagcgtgggcagcggtgcggtggacatcgtgctgtatgttcagccggacgcctttgcctacgacagctataccgaaatctacctgacggtggacggtgcggcggagctggccagcctggaggacgaatataccgacgtggtctcggcagtggccgaccgcattgaatccatcgaggatgtccgctgcgaggcacgctatgccggagtgatgtccgacgcacaggcagagatcgacgatgcctggcaggaatactacgatgccgaggccgaagccaacgaggaactggccgacgccgcgcaggaactggaggacggccggaaagaactggccgacggcgaacaggaatacctggacggcgagcaggaatacgccgacggtctggccgaagtgcaggaaaatgagcagaagatcgcggatggcgaggcccagcttgccgacggactgcaggaactgatcgaaaagcaggcggaatacgacgatgcggtggcccagctcgccgacggtgaaaaacagcttgccgacggcaaagcccagctggacgcggcgcagaaaaagtatgacgatggcctggcacagtacgaagccggccttgccgcctatgaaaacggcaaggagctgtatgaacagggccttgccgaatacgaggccggggtggaacagtttgaccagctcaaactgctgaatcaggccaaaaacggtgtggacaccggcatccggatgctcatcgacttgggttatgccaaggacgaggatgaggcccgggccatgttctcggatgaaaacattgcaacgcagggcgaaaatctggaaatgctggaacagctggcggaactgcgccagaccgaacaggatgcgaaaaaagcctacgaggatgcccttgcggctgccgggggagagaccggcggcacggagcccggcacagaacccggcacggaggaaccggcagggcaggatgcactgaccgagtctccgcaaaccgaggacgaggcagaagtccctgacgaggcagacggacagacggaaagtgaatcctccgccaccggcgaacctgcggaaaccgacccggcggaaccggaagaggacgcggcatctgccgagcctgacaccgccccggcggaagagcccgcacaggacgagcccgccgctcccgagacggcagctcctgcagaaccccaggaagaacccgtaaccgaacctgccggggaagaacaaacggaaggattggagaacccggcggaggaaacggcggagcccgacccgtcaggggaggcaaaggcccatgccgcaccggtggcggccacgctctccaacccggaggacgaccccgacgtgcaggcagccaagaaagcgtgggacgaagcccggaatgcctggctccttgcgctgaaagaagcagccaaatccatgggcttcgatctggacattgaaaatgagacgctggtcgccatcgtggaaggcatggtggacggccagatcgaaaagctgccggaaacccgtcggcagtatgagcagctcaaacagctgaatacggcgcaacacgggctggagaccggcgtacagggcattctggatgcaggctatgccgagacggaagaggaagcatacgccctgttcaccgatgaagccatcgaggccatggaagcggaactggaagccggccgcattgaactggaagaaagcgccgctctgctggaagccagcgagaagcagctggccgatgccaaaaaggagatcgatgcaggcaaggcgcagctggatgcgggctggaaagaatacaacacccagagcgaaaccttctatgacggcaagcgtcagttggaggaaggcaaaaagcagctggacgacggctgggccaccctgaccgacaaacaggtggaactgaacgacgccaaaaagcagatcgcagacgcctatgtggagcttgcggacgcccgggctgaactggacgacgcctgccagaccattgcggaaaacaagcagaagctggccgacggcgagatcgagtacgctgacgccaaagcggaagcggagcaggaactggccgacgccaaggccgagatcgaggacgcccagtccaagttggatgagatcgaatatccctcctggtatgtctgggaccgtgacgacaacgtcagcttctcctctttccggggcaatgtttccaaggtggaagcgctgtccggcgtgttccccatcttcttcttcctggtggcggcgctggttgtctccaccaccatgacccgcatggtggaagaggaacgcctccagatcggcaccatgaaagccctgggatactccaacggcgatatcatgcgcaagtacatcctgtatgccatgacggcggcggtgtccggtgcgctgtttggtctggccatcggatttaccgtgttcccctcggtcatctggtacgcctatgaaatgatgtactatgtgccggagttccatgccgtctggcgctggaactacgccatcttctccagcggcctgctcatcggcagtgccctgcttgtgacctggacggcctgccgcaactctctgcgggagaccccggccgaccttatgcgtccccgggctcccaaagccggcaagcgcattttcctggaatacatccgcccgctgtggaaacgcctggcctttacccagaaagtcacctgccgcaacctgttccgctacaaaaagcggttctggatgacggtcatcggtgtggcggggtgtacggccctgctggtgacgggtttcggcatttcggactctatcaacggcattatcgtcaaacagtaccgcgacatcgaccattacgatctgatgactgccgtgaccgacgcacaggatacccaggagggcgcggtatacgattacctctttgaggacgaagccttcaccgcgtcccttgccacgctgaccgaaaagaccacccaggaactgcccgacgggtcctcggcggaagtgtacatgatgatcccgcaggatgtggaggccttctcccagttttatgacctgcatgagcgggtctcccgcaaggcaacgcctctgggcgagaccggcatcgtcatgacggaaaagctggccgaactgatgaatgtcaagaccggcgacaccgtgaccctggtggatgcggatggagaggaagcgacctttaccatcagcggcatctgcgaaaattatgtttccaactacgtttacctcagcgcttccacatatgccgaagccttcggcgaggaaccggagtggaacatggtgctcagctgcatggaggatacctcccaggcatcccgggatgcagtctcggccaagctgctggccatggaacaggtggccagcgtgacctttaccgtggataccaccacctcggtgctgaacatgctcaactccatcaatgcggtggtggtcatgatcgtcatctgtgcggcggtgctggcactggtggtgctgtacaacctgaccaacatcaatattgccgagcgcgtcaaggagatcgccaccatcaaggtgctgggcttctatgaccgggaggtcagcgcctacgtcatgcgcgagagcattgccctgacggtgatcggcgccctgttcggcatggtgggcggcattgcgctgcaccggttcgtcatttttaccgtggaagtggacgccgtgatgttcggccgcagcattgacttctccagctttgtgtattcactgggactgacattgctgttcagcctggcggtcaacctctacatgggcagaaagctcaaaaagatctccatggtggaaagcatgaaagcccccgaatgaccgcggcacaccggcggcgcgaaaaccccgccggatggccctgaatccgcaattctgcggcaaatacctgtatattgcccggactgtttttaacagtccgggtaattttgtgcaaaatgccgtcaaatcgtctaaaacttgactgacaagaaaatattggatataatattgtcgtacgagcggcaaatcgccgccgagcaatgtgccgaagaggagagcctgcagacaggctggcggcgcagaaaaagaagaacacaccttttaggaggggaacagcaatggctgtaaagaaaaccgcaaagaaagtgtctcagaccgtgatcgcggaagataagttctacaccatcagcgccgccaacggcaaagtggtggaggttgcagattacaacaccgacaacggcgccaagatccagctgtgggacaatgtcaatgccgagtggcagcagtggggctttgtccgtgcaggcgagggcgtttaccgcatcaagaaccgcttcaccggcaagatgatggacctggattgcagcggcgttaccgacggtacccgtgtacatcagtgggaaggcgccagcgccagcagccagctctgggtcgtagagcccgtcaatgacggccgcgccaagatcaagtccaacctggccggcaagtgcctggacgttgttgccatgagcaccgagaatggcgctgccctgcagatctggagcgacgtcaacggcgaaaaccagtactggaccattaccgaggtcacccgcaagcccaaggccagcgccaaggcgaaggctgccaaggccaaggctgacctggaagctgccgccggcaacattggcgaggctgccaaggctgctgccgacgttctgactgatgtggccgatgccgccaagaaggctgtctccgacgttgcggataccgctgtcaaggctgtcgagaccgtgaagaagcccgctgccaagaagccggccgccaagaaggctgctcccgctgccaaggccgagcctgccaagaaggcagagcccgctgtcaaggctgctcctgctgttaaggctgagcccgaagtcaaagccgagcccgccaagaagccggctgcgaaaaagcctgctgccaaaaagcccgctgccaagaaataatgtccgatctgaccggactttctgatggatcctctcgcgattttgtgctgtaacgaggccgccccgcacagttttctgtgcggggcggattttttgtttctgtgagaaaatggaacagggcaagaatgttgtgcggcttatctgaaacgcgcagccggtttatttcagcttgtggataaagaccagccaggaataaatatacagccaggcgatggacaaaaacagggaagcaatggtaaccagagcactgatgcccaccccggtgaccagatcgaacagggtggaaaggatcatcagcaccccgatgatgacgaagcagataccgcccatccgctgggttcgctgccagcagtgctcgctggccagagcccagggtgtgcgcacgcccatagtgtagttctggcggatgcggggcatgtaattgcccagggccaccagtccggcgccgatcaggcagatggccatggcgggcaggtaatcccacaaagcggcgggaccccagaaatacagctcggtcatccaggtaaagccgatcatcagcagggtcatggcggtcacaaagacgccccacaacctgcgcattctgcgatagctgtcggcccgaggctcaacggccgggatcactttgaacaggatcagcaaaaagatgggcagagcgtccagcaaccacagatagtccttttccatccagctgtttacgcttccgttcagcgcccactgacgggggacctgatccggcagggcagggtaggcaatgagatgccccacaaaggaacagaccgccagcaacatcaatgcccagaacagcggccagccaagggcaggctgcttattgttgtttggtttcatccgtatcacctccggcaatcagtccgaaatcataaaaccatttcatcagttcctgcatgactgtcaggttcagatgataaataatgctctgcccctgacgctcatcggtgatgagccccgcgttgcgcaggatgctcagatgatggctgacggacggctttgccatgtcaaaatgtgcggcgatctccccggcggaaagatccccttccgccagcagctccaggatgcgccgccgggacggatcggccaaggctttgaatgcatcgcccaaaacgggaccctcctttccggtggaatttgcagtttttcggaatgtgtttggcgtccggtacccagtcagaggaccgcggcgtacaggaacgacccgggagctcctgcaaagcaccgaaacgctgaatattgttagataaacttctaaatatagtatagcacggcacccggtgaattgcaagacgaccgttcccggctcatcagaaacaaaaaatcccgggctctcggcagaaccgaaagcccggggaagggatgtgtggaaaatcaggcagcggcgacggtggcgttggcgatcagctggcgcatcaggatgtcctgcaggacattggtcttgatgtagttctcaccgtagttggtgatgtagctgctggtgtcgtcggtgctgaagaagtcgttgatgttggcctccagagcggcgtcgtcacagacgatgccctccttctcggcgatggcctgcatcagcagggcctgcttcatggagctctcaatggaggaggaagccatggtcagcagttcctcggcgctgccgtaaccggtggcggcgacgaactcatccagggtcatgccgtagttggcagcgtagatgtagtaggagaacaggaagctgtcgttgaagtactgggtcgcggactcgggatacgtctcggcgaaggtggtgttctccacaagctgctggtaaacggcattgctcatgttggactccaccagggaatcatgaacgtaagtcttgaggctgtccacggtggtcagctccagataggggttgatgttctcagccacccaggcgtcggtcagttcgggattgaccgtctcggagatgtagttcagggtggtgacaaagacggcttccttgccggccagatcggggttgttctggtagggatcggggaaggtgacctctacgttgaaggtctcgccgggggtgtggccggcgatctgatcctcgaagtcatcgatgaaggaaccgctgcccagcgtcaggtcgtagccctgggcggaaccgccgtcgaattccacgccgtccacggaacccacgtagtcaatgttgacaacgtcgcccatctcggcggcacggtcggtgacctgctcctcggtggcgaagttggccagaatgttggactcgatgtaggaatccacttcctcgtcggtcacggtgtcggtgccggcgggcagggtcagggagttgtaatcctccggcagggtgacgtaatccagcgccttgacgtccttcaggtagccgttctcgtcaaagccgtcgctgaaggagaagttggccagataggcataaggatcggcagtctccgcagtagcggtctcggcgctttcgggagaggaagtctcggcggtggaggaggcctggctctcgtccttcgagcagccgaccagaaccatcgacagtgccagcatcagggcgccggcacggatagaatgtttcagtttcatgtgatactcctgtcttttcggcgcggtcaggcgccttttaatgcaatactttcccattatacaacgaagcgtcaaaaaagtacaggcccaaaaacagggcatcggaccaaaacggctttgcggtgccggtatcggggacggaaaatttacaacccggccccggttgcggcagagataccaactgtgctacactggacacaagatacctatattagagaacagcggcccgaggcagagaaaatagaaggcgaccgcggcgctgtacaggcggcaaaatcccgtggcgccaaacgaaccctgccaaagaccggaaaggaaagcacgattatggacgaagcaaaaatcaagcggatcaacgaactggcacacaaggcaaagaacggccctctcacgccggaagaacaggcggagagggatgcactgcgcaaggaatacctggaagcggtccgcgccagcctgcgggcgcagatggacaatatcgtcattgtggaaccggacggcacccgccacggcctgggcaaaccccgtgaggaagaagaaaagaactgacagggtattggttttttataccggatttgctataatgtatgcggcggcggatcccgggcaaattgcgcggaaaaggctgtacgctcaaccatgaaagaggtaacatcatgcttactgcaatcaccggaatcaactggggcgacgaaggcaagggccgtatggtcgacctgctcagccgcgattacgacattgttgcacggtatcagggcggcgataacgccggtcataccgtcaaaaacgagcggggcaagttcgttctcaacctgatcccctcgggcattctgcgcccggaggtcgtctgcgtcatgggcggcggcatggtcatcgatccccaccacctggaaggcgagatcgagaccctgcgcagccagggcattgagatcactcccgccaacctgaagatctccgaccgtgccaccatcaccatgcctttccatgtggatcaggacggcctggaggaagcccgcctggccaagaccggcgcacagttcggctccaccaagcgcggcatcgcctacacctacggcgacaagttcatgaaaaagaccctgcgcatgggcgacctgctccatatggacgagggcgtccgcaagcgtctggccaccatcgtcgagtccaagaacctgaccatggaaaagatctacggccagaagccggtctccctggacgaaatgtgggcctggtgccagcattacgccgaggtctttgccccctacatctgcaatgtgggcgatttcctggccaaggcggacgacgccggcaagaagatcatgttcgaggctcagctgggcgctctgcgtgacatcgacttcggcatctatccctacacctccagctccaacaccatcggcgcctatgctcccatcggtgcgggcatcccgggccgcaagctggatctgtcggtgggtatcatgaaggcttactcctcctgcgtgggcgagggccccttcaccgccgagctggccatgaccgaggacgagaagaacgtcctgcgtgagcacggccacgagtacggcgccgccaccggccgtccccgccgcgtcggtcctttcgacgtggtggcaagccgctacggcgtgcagtgccagggctgcgacgagctggctctgaccctgctggacgttctggattatatgaccgagatccccgtggtcgcccgctatgaactggcggacggcaccgtgaccgacgtcttccccatgggcaagacgctggacgacgccaagccggtggttgagaagctgcccggctggaactgcgacatcaccggtgtgcgccgctttgaggatctgcccaaagccacccaggattacgtcctgtacatcgagaaggcagtgggctgcaagatcaagtatatctccgtcggccccgagcgcgaggcttgcatcgtgcgtgactgattggttctcccgtgaactttcgcgggtgaccggatgaatttacggctcccgccggatccgggctttgcggcccgggcccggcgggacgctttgatatggcggcaccggacatccgtcccgcgccgtccggcctgccgggaatacaggcgggaaaatcaaaaagagggtagttttgcgcgctgcgggcgcgcagtgggggagtgtttatcgtgacgaagtttcttcttcgttgtttcgtcaaaaactatgaaaatgccgcggacaaggccgtgcggtcggcctgcggtaatctggcctgcatcgtgggcattgcctgcaacgtgctgctgtttgcgggaaaatttatggtaggtatgctgttcggcagcgtggccatcaccgcggacgccgtcaacaacctgtccgatgccagttccaacgtggtgagcctggtgggcttcaagctgggcagtaaacctgccgacaaggagcatccctacggccatgcccgctatgagtatctggcgggactggcggtgtcggtcatgatcctggtcatcggcatcgagctgggcaaggagagcatcggcaagatcattgcacctacggcggttgagttcagctggctgtcggcggcagtgctggtggcctccattctggtcaagctgtggatgagcggcttcaaccggtatgtgggcaagctgatccattcggacacgctgctggcaacggcggcggattcccgcaacgacgtcatttccacctcggcggtgctggtggcctcgctggcggcgcactttacccgcattgaccgcctggacggcatcatgggcctggcggtggcgctgttcattctgtacagcggcatcggcctggtgcgggacaccctggaccccatcctgggcgccgcgcccgacccggaacaggtggcctacatcaaggaaaaggcgctgagctatcccaacgtgctgggtgtccatgacatgatgatccacgactacggccccggcaaccgcttggtcagcttccatctggaaatgcccgccgagggcgacgttatggccatgcacgacgagatcgactgcatcgagaaagatttctttaccaacgacggcctgaccgtcaccatccactttgacccggtggtcaccggcgacccccatgttaccgagctgcgggaactggtggaagctgccgctcaccaggcggaccccgaggtcaacatccacgacctgcgcatcgtgccgggtcccacgcacaccaatgtgatttttgactgcgccgtaccgccccgctactttgaaaaggacggtgccgccggccgcgaactgctgaacaaactgcgggacgccgtcagacagaaatggccggaccatttctgtgtgatccagctggaacaggcgtacgcagatctttcggaagcatccggacactgaacaccaacacaggagggaaaacgcaatggattacaacaaagccgcgctggaactgcatgagaaattccacggcaaactgacggtgcagagcctggtggaatgccgcgaccgcgacgccctgtccaccgcctacacccccggcgtcgccgagccctgccgcaagatcaaggcaaacccggaggacgtctaccgctatacctgcaagggccgcatggtggccgtcgtctccaacggcaccgccgtgctgggcctgggcaacatcggccccgaggccgccatgcctgtcatggaaggcaagtgcgtcctgttcaaggagttcggcggggtggatgccttccccatctgcatcgatgccaagaccaaggaagaagtcgttgcggcggtgaaggccatcgcgcctaccttcggcggcatcaacctggaggacatccgcagccccgagtgcttcgagatcgaggagcagctggagcgggagctggacattcccgttttccacgacgatcagcacggcaccgccatcatcgtgctggccggcctgctcaacgccctgaaggtggtgggcaagcgcctggaggatgtgcgcatcgtccagaacggccccggcgcggcaggcactgccatcatcaaaatgctcatgaccgccggtgccaaacacattgtcgcggtggatgagcacggcatcctggttcccggccgtcccgcggggctggaaggccacaaggaaaagctggctgaaatcaccaacccggagcgcatctccggcacgctggccgacgcagtgcgcggggccgacgtgtttatcggaacctcggtggccaacgccctgtcggtggaagccgccaagaccatggcccccgacgccatcgtctttgccatggccaaccccaaccccgagatcctgcccaccgacgccaaggcggcgggcgtgcgggtcatcggcaccggccgtagcgacttccccaaccaggtcaacaatgtgctggcctttccgggcattttccgcggcgctctgtccgtccgcgcccgggacatcaaccctgtcatgaagatggccgccgcccgcgccattgcgggccttatccccgatgaggaactcaacgaggaaaacatcctgcccaaagccttcgatccgcgcattgcgggtgcggtggccgacgctgtggcgcaagctgcgcgggaaagcggcgtggcgcgggtatgagcatccgacatatttcgcccttggccgtcaccgaggcagtggaggaactgtgcatccgcgccaacacccagctgccgcctgatgtgaaagcggctctggacgctgcccaggcctccgaaccctggccgctggccaagcagaccctgggccttttgcagcagaacctttgtgccgccgctgaccgggaactgcccatctgccaggacaccggcatggcctgtgtctttgtggagctgggccgggaagcctgtgtggacggcgacctgcaggctgccattgacgagggcgttcgacgcggctatgaaaaaggctacctgcgcaaaagcatcactgccgaccctctcaagcgggtcaacacgggggacaacaccccggcttttgtgacgctgcatctggtggaaggcaatggctgccgcattaccgtggcgcccaaaggtgcgggtagcgagaatatgagccgcctggccatgctcaaacccgccgacggggtgcagggcgtcaaagactttgtgctggacaccgtgcgccaggcgggggccaacccctgcccgcccattgtgctgggcatcggcatcggcggcagcttcgacaagtgtgctgccctgtccaaacaggcgctgctgcgccccctggatcagcccaacgccgacccttactatgcggcgctggaagcggaactgaaagaggaaatcaacaagatcggcattggccctcagggcttcggcggccgtaccacctgcctgggcgttgccattgagcagctgcccacccatgtggcctgcctgcctgtggccgtcaatatgagctgccatgtcacccgccgtgccagcgcggaattgtgatcgcccatacggacaaacggaaaggaaacaaaatgcccgcagcaaaaccaaaacccagcattgatatttccctcgacggggtgggaacctccaacgggcggcgcggactgggctccatgccgtcctccaggggaaacagccggatcgacatctctctggacggcgtgggcggcccgaccatcacccgccgcagccggagcagcattgacattccgctggacagccctcgcacaccggcggaggaatcccgccgcatcagcgccctggagctggaactggtcaaccgccaccacgccgagatgaaagaactttaccgccgtgccgagaaaggggaatgaccgtgcaatatacactgcatacaccgctgaccaaacagaaccttgcacccctgcgcgtcggggataccgtgttgctgtccggcgtggtctacaccgcccgcgacgcagcccatggccgcatggcggaactgctggatgccggcaaaccgctgccctttgacattgagggagcggcgatctactatgttggtcccacaccggagcgtcccggctgtgccattggcgcggcgggacccaccacctccggtcgcatggacagctacacgccccgcctgctggacctgggccttgcctgtatgatcggcaagggcaagcgcagccaggcggtcaaggactccgtggtcaaaaacggagcggtttatctggctgccctgggcggagcaggagccctgatggcggacagcgtcaaaagctgtgaggtcatcgcctgggaggacctaggctgtgaggcagtccgccgcctgacggtggaaaacatgcccctgaccgtgctgctggacccccatggcggggacctctaccagtccggcccggcggaatatctggcggcacagaccgccggacaggcatgaagcggggcgcggctgttgccgccgcgtttctgatcgtggccttcgccgcggctgccgcggtgcagacggtgcgcctgggcacggcacagcagaagctggacgcgctggaggcggacaccggagaactgcgcagcgaactggattcggtaaaagcccagctggccgaggagcagtctgcccgggaagaagccgagaacaaactcaacgacctggaaaaacagcaggcgctggaaagtgccgcccaggccaaggcggacatccaggatggcgatgaaatcggccgggtgtgggtggatggcaccgagctggactgcaccatgtattggggagacagcggcagccagttccgcaacggtgcgggtgtgcactcggcggatggctgtgtcctgcccggtgaaaacggcaccgtctttgtgggcggccacaccgacagctggttcgtggacctcaagtctgccgaaatcggttccatcattcatctggaaacgccctgggggaacttctcctatcaaatcaccgagaccaaggtgatccaggaaacggagatcgaccagtgccgctggggcgagcagacccccagctgtatcctgtatacctgctacccctttggcatccagacccccaccgaccagcgctacctggtctatgccgatcctctggaaacggatgaaaacggcgtggtaccggacgaattgcggcagggcgaagaatgattgccttgcacagcagacagatcaaatggatatgaaaaaagcggatcgatgcccatcggtccgcttttttgctgcaaactttgccaaaacctgctatactgaatttatatgaaaccgatatcacggaggtgcgccatgaacattaccgaacttgcagcattggcaggggtgtccaaggcagcggtcagccgctacttcaataacgggtatctcagcgaggacaagcgcgcggccattgcggcggcggtggaaaagactggctaccagcccagcgaacaggcgcgcaacctgcgcacccaaaagacccggcagatcggtattgtcatcccgcggctgagtagcgagagcaccgcccgggtggtggacggcatcagcctgacgctggcggacaagggataccgcctgctgctggccaacacggccaacgaccccgcaaaagaggtggaatacctggataccttccgccacagcggggtggacggggtgctgtttatggccagtgttttcacgcccgagcacgaggcggtgctgaaaaacatgcacctgcctgtcgtgatcattgcccagcgccatgagggctacaactgcgtgtaccatgacgatttcggcgcggctcatgccgttgctgcccggctgatccagcggggcagccgacacccgatttatatcggtgtcacggcccgggactatgcggcgggatacgcccggcacgaggggtatcttgccgcactgaaggaggcgggcattgccccgcgggcggaggatatgttcctggcacagttcagcatgaagtcggggtatgaacaggccaaggccattttacagagcgggcggcgtccggatggcatcttctgcgccaccgatgccattgccgtgggcaccatgcaggcctgccgggaagccggtctgagcgtgggacgggatgtactggtgacgggcattggagattccgccatggggcgggtcacggcggtcccgctgaccagcgcccatctgcactacaagaccagtggccaggaagcggcccagctgatgctcaaactgctcaaacgccagggctccgggactcgctgcatccagctgggctatgaggtggtcgagcgggagtccacaaaaatgggacttgaaagtgaaaccatatgaaaccgatagcgaaatatatgaaacttggtggcgcttgtcaatagacgcaggggagaaaaccgtgctacaatcttgctgtaaggatgaaaccgatatcacatcggcctgatttgcggaaggagcatacagtatggattacaagcagacagcccttgacatcctcaaggcaatcggcggcaaggaaaatgtggtcagcgcagcccattgcgcgacccgcctgcgcctggtcatcgcggacaattccaaatgcgacaaaaagacggtggaaaacatcgacggcgtcaagggcgtgtttgaagcgtccggtcagctgcagatcatcatcggcaccggcgcggtgaacaaggtctatgatgagttcatcgccgcggcgggcatttcagccgccaccactgcggaggtcaagcaggcagccgtcagcaaggcgccctggtacaagcaggcggtcaagaccctgggcgacgtttttgtccccatcatcccggccatcgtggccagcggccttctgatgggtctgctggagggctttgccaatgtgttcccctccatcaccgaaaacggcacctacaccattatccatctgttcagcaacgcggctttcgttttccttcccatcctcatcgccaccagcgcggccaaggtgttcggcggcaaccagtacctgggcgcggtcatcggcatgattatgatccacaccgatctggtcaatgcctggaatgttgccactgccacggacattcccacggcatcggtctggttcggactgtatgacgtcaaactggtgggctatcagggccacgtcatccccgtcatcattgcggtctgggtcatgtgcatgatcgaaaagcgcctgcacaagatcgttcccgaaatgatcgatttgtttgtcacgccgctggtcagcgttctggtcaccggctacctgactcttaccgtcatcggccccgtctttggcgcggtggaaagctgggtcctgaccgctgtgcaggccctgatcgccctgcctttcggccttggttctgcgctgtgcggcgccatctatgcacctaccgttgtggcgggcgtccatcatatgtataacgcgctggaagccggcatgctcagtgccaccggatttgatacctggatgcccattgccagcgcggccaacgttgcacagggcgccgcggcccttgcctttgccctgcgcacccgtgacgccaaactcaaaaatatggcgctgcctgcatccctcagcgcgttcctgggcatcaccgaacccgctatcttcggcgtgaacctgcgtttcttcaaaccttttgtggccggtatcatcggcggcgcggcaggcgctcttgtggcaggctggctgggcgttacctccacggcttacggcatcaccggtctgttcggtatcctcatcaccactcacaacctgccccagtacctcatcagcatcgcggttgcctttgcggtggccttcctggtcaccatggtgatctatcgcgaggagaaggtggccgaacatgcataactggcgtcaggccttccatctggaacccccgcagggctggctcaacgaccccaacggattgtgctggtttcagggacgctaccatgtctttttccagtactgtcccacatcgtcggacggcgtcggccccaaatgctggggacattatgaaacccctgactttctgcactggacctttgcgggcgtgccgctgcagcccgatacgccccgggacgcaagcggcgtctactccggctgtgcggtggagcacgacggctgcctgcgactgtattacaccggcaacgtcaaatatcccggcgactatgactacatcactgccgggcgggagggcaacgtcatctgcgtggaaagcccggatgcccgtaccatgggccccaaacagctgctgatgaccaacgccgattatcccgccgactgcacgctgcacgtgcgcgaccccaaggtctggcgtaccagcgacggctggcggatgatcctgggcgcacgcagccgggcggatgccgggcgggcgcttttgtaccgcagcgccgacggcctggcctggacgctggagaagatcgtggaaaagtccccggctttcgggtatatgtgggagtgccccgactgttttgagctggacggcagacagtttttgagcatttctccccaggggctgccccggcaggagacccgctggcagaatatctaccagagcggctggttcccggtggagggtgacctggcagacggcgtcctgggggatttcacagagtgggatatgggatttgatttttatgcgccgcagacctttgcggccccggacggcagacgcctcctgatcggatggatgggaatgcccgacgccgactatcgcaaccctaccgccgagctgggatggcagcactgcctgactgtcccgcgggaggtggaactgcgtgacggcaagctgtaccagcgcccggtgcgggaactggatgctctgtgcgacacgacctccaatttgccggagggagagacaacgctgaccgcacctttccgcctgaccgcgaaagcggagaacagctgcaagctgactctggccgaggggctggaactgagctatgacaagcagagcgggatctttgccatgcgctttgccgacctggcgctgggcggcgggcgcacagtccgccgagcctgcctgaaaccgggcagcgaccttgccatggatctctgggtggataccgcgtcagtggaatgctacctcaatggcggggagacggtcctctccacgcggtactatcccgcaagccgggacatccgggtggaggtccggggcatgaaggcgcagtactgcaccatgaagcccatggagctgctgtaaatcggcaggctggcgtctggatgcaaggattccggcggctgccgatcgttggatacctgtaaataaaatacggcggaggaaattccctccgccgtattttgttccgcggaacatacgtgctatacttgttttgaaaaagactgattgtctccaaaaaggaccgccgtaaaacccggcaggggaggaaaaactttggatacgcagaatgaaaaatggctgaaacgtgcacggagaaaggctctgcggatgcagcggctgatgaagtttgtgttccgtcatggattgggcggatatcacctgtccaaagccggacgggagcgcagcgtggacacccgccacggcccggtgcgggtcctggaatacgggtttgaggaaaaggagctccgccctttgtatgttgacctgcatggcgggggctttattatgatgcaggcagacgccgacgaggccatgaaccttgaatttgtccgccgcgccggggtgaaagtgctctctattgattaccccaaagcgccccaggcaccgtttccggtggcagtggaggcggtgcatgacgtgatcgcccattatctggaacatgcgcagcagtacggcatcgaaacggcccatatgggtatcggcggacacagtgcgggcggaaacctggcgacagtgacctgtctgcgggatctggccaacggcgagtttggctttacctatcaggtgatggattatcccgtgctggacctggcaacaccgccggaacaaaagcccaggcccaaagggtgcatcgacccgaaggaagcggccatgtacaacgcctgctatatcctgccgcatcaggcgggaacactgagtgcctctcccgcactggcggaaccgggggaccttcgcggaatgccaccggcgcttctgctggtctgcgggggagacagcctgcatgacgaggcattgcactatgcccgcagccttcgtgctgccggtgttgccgtgacggtgcaggaataccccgaccaaccgcacggtttcacctattataagcccaatgcggatacccgggatgccattgaacgcatggcgggatttattgcggagcacagtcatccggtctgaacgccggacaaaacggatagaaacagccccggcgggacgacaccatcctgccggggctgttttgtatgataatgggaaggtcagttcagttgtttgccgaagaaatccagctcggggcggatgacatccatcagatcgtcgaactgatcgggggtcaggctctgggcgccgtcactcttggcgtgtttgggatcgttgtggacctcgatcatcaggccgtctgcgcccacggccactgccgcggcggccaggctgggaaccatgaaggcaatgcccgccgcatggctgggatcaatgaccacgggcagatgggtcatctttttcagcatggggacggcggcaaggtccagagtgttgcgcatgctggtctcaaaggtgcggatgccgcgctcgcacagcaccacgttggggttgccctccgccatgatgtactcggcgctcatgaccagttcctccagggtggaggacagtccgcgcttgagcaggaccggcacgttggtgcggcccaccgctttgagcagttcaaagttctgcatgttgcgggcgccgatctggatcatatccaccttctgctccaaaaacaggggaatgtgctcgctgctcatcagctcggtgacgatgggctggccggtcacggctcgagccttgctcatcagttccaggccctcggcacgcaaaccctggaaagagtaagggctggtgcggggtttgaatgcaccgccccgcagcagggaagcgccggctttctgcacccgctttgcaacctcaaggatctgggattcgctctccacgctgcagggaccggccatgaccgcaaaattgccgccgccgatcttgacgccgcccacatccaccacggtgtcatcgggatggaatttgcggttggcctttttgtaaggctccgacacccggcggcagctgtccacaatgggattggccaagagccagctctcgctcaagcccttggtatcgccgatcaggccgaggatatgggtatcgctgcctttggagtcattgatctggaagcccatctgttccagttcacggcagaaaccggcgatctgttccggctgtacgttgggtttcaatacgacgatcataaatgttgcaccccttttatcttgctgcgtatggtacgcgtttgtctgtgttatgcagtttagcactttaatacactaaagtcaagcgtttttcgacaataatttacggaaccctttttgacaacaggcatgtccgggcctataatgagttcacaggcgccgcgccgtggggagtgttccctcgcggcaggtatgcggcgcaaacctgcacagtttgtgcatgggggaggagatacaatgggaaaggaaagcaagaccaatgccatgcgcatgctggagcgtgccaaggtggcctatacatcacatgaatatcctcacgaggaaggcactgccgtggacggtgccacggtagccaagctgaccgggcaggacccggcgcgggtattcaagacactggtcacccagggggcggaccgcaattattatgtgtttgtggtgcctgtcctggcggagctggatctgaaaaaggcggcaaaggctgccggggtcaagagcgtggccatgatccacgtggcggacatcaataaggtgaccggatatatccggggcggctgcagcccggtgggcatgaaaaagcagtaccatacggtgtatgacaaaagctgtctggaccagcccaccatgctggtctcgggcggtcggatcggcacccagatcgaggccgcacccgccgacctcatcgcagtcacccggggcattacggcggacatcaccgccgaatcggtatgatgcggctggacaagtaccttgccgcggcattgggcatcccccgcagcgagagccgccgcctggcggcccgcgggtcggtgaccgtagacggcgaggtctgcaaaaaggcggaccgtcagatcgatgaaaagactgctgacgtctgtgtggacggcaaatccctgggcggcagttataaagagtttgtctatatcatgctcaacaaaccggagggcgttgtctcagccagccgggatgcccgggacactaccgtgaccgatctggtggcggcggactttccccgcaggcagctgttcccggcggggcgtctggacaaaaccagcaccgggtttgtgctgctgaccgatgatggcgctctggcacatgatattctggcccccggccgccatgtacccaaggagtacatcgtcaccctggacacgtcccttacccccgaaatgtgcgacggctttgcatcgggggtgacgctggcggacggccagaccctggcccccgctgtggcggagcctgcccccggcggcgatccctgccgggtacacgtggtgctgcggcagggcgtttaccatcagatcaaacggatgttcggcgtctttgacgcaggcgtcaacggcctgcatcgctcccatatcggcggggtggagctggacccggccctgcagcccggccaatggcgggaactgaccggggaagaactggcccgcctgcgcaacgccgtgggcaaataaccggaaacggcacagaggattgaaagacccggcgaaagggcgaacctttcgccgggctttttgtgtatggcaggggaagggcgttgccccggcattacagcgctgcgtcccactccgcttcccggaagcccaccaatacctttccgtcatccgtcaccagaatgggccgcttgaccagcatgccgtcggtggccagcagagcaaactgctcatcttcgctcatggcgggcagccggtctttcagtcccagcgccttgtactgctggccgctggtgttgaagaactttttcaggggcaggccgctttgtgcctgccagagacgcagctcctcctcgatggggcggtcggtcttgatatcgcgcaccgtaaaggcggcgttccggctttccagaaaagcacgggcctttttgcaggtggaacagttgggataacatacaaacagcatggaaacatcctccttatgcagaccccggcggagccgcaggattttccccaagtataccacagcgccgccgcacgtacaatggaaggggaggctgcggcaaaatgcacagactgtcgaaaaatggattgacttgccctgtccggcatgataccattgcattgtttccattgacccagcatagccccaaaaggctgtgcgcgccgcagcgccgtagggattacggtgtctgccagacgggaggccgtttgtatgatgttttatgagttgggatggctgttttttgcctattcgtttattggttgggtgctggagatcctgtttgtctccatccgtcgccggaagtatgtagaccgcggtgtcatcaacggaccgctgtgtatcgtctacggcgttgccggcgtagtcattgcggtgacattgtctgaaattgccgggaacctgttcttcctgttcctgtacagtgccctgtacgccacggtcattgagtggatcgccgggcatatcctggaacactcctctcagagccgatggtgggactactcacacctgcccttcaacctggacggctacattgccctgccggtatcggcattttggggccttttgggcgtcgcggtagtcaaatggggcaacccgctgctggtctacctggtccggctgatcccgcagcctttgggcagcatcctgcttggcgtgctgaccgttgtgttcctgatcgatctggcagacaccctgcttaccatggcgggtattcgccagcgcctgccgcaggtggaggccgtcagcaaccgtctggcctccctgacgctgcgcatgggccactggatcctgggccgtaccgagcgccgtatggtcaaggcccatccccaggcaaacttcgcccgcagggaaaaggtcaaatccaccgtctttgcccagggctgcagcttttacaagatcgtgctgctgtttttcatcggtgcatttctgggcgatattgtggagaccatcttctgccggatcacggcgggctactggatgagccgctccagcgtggtgtggggaccgttctccatcgtgtggggcctggccatcgctctggctacgctgatgctttaccggtacaaggaccgctcctccaccttcctgtttatcgtgggtaccctgctgggcggcgcctatgaatacctgtgcagcgtctttaccgagatcgtgttcggtacggtgttctgggattacagcgccatccccttcaacctggcgggacgcatcaacctgctgtactgcttcttctggggcatcgcggcggtggtgtggttccggggcgtttacccccacgtctcccgctggatcgaaaagattcccatgcgccccggcaagatcgtgacctgggtgctcgtcgtctttatggcggtggatatggtggtcagctcggcggcactttcccgctataccgctcgtgttgcgggaatcccgccccagaacgctgtggaggtctatctggacgaacattacgacaatgaccgcatgttccagatttaccccaaggcggtacataccgacaagccccagtccactgtggaacttgccgaatcctgaaaaaaaccaaagcccggagcctgtaaaaagctccgggctttttctgccgtcaaacagaaaaggccgcatcctaccggggagtgttccggtaaggatgcggccttttccgcgtatggtggtgtaccgtttgcggtaaggataaggagatgtcagaggttggtgtagcccatcagatactcgtccacggcagcggcggcctcacggccttcccgcagcgcccagacgaccaggctctggccgcggcgcatatcgccgcaggcaaacacgccggggacgctggtctggtagccggtgtcggccacgcagccgcggggcgtcagctccgcgccgaaggcctcggccacgtagctctcgcagccggtaaagcccgccgcaatgagcaccaggtcgcattcgacggtgaactcctccccggtggggaccatggcacggcggccggtggcctcgtccacgactttgctttccagcttgctgatgagagcgccgcagacctggccggactcgttcttgtagaactccttgacggtggtctgatagagacgcgggtcgctgccaaagacggcgatggcttcctgctggccgtagtcggtcttgaggactttgggccattccggccagtcgttgccgggggcgcgctgtgcgggcgggcagggcatcatttccagctggaccacggcctcgcagccctgacggatggcggtgcccacgcagtcgttgccggtgtcgccgccgccgatgaccaggaccttcttgcccttggcgtcgatggccttgccgtcggcaaagttggagtccagcaggctcttggtgacactggtcaggtaatccacggcaaagtagatgcccgaagcgtcacggccgggggcgctgatatcccggggctgtttggcgccgcagcagaggaggacaacgtcattgtcctgcatcagctcgtcggcggagacgttcccgcccacgttggcgccggtcttgaactggacgccctcctggaccagacgctccacccggcggtcgatgacccatttctccagcttcatgttgggaatgccgtacatcagcaggccgcctacccggtcctcccgctcgtagacggtgacggtgtggccacgtaggttgagcaggtcggcggcagccagacccgcagggccggcgcctaccacggccacccgcttgccggtgcggtcggaaggcgggcagggttccagcagaccagcgctgtagccgtactcaatgatggcgtgttcgttttccttgacggcgacaggatcgccgctggccatgccgcaggtgcatgcggcctcgcacaaagcggggcagacccggctggtgaactcaggaaaacggttggtggcggtcaggcggcgcagagccagctcccagcggccctgacagaccaggtcgttccactcggggatgaggttgttcagcggacagccgctggtcatgccgcagatggtcatgccgctctggcagaaggggacgccgcagtccatgcagcgggcaccctggatctgctgctcatcacgatgcagcgggacgtgaaattcgttgaaattggtaatgcgttctttgggcggcagctcggtgctggtctgccgcgaatacttcataaagcctgtgggtgttcccatgatacggctgcctcctttactgtgcgttcttcatggcgtagaatgcttcgatctgagcctgctcgctgtcctcgcccttctcttccatctgggcaatgaggcgcagcatcttgtcatagtcgtggggcaggaccttcttgaacttgggcagatactcgccaaagttgtccagaatttccttgccgcggggcgagccggtcagttccacatgctcgcggatcagatctttcagcagggagacgtcgtacttgtgttccacgggttccaggctgaccatgtccttgttgacgcgctggtacagatcccagtcctcgtccagaacataggcgatgccgccgctcatgccggctgcaaagtttttgccggtcttgccaagaatgaccacggtgccgccggtcatatactcgcagccgtggtcgcccacgccttcgacaacggcggtggcgccggagttgcggacgcagaagcgctcgccggccacgccgttgatgaaggccttgccctcggtggcgccgtacagggccacgttgccgatgacgatgttctctccccggtcgtaggagacctccgccgggggatagacgatgagcttgccgccggacaggcccttgcccatatagtcgttggagtcgccgatgagttccagggtcaggccggcaggaatgaaagcaccgaagctctgaccgccgtagccgtggcaggtgacgtggaaggtatcttccggcagagtgttgccgaacttgcgggtgatctcgctgccgaagatggtgccgaaggcacggtcggtgttgcccacggtcagctccaccgaggcgggcttgggctggtccatgtcgaaggatttcttgaacttcttcatgagcacccgcatgtcgggggtcttttccagctggaagttgtagaccgccttggggtcaaagtggatgctgctgttttccaccagcgggttggccagcagggcggaaagatccagctcgctggcacggctgccggcggggacatccttgacccggagcaggtcggtgcggcccaccagctcgtccacggtgcgcacgcccaggcgggccatatactcacgcagttcctgggccataaaacgcatgaagttcatgacgtactccggcttgcccttgaagcgcttgcgcagctcggggttctgggtgcagatgcccatggggcaggtgtccaggttgcagacgcgcatcatgacgcagcccatggcaaccagaggcccggtgccgaagccgaattcctcggcgcccagcatggcggcaatggcgacatcccggccggtcatcagcttgctgtcggcctcgatgcgcacacgggagcgcaggccgttcatgatgaggcactggtgggcctcggcgatgcccagctcccagggcagaccggcgttgtgaatggagttgcggggggcagcaccggtgccgccgtcaaagccggagatgaggatgacctcggcgcctgccttggcaacgccggcggcgatggttcctacaccggcctcgctgaccagtttgacgttgatggccgcacggcggttggagcacttgaggtcatagatcagctgagccaggtcctcgatggaatagatgtcgtgatggggcgggggagagatcaggccgacgccggtggtggagtggcgggtcttggcgacccagggatagaccttggcgccgggcagctggccgccctcgccgggcttggcgccctgagccatcttgatctggatctccttggcgctgaccaggtatttgctggtgacgccgaaccgggcggaggctacctgcttgatggccgagttggactcgctggtaaatcgttcctccggttcgccgccctcaccggtgttggacttgccgcccagacggttcatggcgatggccatgcactcgtgggcctcgtcggacagagcaccgtagctcatggctgcggtcttgaaccgcttgacgatgtcgtcaacgctctccacttcctcgatggggacgccctgctcggggtagttgaactccagcaggctgcgcagatgcatctcgtcgtcgccggtgtgggagatggcgtcggtgtactgcttgaacttggtgtagtcgccggtccagcaggcctgctgcagcagatggatggtcagcgggttatagaggtgctgctcgctgtcccggccgctgcgcagcttgtgggcgcccaggctgaccagctcgctgccggtgcccagacccaggggatcgaaggccttctggtggcgctgctccagatcattctggatgtccttgagggtgatgccgcccacacggctgacggtgttggtgaagtacttgtccaccacttccttgctcacacccagggcctcgaaaatctggctgccctgataggactggatggtggaaatgcccatcttggaggcaatcttgacgatgcccgccaggatggcgtggttgtagtcatccacggcggcgtaataatccttgtccagaagcccctcggagatcagctcgcccaccgtctcctgtgccagataggggttgatggcgcaggcgccgtagcccagcagggtggcaaagtcgtggaccaggcggggctcgccgctctcaaggataagcgccatggcggtgcgctttttggtgcggaccagatatttggacaccgcgcccacagccagcaggctggggatggccacgtggtattcgtcaatgtcgcggtcggagaggatcagaatgttggcgccgtcgcggtaggcgcggtccacatccacgaacaggcggtcgatggcctgctccagctcggtgttcttgtagtagcagatggacaccgtctccaccttgaagccgggaacgttcatagccttgatcttgagcaggtcggtctcggtcaggatggggttattgattttcaggaccttgcagttctcgctgtcctcctccagcaggttgccctgggcgcccacgtagacggtggtggaggtgatgatcttctcacgcagagcatcgatgggcgggttggtgacctgggcgaacatctgctggaagtagttgaacagcggaggatgggtgtggctcaaaaccgccagcggagtatcgctgcccatggcgcccgcgggctcggagccgtttttggccatgggaaggatcatggtggagacatcctcgtaccggtagccgaaggccttctgcaggcggaccagctcctcatgggagtgggacggaaccttgcggttagggatcttcaggctgcccagatcgaccagattgcggtccagccattcgccgtagggctggcgggaggcgtagtcggccttgagctgctcgtcgtccaccagctcacccttgacggtatccaccagcagcatcttgccgggacgcagacgatccttcttgacgatgtcccgggcgggaatgtccagtacgcccacctcactggagaggatgaggcggccgtccttggtgatatagtagcggctgggacgcagaccgttgcggtccagcacagcgcccatgatgtcgccgtccgagaagaggatggaggcagggccgtcccagggttccagcatggtggcgtaatactggtagaaatcccgcttcttggggtccatgctcttgttgttcgaccacggctcggggatggtgaccatgacggccaggggcagttccatgccgttcatgaccaggaactccagggtgttgtccagcatggcggagtcgctgccgccctggttgacaatgggcagaatcttgcccatgtcgtccttgagatagcggctggcgatggtctcctcccgggccagcatggtatccacgttgccgcggatggtattgatctcaccgttgtgcaggataaagcggttgggatgggcgcggttccaactgggggccgtgttggtggagaaccgactgtgcaccatgccgatggcgctctcgtaatcgttgtcctgcaggtcggggtagaacaggcgcagctccttgaccaggaacatgcccttgtagacgatggtgcggctggacaggctgcaaacgtaggtgttgcggcagctctgctcaaagacccggcgggctacatacagacggcggtcaaaggcaatgcccggttccagccggggcggcttgcccacaaaggcctgccagatgctgggcatgcagtcccgggcgctgctgcccagaacgtccgggcaggtggggacgctgcgccagcccaggaaggtcaagccctccttttggcagacgatctcaaacagcttttttgcctgcttgcgctgtagctcatcctgagggaaaaagaacatgcccacgccgtactcgcgctcgccgcccagagtaatgccctcggcagcggcaactttctggaagaacttgtcgctgatctgcaacaggatgcccacgccgtcgccggtcttgccctcggcgtccttgcctgcgcggtgttccagatgctccacgatctgcaaagcgtcgtccagtaccttgtggctcttgcgtcccttgatgtccacgaccgcgccaatgccgcagttgtcgtgttcaaaccgcgggtcatacagcccggcgggggcattgcggtcggtaaaattttccatactcccgatctcctttcctcacctggggcggcgccgtgcgccgcgcgtaaagaaaaaggacgccctgccggagggcacaataccctcttggcagaacgtccttgttcgtgtgactactatatcatacccaaacggatttggcaaggggcgtccaaaatttgcacagaaaatccatacctatgccaaaaattgtaacacctaccggcaattatttggtaagggccggctccttgtcttccgtttcggcgctgttctgggcgcgcagctcagccagaatggcggccagcagctcctcctgagtgggggcggcaggcttggcgggcttggctgccgccgctttggcggctttggccgccttgcggacgcccagatcacgcagccggttcatggccttgaccaggcagaacagcacaaaggccatgatgacaaagttgatgatggccgagaaaaacgacccgatgcagagcgggtccgcaccgttgggcaggggaatgaccacattgctgaaatccgtggagaaggcaatgcccaaaagcggattgagaatgtctttggtcagcgagttcacgatgctctgaaatgctgcgccgatgatgacaccgacggccatatccaccacgttgcctttcagggcaaaggtcttgaactcttccagaaattttttcatatgttgctccttgtggggcgggactgtgcaggggaaagccttactttttcagcaggtcggccacggccttggcagcgccgtccaggtaatccccggcaaaagtctcgatcatgccggcgtcggcttccttggccagctcgggatcgatgggcatcttggccagcacgggcaggccgtacttggcgccggtctcatccacatggctgtcgccgaaaaccgcgatgtgcttgccgcagtcggggcagacggcatagctcatgttctccacaatgcccaggatgggcacatgcatcatctgggccatctggacagccttgcccacgatcatgccaaccagttcctgcgggctggaaacaatgatgatgccgtccaccggcagggtctggaaaacggtcagggggacgtcgccggttcccggaggcatatcgacgaacataaagtccacgtcctcccagatgacgtcctgccagaactgcttgacggcgcccgcaatgacgggaccgcgccagacaacgggggcttcctcgtcgtccagcagcaggttgatgctcatgatgtcaatacccacgcggctcttgacggggaaaatgccgtcgtcggtgccggtggcggggccatgaactccgaacagtttggggatggacgggccggtgatgtcggcatccagaacgccgactttatagcccagacggcgcatggacacggccagcatggcgctggtcatgctcttaccgacgccgcccttgcccgacacgacgccgatcacctttttgatgtggcttttcgcgtggggaggctcgtgctggggcgcacggctttcgcagtttgcgctgcaatggctgcagtcgtggttgcaggcttcgctcatggtgacagatactccttttcctgatgaaggtccgctgcccgcctctgttatgcgggcgaatcagcgggggttaactcatatagtgtacctctttgccggtcggattgcaaggccgtccggcgccagcggcaaaacaaagatgccgcagcatcgcgcctttgccccaaaacgggcaaggaatgctgttttgccgtgcacagaggcgtcgagggttacagcggcagctcgcccgccaccgtgcggatgaactggcggaagatggggccgcgctggttggcgatctcgatgacctcgtcgccggacaggcgcttgcccgccatgcctgctgccatgttggtgatcaggctgacgcccagcaccggcagaccgcagtgggaggcggcaatggcttccggtacggtgctcatgcccacggcgtcggcgcccagggtgcggaaagcgcggatctcggcgggggtctcaaagctgggtcccatgtagccaaggtagacgccctcccgcagggcaattccctgttcggctgccacctggcgggcggtctcctggaaggcgggggtgtagacctgggtcatatcgcagaaacgggggccgatggtatcgtcgttggcgccccgcagcgggttggcgcccataaagttgatgtggtcggtgatgagcatgaaatcgcccaccgagaaatcccagttgacaccgcccgccgcgttggtcagaatcagtgccttgcagcccagggctttgagcacccggaccggcagggcgatggtctgcatgtcgtggccttcataataatggaaccggccctgcatgcacagcacaaggcgtccgttgagcttgccgcagacaaagcgtcctgcatggcccggcgcggtggagacggggaagtggggaatctcaccgtaggggataaagacgggggactcgatctcgtcggccagttcccccaggccggaacccagtaccagcgccaggtcgggggtgccgggcaggcgggcgcggagatattcggcggcttcggctaccgcctgagaaatgctctgttgttgcatgaaaggttacctctgtttctgtttggaatggtgaaaatgcggtttcatccgcccgtcgacggagcggagttcgctgccgctattttaccataccggcaggcagcggggcaaggcataccgggaccttccgccgcatacagtggcctgaatgagaatgggcggcacaagacaggggaggcggtcagagatgcagatccgggtctatctgaaaaatgcggcgatccttaccgtgtccgggctggtgctgcgggtgctgggcatggctttccgggtgtttgtggcgtccagcatcggcagcgagggcatggggctgtatcagctcatcctgtcggtgtatatggtgttcgtgtccctggcgtcgtcgggcatgaatgttgcctccacccgtctggccgcccagagccttgcccggggccgcagcatggcccgcaccgtttcggggctggtggtcacggcgggggcattggggtttgtcgccatggcggcccagcttgccctggcggaacccttggcccgctgggtgctgcatgatgtacggggcgcgctggggctgaaaatcctggcccccagcctgccggtcatggcggtggcgggcgcattgcgcgggtgctttctggcccgacggcgggtggagccgaacgcagtggcgcagctcattgaacagctggtgcgcatgggcgtggtgtggctggcgttgcgccgcaccgcatcctggggagcgggctatgcctgcgccgcggtgctggtgggcaacacggtgagcgaggcggtatcctgcggcgtcatggcgtttttggctcacaaggaccctgctttccaggccggggaggacgacggccgccggccctatacccgtcgggaactggcaggcattctgcttccagtggagggcagccgtattctggccagcgtactgcaggcggcagaaagcagcctgatccctctctgcctggcgctctatctgggagaccggaccgaagcagtctcccagtacggcgccatcaagggtatggccattccgctgctgtttttccccttctccattttgtcggcgctgtccagtctgctcatgccggagatcgcccgggccaacgcccggcgggatgctgccgccacggcccggctcatcgacggcaccatgcggatggcggggctgttctcggcgttggcgggatgctgctttgtactcttcggacagcaggcggcggaactgctgtacggcgacgcccaggtgggagagtacatccgcgtcctggggctggtcgcgccttttatgtacctggagagcatggtggacggcatcctcaagggactgggggaacagctggcgaccttccggtattcgctactggactcggcggtgcgtatcctgggcatcgtggtgctgctgccccggtacggtatctgggcgtttctgggcattatggcggtgtccaatctgctgaccttcaccctcaacacccggcggatgctgcgccgcgcccggatgcatcccggctggtggagctggttcggacggcccgccgtgttcgggctgacctgcggcacgttaggctggtgcgcgctgcggctgctcccggggcagagcactctggggctgatcgcggcgggggcgttggtctgcggggcgtatctggttttgtccctggtgtggggcggacttgaccatatgctgcccgcccggctgcgccgccagaaggcataatggatggtttacggcaagcccggcctgtgcaggttgacaaatgcatgggccgggctataataaaactgctgattgacatatcaatttttgacgtatcaagaatggagggtacgacattggagcggacattccatatgcttttgtaccgggcatttcatgcccagcgggcctttcttcggcccaagggggcggcgctgggcctggggaccggccagcccaaactcattgcgtatctggcgcagaacggtccctgcagccagaaacacctggccgaatattttgaggtcgatccggcggcagtgtgccggatgctggacacgctggaaaagggcgggttcatccgccgcaccgccgaccgcgccgaccgccgcaccggtatggtggaactgaccgaaaagggccgggaggctgccctcagctggcagggctgctgcgatgcattggaggagcggatgctggaagggttttctccggaagaacgccgccagtttgcggattatctgacgcgggcgcaccgcaatctgagaaaacgggaggaataaggatcgaacaatgaaggatttgaaacgtttgtttgggtatctggggccttaccgccgggatctgtggctgggagccgctctggtggtgatcgagacctcctttgaactcatcatcccggtgttgatgtccgacatcattgacgtgggcgtggccaccggggatgtgggcattattttgcaaaaggggatccagatggcagtctgtgcgctgctgtccctgctgaccggcctgctgtatgctcgctatgcggcccgggctgcctacggccttggcgcacgcatccgagaggcggagtatgccaaggtgcagaaatacgccttcggcaatctggatcatttcgagacatcctccctggtcacccgtatgaccaccgacgttacggtgctgcaaaacgccatcaacggcggcttccgccccatggtgcgcggccctgtcatgctggtcatgggcgtggggctgtccttctggatgaacgccaaactgtccttggtgttctttgtctgcgtgccggtgctggcggtggtgctcacctgcatcctgcgccgcatcgcccccatgtacagccggctgcaggtggccatggaccacctgaacaacgtggtgcaggaatgtctgaccgccatccgtgcggtcaaggcctttgtccggggcgagtatgaggaggaaaagttccgcaccgtcaaccgggaactgatggacgtcagccaggataccttccgcacggcggtgctcaacctgccggcgttccagtttaccatgtatgccgccgccgtcatgattttgtggttcggcggcaacatgatcctgcagggggagctggaagtgggcaaactcaccggctttttgagctatgtgctgcaggtcatgaactccctgatgatgatctccaacgtgtttttgctcatgacccgctctctggccagcgctcaccgcgtggcggaagttctggacgaacccgtgggcctgacctcccccgacaaagcggtcaaggaagtcaaggacggcagcatctctttccgtggtgtttccttcaaatatcatcccgacgcccgggagtatgccctgtccgggatcgatctggatattgccacggggcagacggtgggcgtgcttggcggcaccggttccgccaagacgaccctggtccagcttattccacgcctgtatgacgccaccgagggccaggtcctggtgggcggccgggacgtgcgggaatacgatcttgccgccctgcgggacgcggtgggcatcgtgctccagaaaaacgtgctgttttccggcacggtgcgggataacctgcgctggggcgatcccgatgccgacgacgagaccctttgggccgcctgccgcgccgcctgcgccgatgaatttctggaacggatgcccggcggattggacagtgacctgggccagggtggcgtcaatgtttccggcggccagaaacagcgcctttgcattgcccgcaccctgttgaaaaagcccaagatcatgatttttgacgactccaccagcgcggtggataccgccaccgagggccgcatccgcggggcgctggccaagatgaccggcatgaccaagatcatcattgcccagcgcattacctcggtcatggataccgacaaaatcatcgtgttggacgacgggcgcatccactcggtggggacccacgccgaactgctgcgcaccgaccccatctaccaggagatctacgcatcccagatgaaaggaggcgacgaaaatggctaaagctctgtcggggaagcggcccaaaaacctgggctttaccatccgcacactgctgtcctatatgggcaggcacaagttcctctttctcatcgtcgccgttctggtcaccatcagcgccctgggtaatctgctgggcacctacatgatccgccccatcgtcaacagcctgggggagggcgacccggacgccctggtccgcggcgtggcggtgacggcaggcatctatgccacaggcgtgctggcggctttcggttatacccagaccatggtgcgcgcggcgcagaaagtgctgtatgatatccgccgcgacctgtttgcccatatccagacgctgcccctgcgcttttttgatacccagcgccacggcgataccatgagctatttcaccaacgacgtggataccgtggcggacgctctgaacaacagctttgccatgtgcatccagagctttatccagatgaccggcacgctggtcatgctgtttgtgctcaactggcagctgtcgctgctggtggtagtgggctacgcggccatgtttttgtatatccggtacagcggccgccgcagcaagtcctactatacccgtcagcaggccagcctgggcgatctggacggctacatcgaggagatggtcagtggccagaaggtcgtcaaggtgttcaaccatgaggaagaaaacctgcggaccttcggtaccaaaaacgaggccctgcgccgggcaggtaccggcgcccagagctacgccgccaccatggtcccggcggtggtcagcatttcctacatcaactatgctattgtggcggtattgggcggtgtcatggccctcaacggcatgaccgacattggcagcctggccagctatctggtgtttgtccgtcaggcggccatgcccatcaaccagttcacccagcagagcaacttcctgctggcggccatggcaggtgccgaacgcatttttgaagccatgagcctggaaccggaagtggacgaaggcagcatccgccttgtcaatgtgcgggaggagcaggggaccctgaccgcctgcaccgacaagaccggccgctgggcctggcagaaaccggacggttccctcgtccctctgcggggagatgtgcgcttccatgatgtcagtttcggctacgacaagagccacaccattttgaaggacgtcagcctgtacgccaagccggggcagaaaatcgcctttgtgggctccaccggcgcaggcaagaccaccattacgaacctcatcaaccggttttatgatatcgacgcgggcagcgtgacctatgacggcatcgacgtccgggaaatcgagaaggactccctgcggcggagccttggcattgttttgcaggacacccatctgttcaccggcaccatcgaggaaaacatccgcttcggcaagctggatgccacccatgaggaagttgtccgggcggccaagatcgccaatgccgactccttcatccgccgtctgccccaggggtatgatacccgtatcacctcggacggcgccagcctcagccaggggcagcggcagctgctggccattgcccgggcggcggtggccgacccgccggtgctcatcctggatgaggccacttcctccatcgacacccgcaccgaagccctcattgaaaagggtatggatcagctgatggagggccgtaccgtctttgtcatcgcccaccggctgtccaccgtgcgcaatgccgacgccatcatggtgctggaacacggccagatcgtggaacgcggcggccacgaggaactacttgcccagaaaggcgaatactaccagctgtataacggtatgtttgagctttcctgacaaaaagccgcgccgcagccgcagtttgcagcttaccccagcggcaaactgcgtgcagaaacatccgctgacaaaaagaaaactcccgcacatcggactgaccggtgtgcgggagtttttatgttttacaggaaaaacttatttgtttttcttgctggtggccttcatgcgcaggtcatggttgaggatgcgcttgcggatgcgcaggttctcgggggtgacctccagcagttcgtcgggagccaggaactccaggcaggcttccaggctcagcttggaaacgggggtcagacgcagagcgtcgtcgctgccggatgcgcgggtgttggtcaggtgcttggtcttgcagacgttaacggtgatgtcctcgccggtgggggtgtaacccacgacctcgccctcgtagaccttctcgccggggacgaccagcagcgtgccgcgctgctgggcattgaacaggccgtaggtgacggccgtgccggtgtcgaagctgatgagggagccgctggaacgggtggcgatatcgccctgccactcatcgtagccgtcaaagatggtgttcatgatgccttcgccgtgggtgtcggtcaggaactggctgcggtagccgaacaggccgcggctgggcatacggaactccaggcgggtgcggctgttcatcagctgcatgttgaccagcagagccttgcgggcgcccagcgccgtcatgacagcgccctggtacatttcgggcacgtcgacgaccacgcgctccatgggctccatggtcttgccgtcctcctcgtgggtcagaacatggggcggggagacctgcagctcgtaaccttcgcggcgcatggtctcgatcaggatggacagatgcatctcaccgcggcccatgacacggaaggaatcggtggtggcggaatcctccaccttgagggcaacgtccttcagcagctcacggaacagacggtcacggatctggcgggaggtgacgtacttgccctccttgccggcaaaggggctgtcgttgaccgagaaggtcatctccacagtgggatcgttgatcttgacgaaaggcaggggctggaccttggaaggatcgcagatggtgttgccgatggtgatgtcgggcagaccggcaaaggcaacgatatcaccggcggaagcctcctcaatgggctcgcggccgttggccttgaagtcaaacagcttggtgatgcggccgctcacacggacgtcggggttgtgccagtcgcagacctgaacgctctggccgaccttgataacaccgttctgcacacggcccacgcccatacggccaacgaactcgttgtagtccacgctggaaaccagcatctgcatgggctggtcaggctcgccctccggcggggtgacgtatttcaggatggtatcgaacaggggcttgaggtcggtgccttcctcgggatgggtccagtcatagctggcggtgccgttgcggccggagcagaacaccatggggctgtccagctgctcatcggtggcgcccagatccatcagcagttccaggatctcgtcgatgacttccttgatgcgggcgtcgggacggtcgatcttgttgaccgcgatgaccagagacaggttctgctgcagagccttctgcagaacgaaacgggtctggggcatgcagccctcggcggcgtctaccagcagcagaacgccgttgaccatcttgaggacacgctcgacctcgccgccgaagtcggcgtggcccggggtgtcaacgatgttgattttgacgtcattgtaaacgcaggagcagtttttggccaggatggtgatgccgcgctcgcgctcgatgtcgccggagtccatgacacgctcggcaacctgctggttggcacggaacgcgccggactgcttcagcatctggtcgaccagggtggtcttgccgtggtcaacgtgcgcgatgatggcaatattgcgaagattttctcttaccataactgtgcgatacctctttacactttctatttcctcgtgggtgcccggatacggcacactgccgtagataagcatacagcataattttacggcagcatgtaagtcttgtcaagaatcgcaaaagcactttttccatgttataataaagtacacagaaataatcgcccgcatcccgcaggaatgcggcaaagcgcaacaaacgatgccgtaaatcgtttgctgcacagagaggggaatgctttttatgcaaatgcctactgccaatgtctggcgcaaggtcaacgtgatcggtcatgtcaatcccgacaccgactcgatctgctcggccatcgcctatgcatatctgaagaatcaagccagcgagatggtctgcgaaccccgccgtgccggtcagctcaaccgcgagaccgagttcgtgctcaaacattttgacgtggaaccgccgcgcctgtgcaccgacgtcagcccccagataaaggacatcgatatccgccgtcagccgggcatcgaccgggaactcagcgtcaaggcggcgtggagcatgatgcgcgacgcggagatcgatactctctgcgtcaccgatgccgaggatgaactgctgggcctgatcacggtcaaggacatcgccaacgccaacatggacctgctggatacgggtgttctggcggatgcccataccagctaccgcaacgtcctctccaccctggacggcgagatggtggtgggtgaccctgacgccgaggtggccggccgcatctatatcggcggcagccccgagatcatggaggaacagctcaaacccggcgacctggtgctggtctccaaccgctatgatacccagctctgcgccatcgaatgtgacgcagggtgcattgtcatctgcaacggcaaggccgcgccccgcaccattgagacgctggcccgggagaaaggctgcagcatcattgtcacgccctacgatatttatgcggccgcccgcctggtcagccagtcggccccggtgcggcatttcatgcgggtgaaagacctgctcaagttcagcgtcaatacgcccatcgaggacgcccgccgtgtcatggccagcgtccgccaccgctatttccccatcctggacaataacggcaaatactgcggcgtggtttcccgtcggaatttgctcaacctgcaccgcaagcagatcattctggtggaccacaacgaaaagacccaggcggtagacggcctggcccaggcggaggtcttggagatcatcgaccaccatcgcatcggcacgctggagaccaacacgccggtgtatttccgcaatgtgccggtgggctgcaccgccaccatcgtattccagatgtttttggaaaacgaggtggatatccccaaaaagattgcgggacttttgctgtctgctattttgtcggacacgctgatgttccgttcgcccacctccacgccccaggatgagcaggccgccaacgcgctggcccgcattgcgggggaggacatccagacctacgccgagcagatgtttgaggccggcggcgatctgaccggcaagacggcggaggaagtgtttgtctccgacttcaaggtgttcagccgcggcgatgtcaagttcggcgtgggccagagcagctatatgacggaaaagtcccgtgcagcggccgaagccctggtcggcccctacctgccggaagccgccgcccatcacggcctgcccatggtgttctatatgttcaccgacgtgcagaagcagagcaccgatctcatgttcaccggccatgacgccgaacggatcgtgcgcgcagccttccatgtggagccccgggacggcaaagcggttctgcccggtgtggtcagtcgcaaaaagcagctgatcccgccgctgatggcagccatgcaggaactgaccatgtgatgataaaagagggatggatatatgatagaaaagcaaagtaagcgactacacctgccggtagagctgtctgtgggggcggtgcttctgctttgcgccgtgttggcggcatataaactggagctaaacggaccggttataccggttcttggtgcggttgcgtccgcgtggttgtaccggaaagaacgggaaaatccttcggtcgtgcgagcaaaagtcgtcggcgcaatttattcgctgctggtttcgctggcaatcgttataggaaaggatgtgcagttctccggagggatgcgtgacggtcccgatgtgaactatattgcctggggactggattctgtcgttgcggcgttggcgcttgccgttttgctgtatcccgcggttacagccttgctgcgcctgactgtacggttccgcattccgaccgcggcgacccgcaccccggacaataagatctttttgattatgtggggactgatttttatctgctggatcccgtatttgctgaccttttatccggcaggtatcgtgggggacggagccctcaccctggaggaagcgatgacgccgggggtcccgaacagcaaccactgggtcgttctgtatatcctgacgctgcgattctttttgtggctggggagtttggtcaaaacggatccgcatttcggcgtattcctgtacgcactgacccaaagcattgtatttgccgcgacttgcgcggcagtttcctataaattgtggaaagtaggggcgcctcgctgggctgcctggggatgtgctgccatgtatgccatttccggattttttgcgtcctacggtatggcggtgtggaaagacggcctgttttcggcgggtgttgtctatctggcaattcagctttgggaactgccgaagacgcccggatggaaaccgtgtctgaaatttgcgcttacagccttgttcctgtgcttctggcgcaacaacggcgtacacgtcctgatcctttgccttttggcagtgttgattttgctgcgccgccaggccaaaagaatactggcctgtggtttggcggtcgtggtaggcaccatggtgatacagggacctgtatatgatgcgctgcaaattcaaaaggacagtttgaccgaatcgatctcaattccgctacagcagctagccgctgtgatctgttccggggaaatactttccccggaacaagaaagagttctatacagcattctgccgaaggaagagtgggttgataaatatagccccacactttctgatgatctgaaaggaaatgcggagatcaacagggaatatctggaagaaaatttcggggatttcttgaaagtttgggcgcagttgctgccgggaaacttcggaacctatgttgaggcctacctgatgcagacactgggattctggcagcctggagtatttggcgggaattacagcgattattggatcggaatacaggattccgcggaccgcggctggcatattaccgattggccggatgtactcacaggacattccattgcacagccgctccaacgccgtacggcatatgtcccctcgggaacggcagtgtggatcatgctgctgtcggccgcactgctgatcggccaaggcaaatgccggcgcagaatgctgaccctggcgccgtttctggcaggctgggccgttattatggtggcggtccccattgcctattcctatcgctatatcctgatggtcgcgattggcctgccgatcatatgcgtgcttccgttttgcccggagccggatatcgagaatggtaaaaaagctgcggcagttccagatgccgcaaagtgaactggaacctgatacagcgcagcattttgcatcataacctataaaagaaagcacacaaccccatgcaaaaacaccccgcccggggccgagagaggagccgaaggaccatgacgcagcccggaaaaatagccgtgcttaccgattccaactgtgatctgccgcagcaatacttcaaaaagtattccattttccgacttccgctggtcgtgacctgcggcgggaaagactaccgcgatggcattgatattacggtggaggaaatctaccgccgccagcccaacgaggatttcaagaccagcctgcccatgcgcgacgacatcgacgcaacgctggacgccattgcccgggcgggatacacgcaggtgattgttctacccctggcggaggtcctttccggcactgccaatcagctgcgtctcattgcacgggaacgcacggacctggatatcgcggtgttcaacacaaaaagcgccagcgtgggcgtgggaatccaggcggtgcaggtggcacagtatgccgcggccggaatggagtttgaacagctcaaacgcctgaccgcccagctgatcgaggacaccaccgccatgttctccattgataccctggaatatctgcgccgcggcggccgcatcggtcaggtcacggccattgcgggggcacttttgcagatcaagcccatcctgatgttcgacaaggagggcgtcatcaccacggcagccaaggtccgcggccgggcggcggtgcaggcaaagctgcttgagcttgtggaaaagatccgggacgatgccccggtgacaccggcgttcaatttgatcgtctgcgacggcggcgtgccggaggaaggtaaccgcctggaggagcagctgaaaaaacgtctgccgggctgtcatcagatcattcacggcagcctgagcgccacgctggcggtacacctcggtcccaatctgttgggggcgggcatccagctgctgcgcaccactccgccgccccttgactaaagaaattcaccaccataccagagggaggtcctgtaatgtcggatgtcattgcgcccacgccggagcagatgcgctacctgcgcgtgctcgcagagaaataccccaccatcgcggcggcgtccagcgagatcatcaacctggaggcgctgctgcgtctgcccaaaggcaccgaacattttatgagcgaccttcatggtgaaaacgaggcattcatccatatcctgaacagcgcatcgggggtcatccgggaaaagatcgacaccgtgctgggggacagcgttcccgatgccgagcgcgccgaacttgccaccctcatctactatcccaatcagaagcttcccgaactcaaagcgcggcaggaggacctggacgcatggtaccgcaaaaatctgctgtggctgatcgagttgtgccggttcgtatccagcaaacacacccgcgaccatgtgcgcagctgcctgcccgccaactgcgggcatatcattgacgagctgctccatgcccattttgaggaccacgacaaggacctgtattacgggcagatcattgacagcatcatccgccatgaccgggcggatgcctacattgttcgcttctgcgaggtcatcaagcgcctggcagtggaccgcctgcatattgtgggggacctgttcgaccggggcccccggccggatcagatccttgaccgcctgatcgagcaccatgatgtggacatccagtggggcaaccacgacgtcgtctggatgggcgccgccgcgggcagccccatctgcattttcaccgtgctcaaaaccacggtggcctataacaatctggccacgctggaaaacggctacggcatcaacctgcggccgctggaacatctggcggaacagctctacgctgataccgacgtccggcgctggcgtccgcatatcgacccgcgcaccacgccgggaccggataccattgcccgcaccgcccggatgcacaaagctgtgacggtaatgatgctcaaactggaggcccaggtcattgcccgaaacccggattttgaatgtgcaggccgggattaccttaatcagattgattatgaagcaggcacggtgcgctgcggaggaaagacctacccgctgctggacccggtgtttcccacagtggacccggccgaccccagccgcctgaccgactttgaggagaaagtcctgcgcggtctgatccgttcctttcaggaaagcgagcgccttcagcggcaggtgcagttcctttacgcaaaaggtgcggtctataaggtgttcaatgggaatctgctgtaccacggtgccgtccccatgaccgaggacggagagtttgcctccgaaacttttgagggtcgcagctattccggaaaagccctgtttgattactgtgaccgccgcgcccgggagggctactttgcggccccggacagtccccggcgtcaggcgggacaggatttcctgtggtatctgtggtgcgggcgcctgtctccgattttcggccgcagcgccatgaccacgtttgagcggctgtacattgcggaccccgccactcatgctgaggtcaaaaatccctattaccgccacatccaataccccgagactgccgacatgatcctgaaagagttcggcctggaaggggagggctgccatatcatcaacggccatgtcccggtacgcgccatcgagggagaaagtcccgtcaagggcggcggcaagatcgttgtcatcgacggtggattctgccgtgcctatcacagccgtaccggcattgcgggctacacgctggtgtataacagccgcggcctgaccctgcgcacccatcagccttttgagagtgccgagaaggccatccgggaggatgaggacattgcctcccgcagcgagcagatctatgtggcaccccagcgcattctggtccgggataccgatgaaggcgcggagaaacgggcgctcatcagcgatctggagcacctgctggatgcttaccaggcgggccttttgcgggaacaggtttaagaaaagttttccgacagagccaatctaatcaagcgttgacagaaaaaagtgactgttaggcgttgaaaaacgggaatttggtgtacatgctgtatactataatcgataaataacgaattgtatttagctttgcaaaaggaacggtgcatcgcaatttcgatttgagcaggaaacggcattgaattttacacttgggatgccgctcaccgccatcgcacaaaagccgtcgaagatgccggaaacgttggtgacatcggggagcaaagcccctgcaagtattgcatttcggggttccgttggattgcgagacgttgcattctggtacagcggtacagacaacggcaggggagggaggacagacggtgggattctggttgtttatgctgttcacggacctgctggtgccggtcatcatgatcgggttcggcggatacttttccacccgcgctccaaaagagatcaatggtttgttcggataccggacgccccgctccatgaagaatcaggagacctggcggtttgcccatcattactccggcaagctgatgttccggtggggctgggtgctgctgcctttgtcggtggcggcattgctgccattctggggacagagcgaggacgccgtgggcatggcgggagccgtgatctgctgtgtgcagatcgttcctctgctgggagtcattgccgttaccgagcgggcactgagacgcaattttgatgacgacggcaaccgtaagtgaaatcccgtggtttctagatgcagaatgaatcagcgcagagcggccgaaaataccggctgtcctgcgctggttttttatgagaaattatgaaagaataaaaagctccccgcaccgtcggaaggtaggcggtgcggggagttttcatgtcccggaacttgctgcgggacgtttcagtcacgaaacgagatcagaagtcaacctcagtgtcgtagtagcagcacttgagcagcttctccatctcttcctgcgacggctgacgggggttggagccggtgcaggcgtcaccgatggcgttcttggcaatctcaggcagacgctccaggaaaacttcctcaggaacgaagccctgctcgcagggatagctgtcggcgccgtactgcttgatgcagtgcgggatgttcagcgcatcgttcatgccgcgcagatgctggatgagcagtgcgaccttctcgtcgtcattggcgccgcccagcttcatctcgtcggcgatcacgccgtagcgctgtttcgcaacggggtccttggcgttgaaagcgatgaccttgggcaggtacatggcattggcagcgccgtggatgatgtgtgcaccgtagtcggcaaacgccgcgccggttttgtgagccatggagtggacgatacccagcagagcgttggagaacgccatgccggccaggcactgtgcattgtgcatggaatcgcgcttgtccatgtcgccgttgtaggaatcgatcaggtccttctggatcatgcggatggcaaagatagccagaggatcggtgtaatcgcagttggcggtggagacatacgcctcgatggcgtgggtcatggcatccataccggtgtgagccaccagcttcttgggcatcgtctcggccagatcggggtcaacgatggcgacgtccggggtgatcacaaagtcggcgatgggatatttgatgcccttcgcgtagtcggtgatgatggagaacgcggtgacttcggtcgcagtgccggaagtggagggaatcgcacagaagtgagccttcttgcgcagcttgggaatgccgaacaccttgcacatatcctcaaaggtgatgtcggggtattcgtatttgatccacatggccttggctgcgtcgatgggggagccgccgcccatggcgacgatccagtcgggaccaaactcctgcatgacagccgcgccgcgcatcacggtatccaccgagggatcgggctcaatgccgtcgatgatcttgacttccatgccggcttcctgcagataggagaccgcgcgatccaaaaatccgaaacgcttcatcgagccgccgcctacgcagataacggcctttttgccttccagcgttttcagcgtttcaagggaacccttgccgtggtacaaatcccgggggagagtaaatctggccattggaataacctcctgactttaggcgcattatagtgtcgccgttcggtgcgctccgtttggaaagcccgtgcggcgcgcctggtaatgtaaatacagaaacgagcttgacaaaaaactgtcaaacgtttctacagtcagtataggcttctccggggggaaagtcaatggcggtaaatgccaaaaaaaaccggaccttttacagcaaaatgacggaagcttttgacccgctccgcggcggcatccggcctgcggctttccaggcagctgcacggctgtattgccggtgtttctgataaggattgccaaaagaaaacaagcgaaaaataacgaatatacgataaagtggtgaaaaatgtgctgagacgctgaagcacccggaaaagaaaccggccgggccggaaccggaatcacgaaacgcccggatgtcggcacggaggagccgccccggcagcaagaaaaacggagtaattcatgagaaaagcctggcttgatgaaagcagggaaaagagcagcaaaaaagggcgggcgccggtttcccgacgcccgcccgaagcggtaacagatgaagttatttggtgccgaagatacggtcgcccgcgtcacccaggccggggacgatatagccgttatcgttgagcttttcgtctagagcgccgacatagatgtccacgtcaggatggttggcatgaagggtcttcaggccttccggagcagcgatcaggccaatgaacttgatatggcgtgcgccgtgcttcttgatctgggtgatggcatcggaagcgctaccgccggtagccagcatgggatccagaacgatgacctcgcgctcggcaatatccttggggagcttgcagtagtattccaccggctgcagggtctcctcgttgcggtacaggccgatgtggccgaccttggcggcggggatcaggttcagcatgccgtcgaccatgcccaggcctgcgcgcaggatggggaccagcgccagcttgcggccggccaggaccttggtacgcgccaggcagatcggggtctcgacctcgacttcctcggtgggcagatcacgggtggcttcatagcaaagcagcatggcgacttcgctgacaaggtcacggaactcgcgggtgccggtgtggcggttccgcatcaggctgatcttgtgctgaatcagaggatgatcgacgatctctacaacgctcatagtggtgactccttacatcgcaaagtttggcatccgcctgccggtcggctgcggacggctcggattatcaatgccctgcacgcgcaggaggaatacaaaccaaaggctcagcggcgctcgtccagcgcggtgatcttttccacgcgggcctggtggcgctcaccctcaaagggagagtccaggaacaggtcgagcagctggcaggcaaggccggggccgacaacgcgggcgcccatgcacaggacgttggcgtcgttgtggcggcgggtgtactcagcgctgaagctgtcgctgcagcagcaggcacggatgcccttgaccttgttggcgcagatggacatacccacgccggtgccacagcaaagcacggcaaaatcgcactcgccccgggctacggcctcgcagggaggcacggcgcggtcggggtagtcgcagcgcgaaccatcgtaagaaccaaaatcacggtaggggatgccgcgctcttccaggtgctggcgcagggtctccttcaatgcaaaaccggcgtgatccgcccccagggcgacgggcttcatgggtgctgtcataatgaactggctcctttttcaacgttttgggcctctctctcggcgcgctcgcgctctgcctgactcaaacgcaggtagtcgggcatcaggcgggcgggggatacacagaggccgtttttccacatttccctcgcagcaagcgcggcacctgccgcccgtccgacgcgcagcgccgggggacagggcaacgcctgcttatacacattgtagcacaatgcggccccgtcgccaacaaaaaatacgctttttttacagcggagggcaaaatctgcggcttcttccaccggagcagccgcgtcgggggtcagccgttcgtgggtttccaggtcgaacgcagcccagtagacctgtccgcgccgggcatccagcgcgcagatcaccacaccctgtccggtgtggcagcgggccagcgcctccagtgtggaaacgcccgcacagggcgtctggcggggaagggccatgcctttgacggcggaaaggccgatccgcagcccggtaaagctgccgggccctgcggtcacggcgtacaggtcgatgctgtcggggcgcaggccggcggttttcagggccgcgtcgatcatgggcatcagggtctcgctgtgggtcaggccgcagttgcagaccgtctcataaatcagggcatcgtcccgcatgagtgccaccgatgccgaacgcccggcggtatccacggctagaatattcatatcggatcatacctcctgactgcatcagcgggcgttcacagcccgttgatggtaatgcggcggtcatccgccccaaggtgctcgatgcagatggtcacggggtgttcccgctcaatgatgtcggcgcagttttcgctccattccaccgcgaccacggcccccatgtccaggtagtcatagaacccggcggcggcaaggtcggtctcggtgtggatgcggtacagatcaaaatgggcaaaaggctgcggcccgcggtaataattcacaatggcaaaggtgggactggagacggggtcggtgcagccgagaccctcggcgatgccctggcacatggcggttttgcccgcgcccagtccgccggtaaaggcgatcagggtgcccggtgtcaggcgggacgcaagtttgcggcctagttccacggtttcagcgcggcaagaggtcatatattgttccatacggcgcatactcctttgtgtgacgatgccattttttggcggcaatgcaaaatgcgggcatctgaaatcgttttattatacaacgccgcgcgggttttgtaaaattttcgtgcctgccttttcggcaagggcgaaaaacagtataataatactgggtttttagacccggctgcaaatttgcggaaaggaggagcgcttttgttcagactgatgcgccgctatgcggccaggaccgatatgccgtatctggtaatgtgcgggctctgctcggtcatcagtatcgttgtgctgatgagcgtgggacaaagtcagttgggcggctccaacaataaggcttctgtgcagctgatcgccagtcttttgggcataatgcttgccatcattgcttccaccgtggactaccgcacccttgcccgcgcctggccgctgcatgctgtggtcgcgtgggggcttgtggcgcccaccttgtttctgcataattaccgggccgggttcctgaccatcggttatgacgcgggcggcacctccaattacagctggtaccgtgtgggcggcatgaccttccagcccacagagctggccaagatcagctttgtgctgacccttgcctggcatctggaacgggtgcggggcaaagtcaaccgccccctcaacctgctggggcttctggtgcatattctgctgccggtggcggccatccacattcagggcgacgacggcaccgcgctggtctttctgggcatcggagccatcatgctgtttgcgggcggcctgtccggctggctcattgccggggcgggcatcactgcggtggcgggcggtacggcgcttctgctgctcaaaccggatatcctgaaaggataccagttcaagcgcatcctggcggtactcaaccccagcgatcccacacttgcggatttcacctaccagcaaaacaaaggttccatggccatcggcaccggcggtctgaccgggcagggtctttttaccggtgagcatatctttgttcccaacgcctggaacgactttattttcagctacctggccaatgcgctgggttttctgggggcggccgctgtcctgctgctgctattcggcattgccgcccggacgctgcgcaccgcctaccgcagcaccgatgctttgggccggtatatctgtgtcggtatttttgctacgctgttctggcagtgtgtcattaacctggggatgaacctgcagatcctgccggtcatcggcgttacgctgcccttctattcggcgggtggttccagcgtggtgatgatgtacctgtgtgtgggcctggtgctgagtgtatccctccataccagacggaccggaggactggcggaatatgtggactgacagccgcgccaaaatcacaacaaaataaaacggccccggtacgaggtcccggtgcgggaaccccgtgccggggccgtttttgtgtgcctgtatccgattacagcttttttatcattttgacgtgagggacacccgcctccataaatacatcggataccgtgcggtagccacaggcaagatagaacccctccacgcggaacttggcatccagttcaaactgcccggcctggtcacggtagaattcctccagggctgccagcaccgtccgcccaacgccatgcccgcgcaggtcggacaggatgcagaaccgctgcaagcgcaccacccccggcgcgggaaacacacaccgcagtgcgcccgcatcccggccgcccagccggacaaggaaatgttcgcagccggaaccgagagcatcagcggcgtcacgttccatggtctgcgggatgccgtattctttggtaaacaccgtactgcgcacggcgaggcaggccgacagcagcgcttcgctgcgtgccgggatcagggcgaccccatcagacggggcggaagacggggacaaaaaagattcggaaaacaaaaggcgagacctcccttttgaaaatatataccggtgtgccgggcgattccatgggcacacaaagccgtggaacgcggacagcaaagcggtatctggcgtgctggcgaggggcaatctacggaaagagcaagcgttcttctgccctgcatctgccccgcggcatcggttttatgagaatctttggttattccatatcgcagttcttgcgagacctttctgttctcatgcagtgcgcgctttatgcctgcggtatttcaagaaaaaagtaccattgcaaaagtactttcgtcaagcagggcggcgcagaatatcgaaccgggccgaaaaataggggatgagagcttattcaaaaaagtttacattttattcacgcgttatccctttgacggcgcggccaaaatacggtatgatagaagaaagttcgctaatgaactgttttgcgcggaggataccgatggaccgggaatacgatctgctatatatggggcacaagatacgccgcatactggaacatgccagtatggacctgatgcaggccagcggtctgcgtcatgtggaactggagattctgttctacctgcttcacaacgtggaaagcgacacggcccgggacatcagcgaggccaagcacctgtccaaagcgcatatctcgaaatcggtggacaacctgcgtcgaaccggctgcatcacgttgacggaggattccgccgaccggcggtgcctgcatctgggcctgacagaaaagggccggtgcctggcagccgactacgaaacgatgatgcacaccgtggtcgagcagatgatgtctggcgttacgccggaggaacgggagggtatgcggagcgtactgtccaaggtccggcgcaacctcgatgaggcgatggcctgtcatgaatgtcaggcgtcgcaaacggaggaaaaagcatgagatcgatcgctattgagagagagttcggcagcggcggacgggagatcggccgtaaggcagccgggatactcgacatgccgttctacgacggggaactgctgctcagcacggcggagcgttccggcctggacgtgggccagctccgcaactttgacgagcgccaggcaggcagcctgctgtttgaacttgcgctggcaaccaatcccaatccgtacagtgcgcgtacccatctgtatgagatgttcgaggccctgcaggggaccatccgccagctggcgcaaaagcagccgtcggtgttcatcggccgctgctccaccgaggcgctttcgggggaaaacggtccccgggcgctgcgggtgttcatctacgcatccgaccaggaccagcgctgccgcaatgtcatggcggcggagaaggtgaacgagcaggaagcccgttatctgatgcgccgccgcgataaggagcgggaacagtacttccactatttcacccgcaaaaactggggggacagggcaaactacgacattcagctcaacacttccgtgctgtccgcacagcagtgtgtggacattctggtggacctggtccgcaaaatgccgtaaaacaacttcataacaggaaaaggaggccgctatggcaaactatgcagagatcgaacgcgaagcgaaaatctacctcgaccaatgcgtccacaacgatcggattgacccggcactgttcgacaaatacggcgtcaaacgcggcctccgggacaaggacggcaaaggtgtcctgaccggcatcaccaacatttcccgtatcgacgcattccagatggtggacggcaaaaagactccctgcgagggcaaactgtggtaccgcggctataacgtctacgacctgatccgcggcctgcgcggcaagcgctttgcctttgaggaagccgcctatctgcttctcatcggtgatctgcccaaccccaagcagctggaagagttcagcaacgtcctgaccaagtgccgggacctgcccaccaacttcacccgcgacgtcatcatgaaggcccccagcaaggacctgatgaacaccctgacccgcagcgtgctgactctggcctcctacgacgataccatcggggataacgacctgcagacccagctggagcagtgcatcaagctgatcagcgtgttccccatgctggcggtgtacggctaccatgcctataactactatctcaacggcgagagcatgtacattcaccgcccgcagcccgagctgtccacggcggaaaacatcctccagatgctccgtcccgaccgcagctataccgacctggaagcccacgtcctggacatcgccctgcttctgcacatggagcacggcggcggcaacaactccaccttcaccacccgcgtggtcacttcctccggttcggatacttactcggtcatggcggcggcgctttgctccctcaaaggtcccaagcacggcggcgcaaacatcaaggtcgtggagatggtcaaccacatccgtgagaccgtccacgatgagaccgacgaggacgaggtccgcgactatctcagccgcatcctggacaagcaggccttcgaccgtaagggcctgatctacggtatgggccacgcggtctactcgctgtccgacccccgtgcggtggtgttcaagggctttgtccagcagctggccgaggccaagggccgcaagaaggatttcgacttctataatatgatcgagcgcctggccccgcaggtcattgcggacaagcgccacatctacaagggcgtcagcaccaacgtggacttctacagcggatttgtctacaacatgctggacatccctctggaactgtatactcccatctttgccattgcccgtatcgtcggctggagcgctcaccgcatcgaggagctggtcaacgtggacaagatcatccgccccgcttacgagagcatcatggaaccccgcgcttacatcccgctggaagagcgctgatcctttacaacacacgccgccccacagcccggagaaccctccgggccgcggggctttttgtgtttggaaacaacaaaatacacaatattttttgggtgaaagtggataaaatacattgaaatatttgattgaacaggctatactgggttcgtatgatgaatcatcccggcaatgccgtccgcgggaggaagcgaccctatgaaaaatatgtatcaggccgcgcggcatcttgtctggctgacgcagttcgggctgtccatcgcggtgccgctggtggtcagcatcctggccgccgtctggctgcaaaagaactttgccctgggcggctgggtcatcgtcgtgggcgtcctggtgggcgcgttcggcgcagtaagcggccttgtcacctcgctgcgggccatggaccgtcaggcaggggagcgggaagaccgcagcaaaaagccgccggtctatttcaatcagcattaatggggcatactgcccatggggaggaactccatgcacaaatatcgtgatgtactcggccaggtaggcaggctggccgccgtggaggcggtctgcgttgcggtgatcctggcagtgtatttcttcctgggcggactggacgccaaggttctgctgggcgcccttatcggtggggccatgtcggtgggccattttctggtgttgtccatcaccgtgtccaatgccctcgaccgcgccaaggatgaagaggaagccgcccatgtccgggtgtccattcaggcttcggccagtatgcgcctgctggtgatggcggtcatccttattgtactgtttaaggcgggtatctgtgatcccgtggcggcgctggtgccgctgctgtgcgcacagcttgccctcaaattcatcggatttttccagggcggaaaggaggaaccccggtgacaggaccgaaaatttattttaccatcccgctgttcggcggtattcccattacccagacgacggtgtcgtcctttgtggtgatggtgctgctctgcattgcgggcatctgcctgggacgcaacctgcaaaagcgccccggccgccgtcaggtgctggtggaaaagggcgtcactgtgctgtatgacatggtagccgacaccatgggcccccataacctgtactggacgccctacgttggtgcgctgttcctgtcgtcgctgttcggcaccctcatcgggatgaccggcatcctgcgctcggccacggcggacctttccaccacgctgacctgggcgctcatgaccagcgtgctgtgctgggcctgcggcatccgtgccaacggctttttcggctggctgaaaggtttctcggaacccatcgccgtcatgttgcccatgaacatcgtctcggagattgcccagcccatctccatggcgttccgtcacttcggcaacatcgcgggcggcggcgttcttaccagccttttgtataccgctctggcgaccctgtcggcggcagtgctgggcctggtagcccagagcgttgtggcggcagtcatcatcctggtaatcggcatcgcgctgtttgcctggggcttcaaggctcacaaactgatgcgcaagatcttcggcgtggttttcgccgtgaccggacttctggcactggcgggactttccggcgtgccgtacctggaagtaggcatccccggtatcctcagcctgtattttgacgtcttttccggcggcgtacaggcgctggtgttcagcctgctgaccatggtatatatcggcaacgcctgcccgcccccggaacctgccaagacggccggtgaataacacaaggaattcaaatcgttccgacgattgaagataaaataatgatcccccaaaacgatcaacgatatggaggcaacgaactatggaagaagcaatcgtaagagcggcctgcgcactgggcgctggtctgtgcatgggtcttggcgctatcggccccgccatcggcgaaggcaacgccgtcggtaaggcgctggagggcatgtcccgccagcccgagaccatgggcatgctgcgtaccaacatgatcctgggctgtgcgatcaccgagtccaccggtatttactctctggtcatcgccctgctgctgctcttcgtattttgatgagccgcacttggaactcgggaaagagaggagtgtcaggacttgtcggattttgagagctttgtcggcgtaaacccgtggactgcgcttttcaccttctgcaacatgatgatcacctttctggtgctcaagcattttctgtttggcccggtgaaaaagatgatcgacgaccgccagaaggagatcgacaccatgtacgccgacgccgatgccgcgaaacagcaggcccttgcgctggaacagcagtaccaggaccgtctgcgcgacgtccggcaggaaagcgacgccatgctgcgcgacgcgaccctccgcgcccagaaacgggagcaggagatcgtggatgcggcccgtgcgtcggcccgtgccatgcgtgatgcggccgaggccgacatcgaacaggaaaagaagaaggcggtcaacgagctcaaggatgagatcggcggcatcgccatggacattgcatcccgtgtggtcgagcgcgagatcagcgagcaggatcaccgcgcgctgatcgacgagtttatccggaatgtgggtgacgcatcgtgacagaacaggcaaaacgctacggcggcagcctttttgaactggccgccgaggaaaacctggatgaccgcattctggcggaactggacggcgcggtgtcctgctttgcggacaacgaccaatatttccgtctgctggctctgcccagcctgtcccacgccacccggcgggacctgctggacgaggcctttggcggtcaggtccatccctatgtggtcaattttctgaaattgctgtgcgacgagggcatcctgcgggaactgcccggctgtgcccaggcttaccgggactgctacaaccaggcgcacggcatcctgcgtgtgcaggcggcgtcggcggttcctctggatgaggagacccgcgcccgtctgaccgaaaagctgaaacaggtcacgggcaagcagatcgaactgaacgtgaccgttgaccccgcgctgctgggcggcatccgtctggatatggacggcatgcgcctggacggcacggtccgcgcacgcctggacggcatccgcgccgggctggattccctcacattgtgaggcccccgcgcgggaatgcgcatactttgcaactgatacagtgcaactgaaaagattgagtggtgaatcgtagacgtgcagatgaaacctgaacagatctcccggatcatccgggcgcagatcaagcactacgccaatgccatcgagcaaaacgagaccggcgtcgtcaccatggtaggcgacggcatcgcgcgcgccagcggcctggacaaatgtatggccggtgagctggtgcagtttgccaacggtgagtacggcatggcccagaacctggaggagaactccgtctccatcgttctgctgggcagcgacgagggcatcagcgaaggcggcgtcgtcaaacggacgggccgcgtcgtgtcggtgccggtaggcgatgccatgatcggccgtgtcgtcaatgcgttgggccagcccatcgacggcaaaggccccatcacggcggaggaataccgccccatcgagtccccggcccccggcatcctggaccgccagccggtcaagcagccgctgcagacgggtatcaaggccatcgactccatgatccccatcggccgcggccagcgtgagctgatcatcggcgaccgccagaccggcaagacgaccattgccacagacaccatcctcaaccagaagggcggggacgtgatctgcatttatgttgccatcggccagaagcgttccaccgtggctaccctggtggaggaactgaccgccgccggcgccatggactacaccatcgtggtgtcggccaccgcgtcggagctgtctccgctgcagtatatcgctccctacgcgggctgcgccatgggcgaatacttcatgcacaagggccgtcatgtcctcattatctatgacgacctgtccaagcacgcggtggcttaccgtgccctgtcgctgctgatccgccgtcctccgggacgcgaggcttaccccggcgacgtattctatctccattcccgtctgctggaacgcgcggccaagctgtccgacgccaagggcggcggttcgctgacggcgctgcctatcatcgagacccaggcaggtgacgtgtcggcctatatccccaccaacgtcatctccatcaccgacggccagatcttcctggagaccgagctcttccactccggcgtcatgccggcagtcaacccgggcatttcggtctcccgtgtcggcggcaacgcccagatcaaggccatgaagaaggtcgccggtactctgaaactgatctattcccagtaccgcgaactgcagggctttgcccagttcggctccgacctggacgccgacaccaaggcccgtctggctcagggcgagcgcattgtggaagtcctgaaacaggaccgcagctccccggtgccggtggaaaagcaggtggctattctgtacgccacggtgcgcggctatctggacaaggtcgccgtgcccgacgtcaaggagtacgagcgcggcctgtatgaatttttggattccaactcccaggcctgcggcgtcatgcaggagatccgcgacaccggcgcactgtccgaggacgcggacaagacgctggccgcagtgctgacggagtacaccgatgcctttgtcaaggcacgataatacggcggaaaggaggcggtttgcatggcaggttccatgaaagacatcaaactgcgcatcaagagcgtgcagggtaccatgcagatcaccaaggcgatggagctggtggcgtcctccaagctgcgccgcgccaaggagcgcgtggagcacagccgcccgtattttgagacgctgtaccatacgctgtatgacatcgccgcggcaaacaccgagttccagagcccctacctggctcaccgggagaccggccgcacctgctatatcgtcatcgcaggcgaccgcggcctggccggcggctacaatgccaacgtgctgcgctgtgccgctgccgacgccgagggtaaggacatctgtgtgctgcccattggccgccgcgccgtggagcactacgagcgccggggcgttcccattgtgagcaaggcctttgagatggcaggggagctgtcggtcagcgactgctttgaggtgtcccggatgttgtgcaagctgtatcttgccggcgagatccgggagatccgcatcgtctttacccagtttgtctcaatgctgacccagaccgccatggtattgccggtgctgccctttgacgtgccgcgcaccggcaagggaatgccgggccgggagatgattttgtacgagccggacagcgaaaaggtgttcgacgccatcatccccgaatatctggcaggcgttgtttacggcgcattgtgcgagagcgtttccagtgagctgggcgcccgccgcacggccatggactcggccaacaagaacgcagccgatatgatcgagcggctgaatctgcattacaaccgcgcacgccaggcggcgatcacccaggaaatcaccgagatcgttgccggcgccggcgcggattgacccaaaccatttgacaaggagttgtagcccatgtcggagaaaaatatcggcagcgtggtgcaggtcaccggcccggtcctggacatccggttcccggaaggcagcctgcccgccctgctcaacgccatcgagctggacaaccacggcacccgtctggtggccgaggtggcccagcagatcggcgataacgtggtgcgctgcatcgccatgagcagcaccgacggtatggtgcgcggcgacaaggcggtggataccggcggacccatcacggtccctgtcggcgaggaatgcctgggccgtgtctttaacctgctgggcgagcccatcgacgagaagcccaccccggaaggcctggagcgctggcccatccatcgtcccgcccccggctttgacgagcaggagggcgccaccgagatcctggagaccggcatcaaggtcgtggacctgatctgcccctatgccaagggcggcaagatcggtctgttcggcggcgccggtgtcggcaagacggttctgatccaggagctgatttacaatatcgctacggcgcacaacggatactcggtctttaccggtgtcggcgagcgcacccgtgagggcaacgacctttacggcgaaatgagcgagagcggcgttctgagcaagacggcgctggtctacggccagatgaacgagcccccgggagcccgtatgcgtgtggctctgtccggcctgaccatggcggagtacttccgtgacgtcaagaaccaggacgtgctgctgttcattgataacattttccgcttcacccaggcaggttccgaggtcagcgcgctgctgggccgtatgccttcggccgtcggctaccagcccaccctggccaccgagatgggcgctctgcaggagcgcatcacctccacccgcaagggctccatcacctcggtgcaggcggtctacgtccccgcggacgacctgaccgacccggccccggccactaccttcacccatctggatgccaccacggttctgagccgtgagatctcggctcagggcatttacccggccgttgacccgctggaatccaccagccgtatcctcagccccgaagtgctgggccgccgccactacgatgtggcccgtgccgtccagaaggttttgcagcgctacaaggaactgcaggacatcatcgccatcatgggtatggacgaactgggcgaggaggacaagctgaccgtcgcccgtgcgcgtaaggtgcagcgtttcctgtcccagagcttccacgtagcggagcagttcaccggcatgcccggccagtacgtccccctcaaggagacgctgcgcggcttcgaggccatcctgggcggcgaatgcgacgatctgccggagagcagcttcctgtttgccggcaccatcgacgatgtctacgcaaaggccaagaaataatccggcttagggaggtagcatatgggaacgtattccctgaaagtcgtgacgccggacggctgtgcttttgacggccaggcggagcgcctggtctgccgcaccatcaccggcgatattgccattctgcccggccactgtgattactgtaccgctctcggtatgggagaggcacatatcgtgatggaggacggcaccacccgcagcgcagcctgtatgggcggcctgctcagcgtgctgaaggggcagacccgccttgtggcgaccacctgggaatgggcggacgagatcgacgtcgcccgtgccgaggctgcccgtgcccgtgccgaagaacagctggcccgcaaggacctggatgaccgggaactggaactggccaaagcccgcctgcgccgcgccctggtgcggacttcggtggcaaagtgaccggtcctcaaaagggtttgaacgaatgaaacaaggcccgcatctcacgaacgagatgcgggccttgctttttgacttgatttggggaggaagattcctcaatagaaacgtcggacacgaaaccggtgcaacggttcttttcccggaaagggaataccgcgttttcagatccagccgtgggcggaaaaggcttttgccagaccgtcctgatcctggggcaggcatacctcgtcggcaatctctttcaggcggggatcgccattgcccatgcagatgcccagcccggcggtctccagcatggtggcgtcgttcatgctgtcgccgaaggctaccgaatcctcgatggggataccccaatggcggcacagtgtcctgactgcggcgcctttgctgaaatcccggtggatcagttcgccgttgatcatgccgaactggtctttgcccatcacgcacaggtcaaacgtatcggaaagagcctgggcgggaccttccagagctgcttcactcgccgccacaaaggtcagcttgtaggcgggcgtgccgggataatcggcgatggtaagcccgggatcgtcctgcacatggcgggcccatcgggcaagctcactgttggagccgcgctgtgcacactgcatcagcaatgctgcaaatccggggctgctgtaggtgtcctcccggcattcgatggtgtattccacaccggcccgggaaagaatgtcggctgtcttttgaaggagcggcagcggaaggctgcggtcaaacaaaacctctccgtcgcaggtgatgcggccgccggcgctggataccacggcgtcaaaatcatagcgaagcagcggtgccagcaggcattcgctgcgtccggaacacagcacaaggcgatgcccgttttgccttgccaggcgcatggcgcggcaggcagaagcaggcggttccataccacccggctcggtcagagtgccgtcaatatccagaaaaaatactttttgcggcatgttgttctcccccttttaccgggattgtatcatacagaatgggaatgttgcaacttgtgcttgcgggcggtagggtgatagaataaaaggcaaacaacgatgaccggaaaggagaaacaagtgaacaaccggcagcgcaatatcatctggtatctgaccctggcggatggtccgatgacttccgacgaactggcgcgtacgctgggggtcagcagccggaccatcaaatcggatatgacatcggtggtggcacaggaactggaagccaacggtgcacggctgatttcccgccgaaaccgcggctattccattcaaatcatcgataatgaaaaattccagacactctataccctgatcagcatgaaaaccggccgtttttctgccgtcaatgaggaagaacgcctgctttacattgcgcgcaagctggtcggttcccagcagggcgtgctggtggatgaactggaggaggacctttacctgacccgcagtgccctgcgagtacccctgcatgaggccatccgcttttgtgagagctttcatctgaaaaccacgtcggccattggacggggcctgcgggtggtaggggaggagcatctgatccggatcgcactgaccgaactgtttgaactgcattttcataaagcggaactggacagcgtcgatgaggaatatgcgcagtgggtcggctgcgagtatcaggaacgccaggacatccgccatgcctttttgaaggtgctgcgggaaagcacttttgccatgcgggacagtgtgacacagcgtattgccatgtatctgatcattgcccgcaaccgccgccgtgcaggactgcgcattgcgctgcccgcgtcctggatcgccgaggtgcgcgccctgccgatctacgccctggcagcacagatttatgacgtgctgcacagccagtttgaaggctacgcaatggataccgccgagatctgtttcctggccatttatatgctggcaaacctgaacccggatctgcggcgcgacccgaaggaaacggctcccatgatcgcgtcactggtcaagcgcacggcagaagatatgctgatcgccgtgcgtgcggaatacggcagtgacttggctgcgctgccggatgcccagccgctgctggagcaggttattctgcccatccttatcggagcacgctacgggctggacggacaccagtgctttgactacagctacgaaaattcgtatttgagcatgcctttggagatgcactatgcccggcttctggccggggaactgtctgcccgcacgggatgcagggtttcggctaccgacctctcggtattgtcctgttatgcggcggggttgctgcgcggggtgcagtacccggtgcggccgctgcgcattgtggcgaccaactccatcgggatggagttcgcacgcattgccgctgcggatctgtggaggacatttccgcgtctgattgaaaaaatcatacctgcggagctgtatgagatccgtgggatggacctgtcaagctacgatgcagttctggcagggctggtcaaacacaaccagaataaactgttcggctataactatgatgcacctgccacaacgttgctgctgacagaatcgggccgcgattatgcccggatttataacgagattctgattcgggcctaccagtttgaaaaattgcttcctgcgccggaaaacattgaagtgaaagaggattttctctattatgatcccgggcaggtatttcagtatttgtgcgcgcgctatgcgaaggaccgtgacagcgcggaaaaactgctgcgccggctgacgcggcggaatgaacagttctccatggcacaacaggggtgcgccatcatctttgcggagtctgcgctgtgcaagtcggaagcttttgcgctgtaccggctgcaaaagcccggattgtgggacggccgcaagattagctgggtcctgtttgtgtgctccaatggaaaagatttgacgcggctgaagtccgccggagcggcactggatatgctgacaaaaaatccggaagaatatgagcagcttgcacaacacccgcgcgaaactttactggaactgctgaaaaagagtgttcgacttttataaaaaccaaaacacccgtttgaacaaaacgttcaaacgggtgttttttggttccctaattaaatgaggaataatgcaaatttcacttattgtaaacaaaaaagggaatggaaactccgctgtttttgacataaactgtcgttgaaagagaagataaagagtgcgaaatctacaaaggaggctggaaagttgctgaaaatctttttatcgtcgcatggacggtttgccagcgggattcagagttcctgctccatcctgatgggccccagcgataacctgacggtgtttgatgcctacgttgacgaaaccagcgtacagcagcatctggatgaattttatcagggtgtcgggccggaagatcaggtcctgctgtgcagcgacttgtacggcggcagtgtgaaccaggtgatgtacacctatctgcagcgccccaacaccaggctggtagccggtgtcaatatgacgttcatgatgaatgtcctgggcgaagaggatggtctgaccgacgaacggctggacgagatcctggaagaaagcagggaatacctgcgcagagtggaactggataatgccggcacaagcgacggcgccgatgagtttttttgatacggaaaggaagtaagacaatggtcaaatgggtacgtttggacgaaagaatgatccacggtcaggtggcgacgaaatggagccggttgctgcaggtcaaccgcatcgttgtggcggatgacacggccgccggcagtgagatcatgcagaaatccctgatgatggctgcaccgtctacctgcaagactgccattgtcacggtggacaaggccattgcactgtgcaacgatccccgggcagaatctctcagcattctgctgatcgtcagcacgccggaaaatctgctgcgtgtcgcccgcgaggtcaagggtgtgccgcagatcaacgtgggcaactatggccggatcgctcccaagcacgggagcgagatgcgcaagacctatcaccccaacctctacgcttatgacgacgaggtggaggtattcaaacaggtcattgccaccgggatcccctgcaacctgcagaccatccccgatgatgcgccgcaggatcttgccaaggttttgggatgagagatcatctgaaataacgcaacacagccaaaggaggaatttttcatgtcaataaccgctgcgcttgcctgtgctgttgtgtattgggtcttcaacctgttggacccgtacctgctgtcctggcaatgtctcaaccgcccgctggtcgtcggaccggtcatcggcctggtgctgggtgacctgaacaccggcattgtgatgggggcttccctggaagcgatcttcatgggcatctccgccatcggcggttccatcccgtcggactgcctgtccggcaccatcattgcggtagcttatgcgatcctggtcggcggcgacggcgccaccgaagccggtcttgcactttcgctctccatcggcacggtcatgtcgtccttcaacagcatgttcacgccggtctgggctgctctcgctccgtattgggaaaagctggcgtcggaatgcaagccgcgcaagttcttcctgcagaatatgctgttcaacctgttgatgggcctgcccggcaccgttgttatcttcctgggcgttgccttcggtattgaaggcctcaacgccggcctggctgcctgccccgcctgggtcatgaccggcctgtccgctgcgggctccatgatgacggctgtcggcttcggcatcctgctgtccatgatctggagcgccgacatctgcattttctactttgtcggctttatctttgccaagagcctgggcctgagcagccttggtattgcggtcatcggtgctgccatcgccctgaccctgttcttcctggaaaagaatatcgtcaacgccaaaaacgcggccgctgctgcgggtcctgccacagtccccggccctgcgaacagtgaggaggatttcttctgatggaaaagagagttttgagtgcagaggaaaacagcgtcctcaaaaaaatgtttatcaagagccatctggtcttttcctgcttcaacatgaccaagatggaagccaatggtttcaccatgaccatggcgcccgccatcgagagcatttacggcgatgacattgagggcaaaaaagccgcatatgcacgccatcaggctttcttcaacacccatgcggtcgctttcgactttattgcgggcctgagctacgccatggagcgtgactgcaaggcgggcaaggtccccggccagaccatcgacgccatcaaggcatcgctcatgggtcccaccgccggtatgttcgactccatcttctttaactgcctgcgcgtcatcggcgccggtatcggtatcggtctgtgcagccagggcaatattctgggcacgctgatctttatcctgatgtacggcgtgatgcagtcggttttgaagtacatcctgctcaagctgggctatacgctgggcaccagcttcatcgacagcatcttcaacagcggcctgatgagcgttgccacccgcagcgcatccatcctcggtctgatgatggttggcgccatgaccgcaaccaccgtcaatgtgccgatgaactgggtcatcaatgtgggcgataccagcgtcgtggtcgcagaactgtttgacgcggtctatcccggcatcctcagcgttggcctggtgctgctgatgatggcgctgatcaaaaagggcaagcgtcctacggtcctcattgtgggcctgctggtcgtggctatggtcggcgcagccctgggcatcttctgatcccgacgggcaatttgtgatccaatagggaaacgccgtgcggcggataagctgacgccgcggcaactgcccggcggagcattcagcttcgccgggctttttccatcgtacaaaccagaacggaaggggataccatctcatgaacctgcgggataccatgatgctctacggcgtaacgctgggaaggcgtctgaccaatcgtcaaaaacagttgttccgctcacagctcaaacaggatctgtccgcttccggcctggaggtgcaggatcaggaatacaacggccggttttaccgtgtgcgcaatgtgatcgcgggtgacctgcagaaggcccgggtgctgttcgtcgttccgtacgacacgcttccccgggcggtctggcccggcggttattatccgttccacccggacctgacgctgcgtgacggccgccgcgatctgatcgtgcgcctgctcttggctgcggcaatgtttgtgactgcatatttcagtgtggccttgctggaggggtggataagctgggccgtggccattcttctgacggcggcggggcttgcgtttttgcacggctgggccaaccgctgcaacttcaaccgcagctcggcatcggtggcggcggccgttcgtctggcggaggctctgggcaaggacggcgatgcggcatttgccttctgtgaccgcgcggcaagcggctacgaaggctatcgccttctggcacagcatctgccgccggtgccctgtgcagtggttctggactgcatagcccatggcgaaaaactggtgctggcccacaccgaaagctgtaccggcagggcacagcggctgcaaagcctgctgcccggtccggtggtgctgcgcagctatgatgcgcagcagagcaagcgcaatctgctgtcgatgtttcccaatggcatggtgctgaccagcggcagcatttgcgacggcgagctcgtcgtacaggggacctgcaccccgcaggatattgagatcgatctgccccgtctgcagaagatcgaatcagcattggccgcctttgcggcacagcaaaatgattgaatgaaggagtgaatgatcctatgaaactgcgttcccggcgtatctatacggagaccggaatgatctccggcgaagtgacggtggaaaacggaaaaatcacagccattgaagaaggagcctgttcaccggatgcggtggattacggcaatgaccgtatcatccccggtattttcgatacccacaaccacggtacctgcgggtattgggcaggcgatggcaaccatacctttgaagagaacgtggcggcggtcaaaggctatctcaagggcctggcaagtcagggcaccgtcaatgtttttgccacgaccatggcacttgacgccatcaccgcggtggctgccgttgccaaggaaggcccccaggacggcgcccagatcctgggcatccacagcgaaggtccctggctgaaccgggtaggcgaaaaaggcatccgcaccggatggccggaagtcagcatggataccgcccggaaaatggtggagaacggcggcggactgctgcgtctggttgccctcgccccggagatccccggcattgatcccatcatcgagtatttcctttcccagggagtaacggtggccgccgcgcacagtgacaataactaccaacaggccatggagggatatgcaaaaggcatcacggtggcgacccacaccggcaacgtcatgaccgacatgcaccaccgggatgtgggcgggctgggtgcagcactgctcaaccccgatgtcatgtgtgaagtcatctgcgacggtctgcatatctgtaacgagatgctccagatctacttccgcatcaaggacagcgaccatttcatgatgattagcgactgcacgccgctgtccggcgcaccggtgggccgctacgcgggctttgacccgggcatgaccatgaatgtcacgccggagggctttgtgctgaccgataccggacgtctgtgcggttccagccagccggtgctgtatgatatcggcaatctggtggaaaaggtcggcgtgcccatggagacctgcctgaaaatggcctgcctgaaccctgcccggaagtatgggtttgccgataccaagggcagcatcgccgtgggcaaggatgccgatctggtggtgatcagcgacgattataaggcgctggagacttattctgccggccgcaagatctatgaccgggcgacggaaggcgatatctacaatgccgattatctgaaggagaacgcactatgaagaaaaagctgatcgtggtggccgatgacttcggtttcagcgaagcctataactatggtgtgatcaaggcatacaaggaaggtatcgtcactacgctttcgctgatgagcaatatgcaggctgccgctcatgcggtacagctctggcgcagcgagtgtccggaagcgcctctggcacagcacaccaactttgtgcagtaccgtccggtcagccgtcctcaggacgtgccgtcactggtggatgaaaacgggatgttctaccgcagctatctctggcgcggggaacggaaagacgaccccaaatgcaagggggatatctatcccaactatgaggacctttaccgggagaccatggctcagctggaccggcataaggaactgaccgggcgctatcccaatcattttgaagggcacagcgccatgacggcccccatgcaaaaagcctttgcagagatcggggaaaagctgcatattcacaatatggcaacgaccgatcaggctcgtcaggggatccgtccggcctgtgagctgctgatgcagggaccggcccgcgactatgccatggacatcctgaaccgcggcagcacgccggaggactttttgcaggatcgttttggtctgctggacagcaagtatgagatcaatgttctgcatttccatccgggctatctggaccagtacctgctggacaatacctcgctgacgctgccccgctgccgcgatctgcaaactttgtgcgatccgcgggtgcgggactggatgcaggagcatgagatcgaactgacagggtttgacgccgtctacgaataatgtcacaaaaggggaggactcaccatgtatgcactgattttcgtggttgcggtggcagtggtggtcactgcgctgcagctgcgccagtaccacgatttccgcaaacgcatccgccttcatgcacaggaaagcggggaggagatccaggcaaccgagctgtcgccgatgcgggtattcggcttgtttgtcccggtgctgatctgtattggagtcggtgcgtatattttggcggtgcctgatgtggtggatcagccccggaattatctgcttctggcagcggtgcttggcattgtgtttgccggcagcgcgctgacctgcaatatgacccagcgcctgtactatacccgcagcggattttttatccgggaagggtttgtgcccttccgggaagtcaaacaggtcgaagccaacggccgcaaggcggacgcgatccttttgcaggacggcacccgctataccattgcgcgccgtcagcgggaagcactggacggactgcgccgcagcggtgtctgccgcctggcaaagcagaagcataagaaataaagaattttccccgaccgatcagacggcctgatatctctcacgacagaaaagccccgcacggatctgataccgtgcagggcttttctgtttgggatgggaatagataaaagaaaaatcccgaacacgaaaatgttcgggatttggtgcggatgaagggatttgaacccacactcttttaagggaactagaacctgaatctagcgcgtctgccagttccgccacatccgcttattttgttccgccgtgacctcatgtcctcggcgcgagtattattatagccgagggggtcctttttgtcaacactttttttgaaaaaaatccaaaaaaataagaaaaaagtcataagtgacggcggaacgtgaaaaaaacttttggctgtcaggaaaactcagggatatttggcggctttgacaaaggcttcaaacagccgcatggatgccggatcggttttgtaggcaaattcggggtgccactgcacacccagaatgaaatgcttgcccggcatccaggccgcttccaccaggccgtcctccgaggtcgccgcagcgcacaggatgggggacagatccttgaccgcctgatggtggtagctgttgacggcgtagtcctgctcgcccacgatctcatacagggggctttcccgctctatggtcacacggtggaccggccggtcgtaggggggcttcatctcatgggcaacgccggggtgctcgctggccagatcctgatacagtgtgccgccggtgtgggcgttgaggaactgcaggccgcggcagatgcccagcaccggtttatccagccggatggcggcatccagcagaatgccctccatggtgtcgcgggcggggcagggaacaccgcatttgtcgctgcgggcttcaccgtacagggcggggtccacatcctgaccgcccggcagaagcagaccgtcgcactcccggataaaatacagaagctcggtcttgtcctgcgtcagcggcagcatgacggggatggaaaggcaggcttccagcgcctgcatgtaccccggcagcatccaatagctttgcttttcttcatcgtacaaaggcacgatgccgatcacaggtctcatggtcaaaacacctctctttatttatatatcctttcccgggccggaagctgatgccccggccatgcaacacagtatagcacaaacccccaaaggcgaaaagataaaattttataaaatggaaagtttgcttgacattttacacgggctgtggtactctggaaatggaaagtggactttacattttgggtaaggccaaggtgaggtgatggcatgaagaaccgtctggaagagctgcgcaaggcgcgcggcatccgtcaggaagaacttgccgatgcgctgggggtatcccgccagaccattggctcgctggaaaacgggcgctataacccgtcgatcctgctggctttccggctggcacgctactttgaaatgagcattgaggatatttttatttatgaggaggaaacccaatgaaaaagcaagtatggtacatcctgctgaccgtggcagggatcgcattgatgatcgcgggggtggtctggcttcgcgccggcgctgaaaacgtagtgccttatctttgcatcggcgtgggtgcagggattttcggccacgggaccggagcctggctgcaataccgggcattgaaagacgcaccggaagcccgccgccggatagagatcgagacaaacgacgagcgcaacgtggcgatgaacaaccgtgccaaggccaaggcttacgatgccatgatctacattttctcggcgctgatgctggtctttgccctgatggagatcgattttgtggcggttttgctgctggtggcggggtatctggccgtgtgcggcatctatgtgtattaccgcgtgcggtatgaccgggaaatgtgaggccctgtaaagaatatcccttgacattttatgccgggcctgataaaatatctaggcaatcgttcagaaggctgctccgttcgcacaggatggcgtatgctggtagccgaaattcgaagattgtgatgagcgcatatattaagtatggctcccgtgatcatgatcgagaaagaggtgaaatgaaatgaaggaaggcatccatccgaagtacgtggactgcaccatcacctgcgcctgcggcaatgtgatccagactcgttctacccgtccggagatccgtgtcgaagtttgcagcaagtgccacccgttctataccggcaagcagaagctcgtcgataccggcggacgtgttgagcgcttcaagcgccgttacaacatgggcaaataacaaagcattttgcggcggtgccgcggatggaaacgtccgctgcaccgctttttcgtgtgcggcgggaaaggggaatgcgctatggctgaatatcgtaccatctcgggaacttcgacctttgaatatgaggaaaagcgcagccgcttcatcggctgtgccgcctttgccgacacggaggaaaaggcgctggaagtgctttcccgcatccgtgccgaaaaccgcaccgcacgccataacgtctatgcctatgtgctgcgccagggcgggcgttcccgctactccgacgacggggaaccggccaagaccgccggcacccctgtgctggaagccatcggccacgcgggattgtccgacgtcatcgtggtggtgacgcggtatttcggcggcattcttttggggaccggcggcctggtgcgggcctacaccgccgcggcttcgggggcgctggccagggcggagatcgtcaccatgcgggaggtcgtccgctgccgggtgcggctgccctacgccctgtttgagcaggcccagcggctgatccagggggcagggggcaagtgcgaccagcccgaatttgacgacgccgtcaccttgtgctggaagatgcccgccggcaccgaactgtccctctgcgcggcgctggaggaactttcccgcggcagcgcccatacggaagtatccgaacccgagtacgccccgttctgacaggcaaactggcaaacctgccgggctttgcccggcggccatggggggcttcttattgacttttgcggtcaaagccgccaaagcaccgttcctccggagcaggaaaacgtgcagccaggggccatatcaaggccataaaataaggacagtatgccctttttgccgccacgtaggcggcatttttgtgttttttgtgtgggaaagaagtgttttctcattttttatcgtatttatataataaggacgtaaaatgtccgggaattgaggaaccgcgccggaaaagccggggaaaaggagaacgtgcagcatgaccatccgtgaacagaccgaaacgcttgaacgcctgtccctgagccggtatgccacgctcagcgaaaagagccgcggccgggaaaagccggaagcgcccgaccccatgcgcccctgtttccagcgggaccgcgaccgcattttgcactccaaggcgtttcggcgtctcaagcaaaagacgcaggtctttctctccccggaaggcgaccactaccgcactcgtctgacccatacgctggaagtcagccagattgccaggaccatcgcccgggcgctgcgcctcaacgaggatctgaccgaagccatcgccctgggacatgacctggggcatactcccttcggtcatgcgggggagcgggctctcaacaatctctgccccggcgggtttgcccactaccagcaaagcctgcgggtggtggatttcctggaaaaggaaggcgagggtctcaatctgtcctgggaagtccgcaacggcatcgtcacccacaccaaggggacctgggcgcgcaccatggaaggctgcaccgtccgcctggccgaccatatcgcctttttgaaccatgatatcgaggacgccatctcggccggagtgctggaccccgccgccctgcccgccgaggccaccaaggtgctgggtactaccaagtcccagcgcatcactaccatgatcaccgacctggtgcagcacagcccccgcaacaccatgcagttttcccccgaggtggagggcgcctacaataccctcaaggacttcatgtatgccaccgtctatgtggacaaggaagccaagcgggaagagaaaaaggtggacaagctggtgggggcattgtatgagcgtctgagcgccgaacccgacctgatgcccaacttttatatccagatcgccttcaatgagggcatcgaccgcgctgtggccgactacatcagcggcatgagcgacgagttcgccaccaacctgttcgaggaactgtttgtcccgaaaaagtgggcggtgctgtgaagtctgtgctgaattgcactatatcaatcagataaaggcaagtacattgcaaaggaggtgcccgcattgatcccgcaggaatatattcaggaggtcgtccgccgcaacgacatcaccgacgtggtgcagcaatatgtgcagcttcggcggcgcgggcgcacctgtaccggtctttgccccttccataccgaaaagacgccctcctttgtggtctaccccgagacccagagcttctactgctttggctgcggcgcaggtggcgacgtcatcacctttgtgaagaaaatttccaacctgggctatgtggaggcggtcaagcagctggcctcccgggcggggatgcctttgcccgaggaggaagaccaggagacccgccgccgcagccgccttctggagatcaaccgctgcgccgcccgctacttctttgagcagctcaacgccgccacaccggaagccaacgcggcccggggctactggcggcagaaacgcggcctgtccgacgcggccatccggcggttcggtttgggctatgccccggacagctttaccggactgctgcattacctcaaacggcggggctttactgagccggaactggaagactccggcctggtcaagcgtagcgccaaaggcaacctgtacgacattttccgccaccgcgtcatggtccccatcattgatgtacggggcaatatcatcgctttcggcgggcgtgtgctggacgactccaagcccaagtacatcaacagccctgaaacgatggtctacaaaaaatcccggaccctgttcgccctcaatgtggcgaagaagtcctcctccaaacggtatatcctctgtgaggggtacatggatgtcatcagcatgcacgaagccggcttcgatacggcggtctgcgcctgcggtaccgccctgaccgcggaacaggtcaagctgctgagtgaatacgccgacgaagtggttttgagttacgactcggacgaggcaggacagaaagccaccgagcgcagcctggggctgtttgccaacagtccggtgcgggtgacggtgctgtccatccccggggcaaaggaccccgacgagttcatcaagaaatacggcagggaccggttcgacgccctgctcaacggaacggccaaccccaccgagtttgccctggccaagtgcaagcggcaattcgacctcaagtcggacgacggcaggctggaatacatccgccgtgcgctggacattctctcccgcggcgtcagccccacggcgcaggacgtctatgcggggcgcatcgcggaggagaccggcgtctccaagaccgccatcctcaaccagctcaacaccgccatgcgcacggcgggacgaaaagcccgccgccgggaacagaaagccctggcaggggagggcatcgcggcctccatccgggtcccctacgataagggcggcgatgcggccctgggcgcggccagcgcgggccgtcagctggtggcggccatgctgaaaaatcccgataccattccctatatccgccagcatatccgggcggaggacctcatcctgccggagatgcaggaggcctgccgggccatctggcaatgtgccgacagcggcgcgcccatcaacctgacctccatcggtccgctggtcagcgagggcgtggtgcctcagctatccatggtgctggcccagaacatcgacctgaccccctcccggcgggacatcgacatgtacctggaacgcatccgccaggctacgcccaaaagcgcccaggcgggcaagaccagcgacgatgaattccgacggctgtttgactccatcgtaaaggaaaaaactgcttcggaagaaaagcaggaatagccccctgaaacaagaaatactatccaaagcggccgatgccgcacaggaccccatccgggtaaaatcaatccaaaggagaacttacttatggcagaaaagaaaaacgttgtccgcgacctgatcgagaacggccgccgcaccggcaagctcaccacccacgagatcaacgacgcgctggaggagagcgcctttgacgtcgaccagctggaaaagctgtacgagtctctggaaggccacggcatcgagatcgtggacgacgagccggatgacgctgctgcggatgccagcgccctgaccgaggacagcgtggatgattttgaggattccctctcggcggagggcgtttccatcgacgaccccgtcaaggtctacctgaaagagatcggccgcgtgccgctgctcacccccgatgaggaaatccagctggcgctggacatcaaggagggcggctacaagggcgagcgcgccaagcagcgcctgtcggaggcaaacctccgtctggtcgtctccattgccaagcgctatgtgggccgcggcatgcagttcctggacctgatccaggagggcaacctgggcctgatcaaggcggtggaaaagttcgaccataccaagggcttcaagttctccacctacgccacctggtggattcgccaggccatcacccgcgccattgccgaccaggcccgcaccatccgtatcccggtgcatatggtcgagaccatcaacaaggtcaagaaggtctccagccagctgctgcatgagaatggccatgagccttccgccgacgagatcgccgagcggctggacatgccggtggacaaggtccgcgagatcatgcgtgtagcccaggaaccggtcagcctggagacccccatcggtgaggaggaggacagccacctgggcgacttcatccccgatgaggaagctcccgttcccgccgaggctgccagccagaccctgctcaaggagcagctggccgacgtcctcaagactctgactccccgcgaggaaaaggtcctgcgcctgcgcttcggcctggaggacggccgtccccgcacgctggaggaagtgggcaaggagttcaacgtcacccgcgagcgtatccgccagatcgaagccaaggccctgcgcaagctgcgccatcccagccgcagcaaaaagctgcgggacttcctggattgagattcctgcattatcttatatatgtttccggcagccgccgccccgcatcctgcgggcggcggctgccgctttgctttttccaaatggcacggtcagagttccgggcagcagcactggccctgcctgaaaactgcaaaaatccatagccggacagtccgcggtaggggagggcgcaaaaccatagaaaggggaaagggataaaggcgctgctaccacattgcagcagatttgtcaagcgttccaaggccccagcttttgccaaaatgacgataccgcccggtgcgaatggatttgtcaagagcgatttttcaccccataaacggcaaaatcaccaattatattacactgacccgggcgtttaatgataaacaaaaaatgccgccgaaatgccgaaaaaccgcttgacaatggggcctgaacgtcgtatactgttttagtatcacaaaaatggaatagagcgccctaaagacggttgactgtgcaagccaaatcgaaaagtttgtgaaaaacgacgaagatttccagcatggaggacggttttgaaagtgctttgccaagtttgtcaatcttgagaataggagtggttgcattttatggtaaaggtcaagcccgtacaaaacggcagaactaccagaatgagcttttctcggatcaacgaagtgatcgggatgcccaacctgatcgagatccagaaaaactcgtacaactggttcctggcggaaggcctgcgtgaggttttccacgacatttctgccatcgaggactacaccggcaacctggttctggaattcattgatttccggctggacaaacacccgaaatataccattaaagagtgcaaggagcgcgacgccacgtacgctgcgcccctgtacgtcactgcgcgcctgttcaacaagcagaccggcgaagtcaaggagcaggagatcttcatgggcgatttcccgctcatgaccgattcgggcaccttcatctccaacggcgccgagcgtgtcatcgtctcccagttggtccgttcccccggcgtgtattactcctcctccaaggaccgcaccggcaaggatctgttcactgctactatgaaccccaaccgcggtgcatggctggagtatgagaccgactcctccgacgtgttctatgtccgtatcgacaagaaccgcaagctgcctgtcaccgtgttgctgcgcgccctgggcctgggcaccgacgatcagatccgtcagttcttcggcgattccgagcccaagatcaacgctactctggaaaaggataccacccattccaccgaggaaggcctgctggaagtctaccgcaagctgcgccccggtgaacccccgacggtggaaagctcccgcagccacatcgacgcgctgttctttgatccgcgccgttacgacctggctcgtttcggccgttataagatgaacaacaagctgggcctggcccgccgcatcatgggcctgctggccggcgaggacatcatcgccccgctgaccggcgagctgctggctgccaagggcgagaagctcacccgcgaaaaggccgaggccatcgacgctgccggcgtcacccgcgtcaccgttctggtggagcgcaaggccgaggagccggttcccttcaccgtcatctccaacggctgcgtggacgctcagcccttcttcagcttcgacgtcgaggcggagtgcggcatcaacgagcgtgcctccctggccggcatccgcgagatcctggacgctacctccgatcccgaggagcagaaggaactgctgcgcaagaaccatgacaagctcatcagccgtaccgttaccgtggacgacatcttcgcttcggtcaactacctgttgggccttgaccatggcatcggcaccaccgacgagatcgaccacctgggcaaccgtcgtgtccgcagcgtgggcgagctgctgcagaaccagttccgcatcggcttctcccgcatggagcgtgtcatccgtgagcgcatgaccctgcagaaccaggagtccggcgagatcactccccagagcctggtcaacatccgcccggtcgtcgccgccatcaaggaattcatcggttccagcccgctgtctcagttcatggaccagaacaaccctctggccgagctgacccacaagcgccgtctgtccgccctgggccccggcggtctgtcccgtgaccgcgccggattcgaggtccgtgacgttcattatacccactacggccgtctgtgccccattgagacccccgaaggtcccaacatcggtctgatctcctacctggcgactttcgccaagatcaacaagtacggctttgttgaggctccctaccgcaaggtggaaaagggaaccggccgcgtgaccgacgaggtcgtctacatgactgccgacgtcgaggacgaatacatcgtcgcccaggccaacgagcctctggacgagaacggctacttcgtccgtccccgcgtctccggccgtcaccgcaacgacattcaggaattcgcccgcgagcgcgtcgacttcatggatgtttctccgcgaatgatggtctctgtggctaccgctatgatcccgttcctcgagaacgacgactgtaaccgtgctctgatgggctccaacatgcagcgtcaggcggtgcctctgatggtcacccagcagcccattgtcgctaccggcatggaatacaaggcagccaccgactccggtgtctgcatcctagctcagcgccccggcactgtcgaatacatcgacgccgagaagatcgtgatccgctgcgaggacggctctgccgacacctacgagctcatcaagttcatgcgctccaaccagggcacctgcaacaaccagcgtcccatcgttgcggtgggcgagcaggtcaaggcaggcgatgtcctggccgacggccccgccaccaagaacggcgagatcagcctgggcaagaacgctctggtcggcttcatgacctgggaaggctacaactacgaggacgccgtcctgctgaatgagaagctggtccgtgaggacgtctacacctccatccacatcgaggagtacgagaccgaagcccgcgagaccaagctgggacccgaggagatcacccgtgacatccccaacgtgggcgacgaggctctgaaggatctggacgaccgcggtatcatccgcgtgggcgccgaggtcaacgccggcgacatcctggtgggcaaggtcactcccaagggcgagaccgagctcaccgccgaggagcgcctgctgcgcgccatcttcggtgagaaggcccgcgaagtccgcgatacctccctgcgcgtgccccacggcgcctacggcatcgtggtggacgtcaaggtctttacccccgacaacagcgacgagctgcagcccggcgtccgtgagcaggtccgcgtctacatcgcccagaagcgtaagatcagcgtgggcgacaagatggccggccgtcacggcaacaagggcgttgtttcccgcatcctgccgcaggaggatatgcccttcctgcccgacggcactccgctggacatcgtgctgaaccccctgggcgttccttcccgtatgaacatcggacaggtcctggaagtcaacctgggctacgtggccaaggctctgggctggaaggtccagacccccgtcttcgacggtgcgcacgagtccgacctgcgtgactgctttgccgatgcccgcgagaagtggcataccggcaacgctcccgagtatcccaccaagctggaccgcctgatgggtgaaaagggccacatcatcgacttcagcaagatcgacctgaccgatgacggcaagaccactgtctacgacggccgtaccggcgagaagttcccgtccaaggtcaccgtcggctatatgtactacctcaagctgcatcacctggtcgacgataagatccatgcccgttccaccggcccgtacagcctggtcacccagcagcctctgggcggcaaggcccagttcggcggccagcgcttcggcgagatggaagtctgggcgctggaagcttacggcgccgcctacaccctgcaggagatcctgaccgtcaagtccgacgacgtggtcggccgtgtcaagacctacgaagccatcgtcaagggcgacgacgtgcccaagcccggcatccccgagagcttccgcgttctgctcaaggaactgcagagccttggcctggatatcgtcgtgcaggaccacgagggcaacgaagtggatatgcgtcaggaatttgacgacgacgacaccggctttgacgcccgcgacattccgatgggcgacgacgtgctggtcgaaagcgaattgcaggacgattacagcgtgaaagacgccgacgacggttttgactccgatctggatgatgaggatcaggagcccaatgccgaggatctggccaacatcgacgcgatgtttgacggcgaatgatcgccgcagtttccgctatgagtcttgagtgaaatgagagggttcgctgaatggaaaataaagagttcgattcgatcaagatcggccttgcctccccggaccagatccgggcgtggagctacggcgaggtcaaaaagcccgaaaccatcaactaccgcaccctgaagccggagcgcgacggccttttctgcgagcgcatttttggacccaccaaggactgggaatgccactgcggaaagtacaagcgcatccgctacaagggtaagatctgcgacaagtgcggcgtcgaggtcacccgcgccaaggtccgccgtgagcgcatgggccacatcgagctggccgcgccggtttcgcacatctggtatttcaaaggcatccccagccgcatcggcctgatgctggacatcagcccccgtcagctggacaaggtgctgtactttgccaactatatcgtcaccgatcccggctttacgccgctggagaaaaagcagctcctcaccgagcgtgagtacaaggagatgcgtgacaagtacgaggacaccttcgaggccggcatgggcgcagaagccatccagaagcttctggccgagatcgacctggaggctctgtccaaggagctgcacgaagagctggagaccgcttccggtcagaagcgtgtccgcctgctcaagcgtctggagtgcgtcgatgctttccgtctgtccggccagcgccccgagtggatgatcctcaccgtgatccccgtgatcccgccggatatccgccccatggtccagctggacggcggccgtttcgccacctccgacctgaacgatctgtaccgccgcgtcatcaaccgcaacaaccgcctgaagcggctgctggagctgggcgcgcccgatatcatcgtccgcaacgaaaagcgcatgctgcaggaagccgttgacgccctgatcgacaacggccgccgcggccgcccggtcaccggccccaacaaccgcgccctcaagagcctgtccgacatgctcaagggcaagcagggccgtttccgtcagaacctgctgggcaagcgtgttgactactccggtcgttccgttatcgttgtcggccccgagctgaagatgttccagtgcggcctgcccaaggagatggctctggagctgttcaagccctttgtcatgaaggacctggtggaaaagggcattgccaacaacatcaagtccgcccgcaagatggtggagcgcgcccgccccgaggtgtgggactccctggagaccgtcatcaagggccatcccgttctgctcaaccgtgcgcctaccctgcaccgtctgggcatccaggccttcgagccggttctggtggaaggccacgccatcaagctgcatcctctggtctgcacccccttcaacgccgacttcgacggcgaccagatggctgtccatctgcccctgtccaccgaggcccagcgcgaagcccgcatgctgatgctggcttccggcaacctgctcaagccctctgacggcgagcccgtcaccgtgcccacccaggatatgatcctcggttcctactatctgaccatggtcaaccccgaagaccccggccacggcaaagtcttccgcgacgaggccgaagcccttatggcttactccgagcacatcgtcaccctgcaggcgcccatcaaggtccgccgcaccatggtgttcgacggcaaggaagagagcgctctggtggataccaccgtgggcaacatcatcttcaacacccccatccctcaggatctgggttacgtggaccgcaccgatcccgctcacaagttcgactacgagatcggcttccaggtcaccaagaagaagctgcccgacatcatcagccgctgcctgaccaagcatggcaccaagaccacggccgtcatgctggacgccatcaaggcccagggctacaagtactccaccctgtccgccatcaccgttgcggttcccgacgccatcatccccgatgagaagccggacattctggccgccgccgacaagaaggtcgagaaggtcatgaagaacttcaaccgcggcctgatctccgacgaggagcgctacaagaagacggtcgatatctggctggatgccaccgagcaggtctccaccgctctgtccaccaacctgaagaccaaccaccagcgcaaccccatctatatgatgtccgactccggtgcccgtggttctatggaccagatcaaacagctggccggcatgcgcggcctgctggccaacaccgccggtaagacgctggaaatgcccattcgcgccaactaccgcgaaggcctgaacatcctggaatacttcatctcttctcgaggcgctcgtaaaggtctggccgataccgctctgcgtaccgccgactctggttacctgacccgccgtctggtcgacgtctctcaggaagtcatcatccgtgaggaagactgccatgccaccgagggcatctgggtgcgcgagatcagcgagggcaatgcctccatcgagagctttgccgagcgtctgatcggccgctacgccctgaacgacgtagtcgatccttccaccggcgaagtcctggtctccaaggacaagatgatggatatgttcgacgccgagaagatcgagcgcgccggcatcaccgagctgcagatccgcagcgtcatgacctgccgcgcccacgtgggtgtctgcgcccgctgctacggctccaacatgtccaacggccagtgcgtccgcgttggtgagtctgtcggtatcattgccgcacagtccatcggcgaacccggtacccagctgaccatgcgtaccttccactccggcggtattgcttctgccgaagatatcacccagggtcttccccgcgttgaggaactgttcgaaagccgccgtcccaaggccatggccatcatgtccgagatcgccggcaccgtccacatcgacgataccaagaagacccgtcacgtggaagtcaacggcgtggatgagaacggcgctccgctgaccaagagctacatcattcccttcggccagcgtgtcaaggtcatggagggcgatgtgctggagaagggcgctctcatcaccgagggccatgcctacccgcaggacatcctggccatcaagggccgcgtcgctactcaggattacctgatcagcgaggtccagaaggtctaccgtctgcagggcgttgaaatcaacgacaagcacatcgaagtcatcgtccgccagatgatgcgtaaagtccgcatcgaggacggcggttccagcgactttatcgtcggcagcgtggtggatcgccgcgatgtcatgattaagaacgaggaactgcaggagcgcatcgacgcaggcgagaccgatcttaagctggtccaggccagccaggtcctgctgggcatcaccaagtccagccttgccaccgacagcttcctgtctgccgcttccttccaggagaccacccgcgtgctgaccgaagccgccatcaagggcaaggtcgacccgctgtccggcctgaaggagaacgtcatcatcggtaagctgatccccgccggcaccggtctgccggaggtcgaggaggagctggcccgcgctgaggaagagcgcgacgccgagaacagcgcctacgatcacgtggaataagcgcttatccccgtaaccccatcccgccccagtgagccaaacggcccgctggggcgggatttttttgcgccgggatgaatccctttcctttttgtgggaaatgatgtacaatggatttggctgttttgaaggggggacaaagaatgcacaagcatcctcgcacctggcaaagatgggggctgcgcattctgttcctgctgtatctggcagttctgctgcgtatcacggtgtttcgcccggggttcgggcagatgccgctgatgcagggaagctggaacggcaccctgtttgctgagtacctgccgctgctccaaaacgggcgctggctgcgctttgtctacctgttcgtgggcaatctggtctggtttgtgccgctgggaatggcggtgcagtgccggacccggcgcaggctgtggccgtcggctgccgcgggactggcactgtcggccttcatcgaggccgggcagtatctgttcggcaccggggtatccgagctggatgatctggtcctgaacaccgccggtgcactcatcggtgccgcggcggtcctgctgctgcgccggctgcggggcaggggacagacgtccgcgcaagcaggggagaatccctcccgatgacagccccgatcatcgcttacatttatatatgtaatagagtaaattcactacaaaaggagcgaaaccgaatatgcctgaagcactgaaagagcgttcccagatcgaggaacagtacaaatgggacctgacccgtatgtttgccgacgatgccgcctgggagaaagccctgggcgagattgatgccgacattgacgccatggccgcctatgcgggcaagctgaaagatgctgccaccatccgcgcctggtttgacgctgccaccgagctgtcccgcaagctggacaacctgttctgctacagctctctgcgccgcagcgaggatacccgcgccgaggacgcccagcggatgtacgcccgtgccatggccaagtatgtccatgccggtgaggtcaccgcctttgccgagccggagatcctggccctgccagaggagaccctcaacgccatcctggccgatgaccagatggagccctaccgctttgccttcggcgacctgctgcgccgtaagccccacaccctctccgctgccgaggaacagctgctggccagtatgggtgaggtcctctccgcgcccggtgagatctcggacaacctgcaggatgccgacctggtctttgactccgtcaaggacggcaagggcgaggatgtggaagtcaccggctccaactatatcctgctccagtcctccgacgaccgcaccctgcgagaaaattccttccgcagcttctataagggctaccgccagcatatcaacaccttcggcgccacctactccgccaatgtgaaggctgccgtggtggaggccaaggcccgccactacgagtcctcccgcgccatgtccatggcaggggagaacatccccgtgtcggtctacgacaacctggtggagacggtgcgcaagcatctgcccgccatgtaccgctacgttgccctgcgcaagaagctcctgggcgtggacgagctgcactactatgacgtttacgcgcccctcgtctccgagagcagcgccagcttcacctatccccaggcccagcagatggtgctggacgccgtggcgcctttgggcgaggaatacgtcaaccaggtcaagaaggcctatgccgaccgctggatcgacgtgttccccaaccgcggcaagagcggcggcgcctactcctccggcacctacgattccgatccctatatcatgaccaacttcaccggcactctggacagcgtctccaccattgcccatgagatgggccattccatgcacagctggtacaccaagcagaaccagcccgcccagtattccaactacaccctctttgtggcggaggtcgcctccaccgtcaatgagaacctgatgatcgagcagctgctcaagaaggagcaggagcctcaggcccgcctgcgtctgctcaaccagtacctggagaacttcaagggcaccgtctaccgtcaggttatgttcgccgagttcgagcgcgaggcccacgccatggccgagcggggagaggctctcaatcccgcagccctcaacgctctctaccgccgcctgatcgtggactacttcggacccgagctggtggtggacgacgaggttcagtacgagtgggcgcgtatcccgcacttctaccgtcccttctacgtctacaagtacgccaccggctactccaccgccgtggccctcagcgaggcgatcctcaacgaaggcaagcccgccgtcaagcgctacctggaattcctgtctatgggcggcagcgcctacccgctggatgagctgcgccatgccggcgtggacctgaccaccccggctcccgtggacgccgccctgtgcaagttcgagcgcatcctggatgacgccgaggcgaccctggcccgcatggaaaacgccgcaaactgacccgcatttgtcaagaagtcgccacaggaaaagaaaatctctgttttacacgattttttcgccgattttttgtgaatactcttgacaaggcgtgccgtatcccttaaaataaatcttgcgtcggtcggggcgtattgcgccgttttccggcacaatcactcaactttcgaccgcgtcaatacgaaagaaaggagaaaagaaatgcctacttttaaccagctcgtacgcaaaggccgtgaggtcctggtcaagaaaagcaccgcgcctgctcttctcaagagctacaactcccagaagaagcagtacaccaatctgaacagcccccagaagcgtggcgtctgcaccgctgtccgtaccatgacccccaagaagccgaactctgctctgcgtaaagttgcccgtgtccgtctcacgaatggtatcgaggtcacctcttacattcccggtatcggccataacctgcaggagcatagcgtcgttctgatccgcggcggccgtgtcaaggacctgcccggtgtgcgttaccacatcatccgcggcactctggacacgcagggcgttgccaaccgcaaccaggcccgcagcaaatacggcgcgaagcgtcccaaggccggtgccaagaagtaaggaaacatcttttcgccattaagatgggtcagcaatgacttttcttgtggccttacgggagtttcttaactttcgagtaccgatgatatcatttgtgtgaaggagggaagaaagatgcccagaagaggtaatgtcgctaaacgcgaagttctggctgatcctatttacaattccaagatcgtcacccgcctggtcaactcgatcatgctggatggcaaaaagggcgttgctcagaagatcgtttacgatgctttcgacatcgtgaaggaaaagaccggcaacgatcctctcgagatgttcgagaaggctcttgagaacatcatgcccagcctcgaagtcaaggcccgccgtgtcggcggctccacctaccaggtccccctggaggttagccccgcccgccgcgagaccctcggcctgcgctggctgactctgtacagccgcacccgtggtgagaagaccatgtctcagcgcctggccgccgagatcatcgacgcgaccaacaataccggtaacgctgtcaagaagcgtgaggacactcacaagatggccgaggccaacaaggctttcgctcactaccgttattgatccgcttgctttttcgacttaggaggttaaagccatggcaacgccgagagaagtttctctgcaaatgaccagaaatatcggtatcatggcccacatcgacgcaggcaagaccaccaccaccgagcgtatcctgtactacaccggtatcaaccacaagatcggtgaagttcatgacggcgctgccacgatggactggatggtgcaggagcaggagcgtggtatcaccatcacctctgctgctaccacctgctactggagccataccgagacgcagcatgaccctgcggccttcaaggcaaacaggcatcgtatcaacatcatcgacaccccgggccacgtcgacttcaccgttgaggtcgagcgctccctgcgcgtgctcgatggttccgtcaccgtccttgctgcaaagggcggcgtcgagcctcagtctgagaccgtctggcgtcaggctgacaactatcatgttccccgcatggtctacgtcaacaagatggacaccatgggcgccgatttctatcgctgcgtcaagatgctgcatgagcgcctgaacgccaatgcagtgcccatccagctgcccgtcggccaggaggacaccttcaaaggcattatcgacctgatcgatatgaccgccgatatctactacgacgatatgggcaacgacgtccgcgtggaggaaatccccgaggacatgaaggctcaggctcaggaataccacgacaagctgatcgaggctgtcgcggagaacgacgaagagctcatgatgaagtacctggaaggcgaagagctgaccaaggaagaaatcaaggctgctctgcgccgcgagaccatcgccaacaccgttgttcccgttgtctgcggttcttcttaccgcaacaagggcgttcagaagctgctggatgccatcgtcgactatatgccggcgcctaccgacattgaggacatcaagggcaccaaccccgagaccggtgaggaggagacccgtccttccgacgacaaggctcccttcgctgctctggcgttcaagatcgccactgacccgtatgtcggcaagctctgcttcttccgtgtttactccggcaagatcgaagcaggcaccaccgtttacaactctgtcaaggataacgacgagcgcgtcggccgtatccttcagatgcacgccaaccaccgtaaggacatcgacgtctgctacgccggtgacatcgcggcggctgtcggcctgaagaacaccaccaccggcgacactctgtgcgatccggctcaccccatcatcctcgagagcatggagttcccggagcccgttatccgtgttgccatcgagcccaagaccaaggctggttccgagaagatgggcattgctctggccaagctggctgaagaggaccccaccttccgtacctggaccgacgaagagaccggtcagaccatcatcgccggcatgggcgagctccatctggagatcatcgtcgaccgtctgctgcgtgagttcaaggtcgaggccaacgtcggcgctccccaggttgcttaccgcgagaccattcgcaaggaagccaaccaggagaccaagtacgctcgtcagtctggcggtaagggccagtatggtcacgtcaagatcaagatcgagcccaacggtggcaagggttacgagttcgtcaacggcatcgttggcggcgcgatcccgaaagagtatattcccgctgttgaccagggtatccagggcgctatgaagtccggtgttctcgccggctatcccgtcgaggatgtcaaggtcaccctgtgggacggctcttaccatgaagtcgactcctccgaaatggcgttccagatcgccggttccatggcgttcaaggatgctatgaagaaggcagatcccgttatcatggagcccatcatgaaagttgcggtcatcgttcccgacgagtatatgggcgatgtcatcggcgacctgaacagccgccgcggccagatccagggcatggaagccatgtccggtacccagcgtatcaacgccatggtgcctctgtccgagatgttcggctacgccaccgacctgcgttccaagacccagggccgtggccagtattccatggagcccgctgagtaccagcaggtcccgaagaatattgcggacaagatcatcaccgaccgcagcaaggcataaaatctacgattttgcttgatttttgcctgcaaatctagtatgatagccttacacgaggcttacaaattgtttcaattaaaggaggatacttccaatggctgaaaaggcaaaatttgaccgctctctggagcacgtcaacattggcaccatcggtcacgttgaccatggcaagaccactctgaccgccgccatcaccaagactctggctctgaagggcgacgccgacttcatggattactccagcatcgacaaggctcccgaagagaaggctcgcggcatcacgatcaacaccgcgcacgtcgagtaccacaccgctacccgtcactatgcccacgtcgactgcccgggccatgctgactatatcaagaacatgatcaccggtgctgctcagatggacggcgctatcctggttgtcgccgctaccgacggccccatgccccagacccgtgagcacatcctgctcgcccgtcaggttggcgtgcccaagatcgttgtcttcatgaacaagtgcgacatggtcgacgacgacgagctgctcgacctggtcgagatggagatccgtgagctgctgagcagccaggacttcgacggcgacaacgccccgatcatccgtggttccgctctgaaggctctggagagcacctccaccgatcccgacgctcctgagtacaagtgcatttgggagctgatggacgctgttgacagctatatccccactcccgaccgtgctgctgacaagcccttcctgatgcccgttgaggacgtcatgaccatttccggccgtggcaccgtcgcgaccggccgtgttgagcgtggtaccgctcatgtcggcgatcagatggagatcgttggtctgaaggaagagaagatgaccaccaccatcaccggcctcgaaatgttccgcaagagcctcgacttcgctcaggctggcgacaacatcggcgccctgctgcgtggcgttgaccgcgatcagatcgagcgtggccaggttatcgctgttcccggctccgttcatccccacaccaccttcgatggccacgtttacgtcctgaagaaggaagagggcggccgtcacaccccgttcttcaacaactatcgtcctcagttctacttccgcaccaccgacgttaccggcatcatcaccctgcccgagggcaccgagatgtgcatgcccggcgacaacgtcgatatgcatgttgagctgatcaccccggttgccatggaagagggcatgcgcttcgctatccgcgagggcggccacaccgtcggttccggcgttgtttccaagatcgagaagtaatttctcctgatcgggaaatctgctgaaaagctgacaaggctccctgccgcaaggcagggagcctttttgtatctgtgtgacgggccgctggacagcgcaggacggatctgctacactgaaagcaccaaaatgtacagagaaggggagttttcgttgccgggcacaaaaattctttacggcagctgctatggtactgccaaacgctatgctgaggcgctggccaaagctacgggctttgattgccgcccttataccgaagccgccgaagcttcggactgcgacaggctggtctatgtaggcggcctgtatgccggcggcatccatggtctgagcaaagctcttcatgcactgcatccaaacagggaacgcggttactgcatcgtcaccgtgggcctggcggaccccaaggatactaaaaacattcagaatatccgggcttccatggaaaagcgtttgccccgggaggttatggaaaaggcagagatctttcatctgcgcgggggcattgattatgcgggcctgaacttcacccataaaaccatgatggcgcttttgtacaacagcgtcaaacgcaaaccgccggaaatgctggacgcggatgcctgggccatgctggaaacctacggaaagaaagttgactttgtggatctggcaacgttgcagcccatcatacatgcattgcggcctgatctgaatcaactggacaatggacgatgacttttccgatgggagagatgcggactgctgtgtttgatataagctgtgcgtaaatcaacaaagccgcggtatgccatattcttttttatcctggaaaaggtacggctttcgggatgatgcagaaagaaaatccccgatgttagagcgcgtggacaaattgccaacacttcttgcttgtcgtcaggacggggaatccctatactgaataccattgttaggcaaagcaaaagacaaggaggaagaaatccgtgaaatttcaagaaaaacttatgtcgctcagaaagaaaaaaggtatgtctcaggaagaactgggaatggagcttcaggtttcacgccagactgtctccaaatgggaaagtggccagtcttatccggattttcagagactggtaatgctgagtgactattttgatatgacactggatgagttggtaaaagatgttgatgtccaggaaatccgaaatcgaaatctgacagatgaaaaagtggcgtccatgtacttggatatggaaaatgcaaaagctgccatcagaaaaactgccaagatatttggcatagtgtttctggtgctggcagcgttcgttcttttggggtttattatgcatctgatttttccggaaattgagtggctttggagaacgtattaacagaactttgtaggggactgagctatctttgtgatgggcgggaggaaattgtgagaaaaagcgcagacgcctttaacacagtaaaataaaaacgccccggttccgcctggaaaacagcagaaccggggcgaatattatatgtgatatttacaaaggattgagggaaacttacttcatcagttcgcagaccttctgggcgtaggcgacggggtcctccagcggcaggccctcgatcagcagcgcctggtcgtacagcagctcggcgtacttggtgaccttgtcgctgtcgccggcttccttggcggctttcagagcggcaaagaccggatgattggggttcagctccagcaccttggtgctctccatgccttcggcgttgggcatcttgcgcaggaccttctccatctccatggacagaccgccctcgctggacagggacacgggatgatctttcagggtgggattggctttgacttccttgatcttgccgttcagtgccgtcttgatgtcctcaaacaggtccttgttctcctcggcggctgcctttgcggcttccttttcctcctcggtctcaaggcccaggtcgccggagttgatgttcttgaactccttctccttgtagtcgtgcatcatctgcaggcagaactcgtccacatcctcggggcagagcagcagatcgtagcccttgctcaggaccagctgggcgttgggcagcttggccagacggtcgttctcgtcgcccgcggcaaagtagatgcacttctgatcctcgggcatcttctcgatgtactcatccagagtgacgtacttctgctctttggcggaccagaacatgagcaggtcggccagcagatccttgtgcatgccgtagtcaccgtagatgccgaacttgatctgacggccgaaggacttccagaaggtctcgtacttttcacggtcgttgaccagcatggcgtgcagctcgttcttgatcttcttctccagagagttgtgcatcagcttgagctggttgtccttctgcagcgtctcacggctgatgttcaggctcaggtcctcgctgtccacgacgcccttgacaaagctgaagtagtcaggcagcaggtcggcgcacttgtccatgatgagcacgccggaagcgtacagcgccaggcccttctcgtactccttggtgtagtagtcgtagggcgtgcggccgggaatgaacagcagcgcggtgtaggtcgcggtgccctcggtgcggctggtgatgacccgcaaaggatcgctgtaatcgttgaaacgggatttgtagaactcgttgtagtccttctcctccacgtccttcttgttccgcttccagatgggcaccatgctgttgatggtctccagctcggtgtaggtctcgtactccggtttgtaatcctcgccggcgtcctcaggcttgggcttctggcgggatttctggcggtacatggtgatggggtagcggatgtaatcgctgtacttcttgatgagatccaccagagtgtactcctcaaggtactggctgtagttttcgccatcggtgtcctctttcaacaccatgatgatctcggtgccgggggcatccttttccgcctcggtcagggtgtagccttccacgcccttggactcccacttccaggcttcgtcgctgccctgggcgcgggaaatgaccgtcaccttggacgctaccatgaaagcagaatagaaaccgacaccgaactgaccgatgatgtcaatgttctcgttcttgttttcggccttgaaatccatgctgccggagcgggcgatggtgccaaggttcttttccagctcttccttggtcatgccgataccgttatcgctgaccgtcagggtgcgggtatccttgtcgggggagatgtggatggacagatcctctttcttgacgccgatggaggtatcggtcaggctcttgaagtagagcttgtcgcaggcatcggacgcgttggagatcagttcgcgcaggaagatctcgcggttggtgtagatggagttgatcatcaagtcgagcagctttttgctttcggctttgaactgacgcattgccataatcagaattccctcttttacaaaatatgatttagcactctcgtgctttaagtgctaaatgtattttagcactctgccctataaagtgcaagcgtttccgtgtcgaagagaaaaagattcacaatttattcagaataaatggcggctgggccttttcaaatccacccgtttgcgctatgcttgaaacgggcggcagcggccgcccgggaacaaacgataaggatgtgttcgcaatgtcaaaatacggtgacgaggcacacgcggcgttcatgcggggctgcaactgcagccaggcagcggtggtgcctttcgcctctctcatgggaatgacggaggaacaggccctgcgcctggtgggcggctttggcggcggcgtgggacgtatgcgggaagtctgcggcgccttttccggcatcgtgatggtgctgggggctctctatggctttaccgatcccaaagacaaaagtgccttttacgccgaagtgcaggagctggcccgccggtatgcccagcgcaacggcggaggcagcattatctgccgggaactcctcggcctggaaaaagccgagggcactcccattgcggaagcccgcaccgcagaatactataaaaagcgtccctgcccggaacttgcccgggtggcggcggacatcatgggcgaatacattgaagagcatcctctgccgcagaaaagcggcggaaatgtgtaagggaggacaacacccatgcaggtgattcaggagacctttcccggcggagcccggctgaccggctatctgcgggatgtgaccgaggccatgccggactataactgtcgccccgcggtattgatcctgccgggcggcgggtatgagcgctgcagcgcccgggagggcgaccccgtggccatgcagtttctggcggcgggctaccatgcctttgtgatgaactattccacaggagagtcggcaggggagtggcatcccatgctggatgcctcccgcgccatggtatttctgcgcaaaaacggagagcgcctgcgcatccgcccggacaagatcgcggtgtgcggcttctcggcagggggacacctggcagcctgtacggggctgctgtgggacgcggacccggtgcgggatgcactcaaggaggacgcggccctggtgcgccccgatgcgatgatcctctgctatccggtcatcacctcgggggagtacggccatgcaggcagctttgaccgcattgcgggaagtgacccggctctgcgggagcgtttcagcctggaaaagcaggttcgccccgatacgccgccggtgtttttgtggcatgcggtagcggacgccaccgtcccggtggagaactcgctgatgctggtggagcagctggaaaaacaggacatcccttatgaaatgcacctgttcggcggaggcaagcacggcatgggcttgtgcaccgtggaggtcaatcatcccgatgcccatattgcccactggttcacgctctgccgggaatggctggacaatacctttgacttccatgccggcgtgtgatctctgtttcccatcggctgtaagcgccgggcagcagcgcttgcatccgcccgttgctgttttatgaagactatggtttcaaaaggagcatccgaatcatgaaaatctgtttttatgcgctgcgtccgtttgatgaactggcctactgcaagcagttcagcgagaaatacggcatcgactttacctggacggcagaataccccacagcagaaaacgttgacctggccaagggctgtgatgccatctgcatgacgccctgcgatatgggcgccgagatggtggaccgctttgcggcgctgggggtaaagtatctgctctgccgttccatcggttacgatcacgtggaccgcgcccgtgccagggagcacggcatgcgtgtctccaacgtgggatacagccccaacggcgttgccaactacgccatcatgctcatgctgatgtgcacccgccgcatgggtcacattctgaaacgggcggaactgcaggactactccctcaaaggcaaaatgggcaaggacctttccagctgcacggtgggcgtcatcggcgcggggcgcatcggcaccacggtgctgaaacacctgtccgggtttggctgcaaattgctggcctacgacgtattccagaaccccgaagccgcatccctggcggagtttgtgccgctggacgagctgtatgcccgcagtgacgtcattacgctgcacaccaacgccacaggggagaaccatcacctgctcaacgccgaggcctttggcaagatgaaagacggcgtggtcatcgtcaacacggcccggggcagcctgatcgactccgacgccctgatcgaagcgctggagagcggcaaggtgggcgcggcaggcctggacgtgctggaaaacgagaacggcctgtactattacaaccacagcggcgacgtgctgtgcaaccgggagcttgccatgctgcgcagcttccccaacgtgatcgtcagcccccacacggcgttctacaccgatgaagatgtggccagtatggtggagggcgcctttgagtctttgcactgctttgccaccgggcaggagacctggcacgaggtcagcctgaaatgacggctccggtaatgcccggccggttcggggaatcggcggaactggatgccctgccgcgcattgcgccgggggaggagttcccttttgtttgtgccggctgcggggattgctgccgcgcccggcgggacatcctgctgtcggggctggatctttaccggctggcccggcggcttcgtctgccgccccgcacggtagccgaggccttttgcagggaaaccgccggaaccctgccggggctgcgtctggtcccctcacggcacagcggaaactgcccctttttggatggcggcgcctgcaccgtccatgacgcccggccgctggcctgcgccctgtatcccctggggcaggccattgacctgacgaccttccgcaccgaatattatctgcagccgccgctgtgcggggcaagagcgtccggccgcacgctgcaggactacctggatgcttccggcgtgaccgagcgcgcgggcgcggatgccttctgggcggtcagctgcgcggctttgcagcggcgcgtggaggcggcggaaagctaccccaaagcggcggtgcatggctgcctgatgcgcgcactgtattatgactatgatatccgggatgagtttcagccccaactgacgcggaacctgtcccggctggatgccatgctcaaacgcctgctgggagaggacgcccgcccctgaaccgggacaggaaactgcccggcggtacaatataaaaaagaccggagcctctgggatgaaacagaggctccggttttgttgtgttctgaaaatctgcggggctgaaatacaaagttcggtgcggtcagcagtaataatatccgccgcggccacagcaacagcagttgaacagggcgaagaagagctgggcgacccacagtgtcaggcagaagcggatcaaaggattgccgccgggctgggtatgcgcctgctgataggtccggtaagtccggccggggttctgcagccggtccagaaggttctggtactcgtagttgcccggctccatatccacggcggtgcgggcttcgttctgggcgcggatgttgttgcccagtcccgcgcaggccagagcggcatagtagtgccagcgggcggtgcgctcgttggcggcgatgccttccagcacgttgagggcttcctgatagtagccgttgcggatatagttgttggcggcctgcatttcgggggtatcgcggccggcggactggccggcaccggaatatccgaatccgaacccgaagggatcaaagccaaacccgaacccgaaggggtcctggtatccgccgccttgtcccgactgacggtaactgcgctgaccggaggctccgccgtagctgctgtatccgctgtatccgttctgggcgccggaattgccgccgccctgccgctggcgcatgatttcactgtatgctgcctggacttccttgaatttgtcctcacaggtaggatcatcggggtggaggtccgggtgatactgcttgcatttctggcggtacgcctttttgatggtctcctcgtcggcgccctgagaaatgcccagtacgctgtatggatcaagcatgtcgatactctgccttcctgcgcttgtcgcgccgtgctttgatcagcgtgtatttgcaccacacgccggaataaatggtgttgtataaaagctgcccctcaggtgaatccttgaggatgggcagtagattgaaactctcgccgcagatgcccagctgctgggtaaacagctcgtgacagcgctgctcaaaagcgtctgcgtccagctttgcgtgcagggcggccagcgcattgaaactgccgtttttggcgtccttttccaggtcgtcgtaggcatccatcaggtaaatgaaaccgcccaacccgcgtcccagacgcagcaggaccggcgcccacagatcgtcctcgcaggccagcacgttgcccagcaaggtgccgaaacagccgcacagggcgtcaagatcctcgcagccggaactttccagctgattcaaagcgtcaagctgggcccgtatggcactgcattgccgggggtgtgctgcctcaatggcgggcaggtactgttccagacgtttggcattgcgcaggctggcgcttcggtgttcgtcctgccagtcgtccaggtaattgtagtaggcaagggccacactcatgtcggccgcatagtcgatataccggttggagattctgggccgggccttgaccgggtggggaaggcaccgtccggaagaatgaatcgcttccgggtcatagagcgcgctttgcagcagcgcggcaaaggtcatgtcgtaggacagggtcatccgtcccggcattccgtaacgctgcccaagggcctcgcaaagaccgcagtaatagccctggtagcagtccagggccgattctgtcaggtctttccgatagatggtaacatatccgaacatacagcgtcaacctttctgcccgggataggggaaacattcagctcttgcggataaactgggtgccgcacttggggcaggtgatggagacacggccccggcctttgggaatgcggatggactgtttgcagtgcgggcacttgaaatagcggtaagtacggcgctgggcaaagcgattgcgcagatgggaaaaccagccccggaccgcgctgctgcgggccagataccactggttctccgcgtagcgcttctggatgttgcggctgaacatacggaaataactgtagatcagtacgatcaggcccacataatacaggatacccgagacgaacattcccagcaccagcagaaccagtgcggaaatggacaaaaacatgctgaactggtcgctgccgtaacgccccgacatgaagcgctggaaccatgctttcataaaaaacgccatccttttattacgattctgttccccggcctgccggagccgtgccaggcattgtgcacggcggttcatggacggccgggaacgtctttgcgggaggagccgtagcccggtttgcggtacgattcccgtaccggcgggccctctcgcgttttgacgatgctattatttcacaaatttgtgggcaattcgtgaacggtatccaaacagtacgtgaacatttcccaaaaggcgggcatttgcccgcggtttcgggaaaacatcccctgtcttgggcacaaaagttgtaaaaccttggccccgggactggtgcgtggatagccaacgtggtaatatgagggtatcatgcccgccgtagtgcgggaacactcaggagatagcaggatatgaaaggtccgatttgtttacgtctggcggctgcggccgcggccatcatgctgctggcaggctgccagcaggcacagcctgtgccgggcagtgcatcggcggagacggccgaaacgggggagtccgcccgcaccgatacgctgctgatggattttaccgccggcagcaatgtggaggacgttcgcgccgttgaactggaggaagccgtcacgccggtggcactctgtgacacgctggaggagcttaccggcatccagtttgactttaccgtcgcgcagaacggggacgtatacaccgtggcctggcaggatacctccgccctgattttgggggagacaccccaggatgaacatcaggactatgtcttttacgacgatgacctgctgcgctggttcatgctggatacggtctggcgcaatctgacggaaggatacggcgcaaaggaagtcctttacaccgacccggagggggcagccctcacgctggaaagcccctggccactggaaaactttgacctgtcggaaccctaccggggcagtgcatggtactgtgagcagagcaccggctgggacagcgggatgccctccgcctaaaactgcctaagcacgttcattatactataaaaggaatgccgggaacaagcccggcgtttcttgctttagaaattgttttgttgtacaatggcgttgccgcggcaggacctgcggcaaaagctgcacaaaacagacgttgcgtccgtgttgcgggcgcagagggaggacctcttgaaacaactggatcagcagatcaccgccatgaccgaatattttcggcggggatgcaaggggaatggccccggcactgtgggggtggaagccgagcattttgtcactgctttggacggcacacccgcgtcctttgcccaggcccaggcgctcatgcgcgctctgcagcagcccggcgaccgtgacatcatcatagacggcagctatatgggctttgccgcaccggagtatgccctgtccctggaacccgcttgccagatcgagatcagcatgatgccggacagcgatgccggggcggtggcccgcatttacggggagttctcccggcggttcgatgccgcagccgcagcccaggggctgaaagtctggcggatggcctgccatcccacccgtgccgctgcggacctgcccctgatccccaaggaccgctaccgggagatggaccgctatttccgcatcagcggcagccacggcatccagatgatgcgggccaccgcatcggcgcaggcttcggtggactatttcagcgaagcggattttgtcaccaaataccgtgcggcctgtatccttgcgccgctgtttgccttgctcaccgataacgcacctgtctatgaaggcgcccccaacacgctgcccagcgtgcgcacccgcatctggcaggatgtggaccctgaccgctgcggcgtggtgccctgcctgatggatgcggatttcggctttgcagcctatgcggcgcatcttttgcagcagccgctcattgtggcaaaacatggcgaccgcaccgaggccgtcggccgccggtcggccgcccaggtctacggcggagcgctgaccgacgccgagatcgagcacattctttccatgttcttttatgatgtgcgcctcaaacattatattgagatccgctcggcggactgcgtgccggaaccctatctgaccgcctacgcgcagctgatcctgaccctgttttcctgccctaaggcactgaacacggtggggcagcggtttgcgggcgtcacggtgcaggacattgaagcggccaaaacggccatctgcaaggacggctataaagcccgggtctacggcagcagtgccggggagcagatggactggctgatggataccgcctttgcctgtgcggcaggacccgcccaggccgaccgcctgcgcccgctggcagaacttaccgcggcgcgggaaacgttacgagagaggaattaccatgcaggaacaacagcttgaccgggagtatctggccgccattgcggcagaaccccagcgcagcgagcgggaataccgcgagctggtggaatatatgcgcgggtctacggcgatccatcacggagaatacgtccgcacctgcctgatgcccaaaattttcaccgagagcacttttgcccgcattgtgtctgacatgggggtgctgtacggcattttccgcaaggtggtggacgcctactttgccgacccgtcttaccgggcattgttcggctttgacagccgcaccgaggaactgatcctgcgcagccaccataccgaatcgatgctgcccatggcccgcatcgacttcttctataatgaagaaaccggggactataagttctgcgagttcaacaccgacggcagcagtgccatgaacgaggaccgggagctgcacaatgcccagcggctgtccaccgtctaccgggacttcaccgctgcccacgagacccgcacctgtgagctgttcgacagctgggtgacggcctttgccggggtatggaagcgcacccgcgggaccgactgcctgccccgggtagccattgtggatttcatggagtgcggcaccgtcaacgagtttgagattttccgcgagcattttgaaaagctgggcctgcccgccgaggtctgcgacgtgcgggacctgcaatatcaagacggccgcctgctgggcaaatcggggctgccggtggatgccatctaccgccgcgccgtgaccagtgacattctggaacgttacgacgaatgcaccgccctgctggatgcggtgcgggatgacgccgtgctgctggtgggggatttccacacccagctggtgcacaacaagaccattttccgcgttttgcagcacccggccaccctggccctgctgacgcccgctgagaaggactacgttcacgcccatgtgccggtgaccatgtcctttgccgacgccgacccggaacaggtcatccgggaaaaggacgcctggatcttgaagcccctggactcctacggctcccgcggcgtttacgccggggtggaatatgacgccgagggctggcgcaaggcggtggagagcatcaccgaccgggagggctacctgctccaggaattctatatgccttatgtaacggaaaactacggcctggtaggtgacagcttccaaaaagcgcggtattataatcttaccggcatttatgtctatgacggcgttccccggggtgtttactcccgggtatccctgacgcccatcatctcgtcccagtacagtgaaaaaacgctgcccacgctcattgtgaaaaactgacaggcgtgtgccagaagctgcttttgggacagaatttcgcagcatggttttcttgtggggccgtgcggtatggggaaccggactttgtggaatactgatagagacgggccaaagcccgcatcatccgcaaaggaggccgcgccatgcgagaaacctcgtacaagacggtcattgccgaaatgactgtccgcgccctgtgggagacgcagaatatcatggactgcatcccggacgagatctgggataaggaatatgcaggctcacccctgtggcagcatgtctatcatatgctgcacaaactggaccagtggttcatcaacccccgggataaggattttgtggagccgcccatccattcgccctccctggacgacctggagacctacccggagggccgcctgggccgtacccagatggaggaatacttttacaccatcaaggcaaaactgtccctctacctcaatgctctccatgacgaggaccttctccagcggccggaaaactgcgagtggacccggttcaccctgatcctcgcccaataccgccatctgcatctgcaccttggcatgctgatgggctttgtggtgtgtgagacagggctctgccccaaaactctggatctggggacggactttcccaaaggtccctatgacccttaccgctgaccgccgcccggcggcattacatacaaaggaacaagatcatgaaacaacgttttctctgcctggctgcggcattgctgatgctgctgaccgcctgcaatgcccaggataccgagcccactttgcaggtcacgctgccccagtccggggtagtgatggacttttatggctgtgacgtgacggaagcaaccaccgatctctggatggacaccgagcagacccccgagaccgccgcgatgtactgcagcgacggtcgccccgaactgcgcctggaaggcgtgcaggaggaggacgtggaggtccgttttgcggaaccttatgagacggggatgcgcctgtacacggccaactatatcatgccgaaactggactataaaatgaccgttgaggaagatggtcttttcattcagctcaagacggtatattattacctcatcaccgtcacgacggacagcggaaccgaccgctttgtggtctccaccgcgctggattgacttcccctgatatggcataaaaccaaagccggatgtcctgcatcatgcaggcgtccggctttttgcggggaaggggagaggcggttcatcgctgctgcagcggtgagagatgagagcgccatgctgccgggcagaaataacagaaaacaaggctgcaaaacactgaccataaagcagaggatgccgcgttatcgcactttgcagtctttcggaacctcagtcattggcatggcagccgctttttctcggcgactttgcagccctcgcggtacattagacatgagctttcttacaacgttcgtactgagccgtcggctcttgacaaaaagctctgccgtgggtagagtagaggaagtttgagtttgaacaaggacaggatgacatagatgaaaaagatattgcttttggccaccggaggaaccattgcctgcaagcctaccgagcgcggccttgcccctgccatcaaggcggaggaactgctgcagtcggtgccggagctggccggaatgtgcagcatcgatacgctgcagctctacgatctggattccaccaacatcggccccgagcagtggtgcggcatggcagcggctatccgggacaactacgagaactatgacggctttgtcctggcccacggcactgacaccatggcctatacggcggcggctctcagttacatgatccagaacacggccaagcccattgtgctcaccggcagccagaaatccatctataaccgggacaccgacgcacgaaacaatctgctccatgcctttgcctatgccacggcgccgggagcctggggcgtgcagatcgtttttgacaacaaggtcattctgggcacccgcgcccgcaaggtgcgcagcaaaagcctggacgccttttccagcatcgactacccggagactgccgtctttcgggatgaccgcctgattttcttcctgcccacaccctccgacctgccgccggtgcggttttacaccgagttggacccggcggtctttgtactgcggctggtgccggggatgggcgcggacatttttgccgcgctggcaccccattaccgcgctgtcgtcattgagggtttcggcgtgggtggcctgcccggcggcaaggatggtcccatgctcaaggcggtgcgggactggctggccgggggacggctggcggtcttttccacccaggtccagcacgagggcagcgacctttcggtgtacgaggtcggccgcattgcccgggaacttcccggcgtgctggaagcccgggacatgacccccgaggcagtggtcaccaaactgatgtgggcactggcacagacctccgaccccgcccgggcgcaggaactgtttacccggccggtccagcacgaccttctgtgattcgctccctgtttcaatcaacaccaaaacaaaaagaaaacctccgtttccggcccgcacatggccgaaacggaggttttttactggtgcgcggctccggcagaaaacaaaccgcaacatcctgccggaaaggggactcgcacatccgggctagcctggtatcccgctttccggtatctgccgcatgacagcggccttagaatacggaggagtttccccgcaggacttttgttttctgcgtcgcacgcgctttgcccgttcccgctgctcgcacaatgccgcgggacggggctttggatatcccggccgcactgccgggcaaatcggcattcttccctctaaaatgcccaatacgaagatagcaatggtatggaatggcgcgccttacagctctgccaaaatggcgtcgcccatggccgagcagccgattttttcgcagccgggctgccagatgtcggcggtgcgcagacccttgttcagcaccgtgttgacggcggcttcgatctcgtcagcctcgtcggccatgccaaagctgtaccgcagcatcatggcagcggacaggatgcaggcaatggggttgacgatgtcctgccccgcaatgtcgggggcggagccgtggatgggctcgtacaggccgcaggtgcccgcgcccaggctggaggacggcaccatgccgatggaaccggtgatctcgctggcctcgtcggacaaaatgtcgccgaacatgttctcggtgacgatgacatcaaactgggacgggtccttgcagatctgcatggcggcgttgtccacgaacatttcgcggtaatccacctcgggatactcggcctgcaagcggtgcatcaccttgcgccacagacggctggtgtccagcacatttgccttgtccacgcaggtcaggcgcttgcggcgtttcatggccgtctcaaaaccgatgcggccgatgcgctcgatctcatgctcggagtagctcatcacgtcggtggctttctcctcgccgttctcggtctcggtcttgtgctcgccaaagtagacgccgccgatgagctcccgaaccacgataaagtcaatgcccttgtccacgatctcctttttcaaagggctggcgtctgccagctggggccagatcttggccgggcggttgttggagtaaagccccatcccggcgcgcagccggagcagacctttctcggggcgcttgtcgccgggcatgccctcccatttggggccgcccaccgcgcccagcaggacgctgtcggaggccaggcacttgtccagctcgctctggggcaggggatcaccgaacttgtctatggcctcgccgcccatccaggcgcgggtataggtgaaggtgtggccgtgcttttccgcgattttgtccagcacacggacggcctgggtcacaatctcggggcttgcgcagtcgccgtagatcagtgcaatgtttttctgcatgggaaccccctccttactctttgtctttgagagaattcatcaggccgcccgccgcgatgatcttctggatgaagggagggaacggctcggcctcaaaggtctggccggtggtctcgtcggtgatgacgccggtgtcaaagttgatgctcaccacgtcgccctcctgaatggcatcactggcggcggggcattccagaatgggcagaccgatgttgatggcgttgcggtagaaaatgcgggcaaagtctttggcaatgacgcaggagatgcccgccgccttgatggccaccggagcatgctcacgggaggaaccgcagccgaagtttttgccgccaaccatgatgtcgccctcctgcacacgggtgacaaaggtcttgtcaatgtcctccatgcagtgagcggccagctccttggggctctgggtgttcaagtaacgcgcggggatgatgacgtcggtgtcgatgttgtccccgtagcggaaaacagtgccttttgcgttcatgttcaaacctccctgggatcggtgatgtaaccggtcagcgcgctggctgcggcggtggcggggctggcaaggtagacttcactgtccacgtggcccatgcgcccgacgaagttgcggttggtggtggagacgcagcgctcgccctcggccaggatgcccatatagccgcccaggcaggggccgcaggtgggggtggagacgatgcacccggcatcgatgaaggcggtggtgtagccgcggatgatgcactcccggtagacggccatggtggcgggaatgatgataccgcgcacgcccttggcgattttcttgcccttgaggatgttgtacgcggcttccatgtcctccagacggccgttggtgcaggaaccgatgaccacctgatcgatcttgatgttttttccctccttggcgggatgggtgttttcgggcaggtggggatagctgacggtgggctccaaagtgtccaggtcgatgaccacggtgcgctcgtactcggcgtcgggatcggcctcgtacttgacccaggggcgctggctgcgggctttcagataggcctcgcaggcctcatccacagggaagatgccgttcttggcgccggcctcaatggccatgttgcagatgcacaggcggtcttccatggtcaggctcttgacgccctcgcccacgaactccaggctcttgtaaagggctcccgaaacgccgatctcgccgatcaggtgcaggatgacgtccttgcccgagacgggggcatgcagagcgcctttcagctccaccttgatggcggagggaactttgaaccaggccatgcccgacgccatgccggcggccatgtcggtggaaccaacgccggtggagaaagcgcccaccgcaccgtaggtgcaggtgtggctgtcggcgccgatgatgcagtcaccggcagtgacgatgccctgctcagggagcagcgcgtgctcgatgcccatggtgcctacatcgaagaagttgagaatgtcgtacttgttggcgaactcccggcactgcttggactgctgggcgctcttgatgtccttgttggggacaaagtggtcaagcacgatgttgacgcgggtcttgtcaaataccgagtcaaacccggctttctcgaactcgttgatggctacgggggtggtgatgtcgttgccaagcacgatgtccagcttggcgttgatgagctggccggccttgaccgacgcttcgccgcagtgggcggcaaggatcttctgggtcatggtcattcccatggcaaaaacctcctgatctggcaaagtggaatctcacttgttgttgatggcgctgaccagcgctttgatgccggccacgatgatgtcggtgtcggtgccgcagccccaggtctcggtgccgctggcccatttcaagccgacgtagctgcaagcgcggctgtcggtgtcggagtcaagagcgtgctcgctgtaatgcaccagggtgaagtgcatcccggtctcgcgctcgatggcggtggcgacggcgtccagacggccgttgccggtggcggtgcagctgacgatcttgccatcgatggagagggtgacctccgcggcgatcttgtcactgccgccctgctgtttgaagtgagcctcggtgacgttgagaggcgtggtgtggttgaggtagctgcgctcaaagacgtagagaacttcctccacgctgagctcgcggtgctcgtggtcggagacgtccttgacccggtagccaagatcctcccgcatgcggggcgggggattgtagccgtacttctgctggagcaggaagccgatgccgcccttgccgctctgggagttgatgcggatgacgtcggcatcgtaggttcggccgatgtcctggggatcgatggggatataggggcaggtccactcgtggaggttgtggtccttgcgccagttcatgcccttggcgatggcgtcctgatggctgccgctgaacgccgcaaagaccaggctgccggcgtagggggtacgctcgtagacgtgcatccgggtgacccgctcgtaagtttcgcagatggcgggcatgttggagaagtccagatgggggtccacaccgtggctgtacatgttcatggccagggtgatggcatccacattgccggtacgctcgccgttgccgaagaggcagcactcgatgcgctgggcaccggccaggacggccagttcggcatcggccacgccgcagccccggtcgttgtgggggtgggtggagaggatgacgctgtcgcggtatttcagatgcttggagcaccactcgatctggttggcgtagatatgaggcatgctcatctccacggtgaccggcaggttgatgatcatgggacggtcgggagtgggctgcataatatccagaacggcgttgcagacctccacggcgtactccggttcggtgccggtaaagctttcggggctgtactcaaacaggaagttgccctcgtactcctcgctgagctgcttgaccagcttggcgccgtccacggcgatctgcttgatctcttccttggatttcttaaagacctgttcccgctgggccacgctggtggagttgtagaagtggatgaccgcccggggcgcgccctgcacggcctcaaaggtcttgcggatgatgtggtcgcggcactgagtcaggacctgcaccgtcacatcgtcgggaatgcgcttttcgtcgatgagcttgcggaggaactcatactcggtctcgctggcggcggggaagccgacctcgatctccttgaaaccgattttgatgagcatgtcgtagaattccagcttctcctccaaactcatgggaacgatcaggctctggttgccgtcgcgcaggtcaacgctgcaccaggcaggagctttctcgatgtgatccttcatcatccagtcatagacgtgacccggttccgccggagggggatagtaaccgacatggtatttgcttgcgtccatcataaaaaaaacagcctccttcttgctcgaccgcatgttgtgcggtgttcagcctttggaaggaggcaataaaaaaaccgtccctcaaaggcattgcctttgagagacgggaaacaaatcaatttgccgtacccgcggtaccactctcattgctgacggaaattccggcagccgctctgtacgatcagcaatcccgacaaggaaaagcgaatcgcgcctgtatgataacggtcaggttccgtccgcgcctaacacgatgccgtgctcagtacggatgctcaggggccagtgacgcgaacctgtccgcaccgccttgcaccacccggcggctctctacagctggaactgggaacgctttctccccgtcaacgcatgttaacttgatggataaagtctagcaggtttcacaggcagtgtcaagaataaaatctgcatctttttcagactttgtgcatactggataaaacgcttcaaattggtttgtgcagcctgcgcatgaaaaaagggcagatgtgacgcgtttcccaaggaaatccaaggcctaaaatccggattggcaagcagaatttgctgcgttatccggtgcatccatttccaaaaagcgcgcgccaagtctctgtcttgcgtctgaatttttgaaaaaatcggtgattcgaacttttctgcggaaagtctgtttttggtacatccaaacgatttttgaggcaatttgttgggaaaactcagccggaaaaagaaaacgcaaaaaatagcagcaacattgaattgacacggctgcatccggacggtataatatgaaattgattagcaagtgctaactgcactgtaagcgtatttttttgactgcgtgttgcttgtgactaactttggttgctgtatgcttcccgcacggaacgcaagtggaaaaatacaaagagaaaacaggagagagatgggaaccctatgatgatcaacaaacggctgatcggtactgtggccgaaagcaaaaagtacattgccggaaatgtggcgctgcagtggtgcgccctggcggccaacattgccttgatgatgacagtcgcaaggctgctggcggctttggcagcaggcactcagaccggggcggacgttgctgtggccgcagtcacggcagtggtggctttggcggtgcgctatttctgcaccgtgggggcgagccggatgagctatctgtcctcctgcgaggtcaaaaagaccctgcggcacagcatttacagcaagctgctgcgcctgggggcgggctacgaccgtcaggtccccacctccgaaattgtacaggtggccgtggagggcgtggatcagctggaaacctatttcggcgcatatctgccccagttcttttacagtatgctggccccgctcaccttgtttgtggtgctctgctttgtcagcgttccggcggcggtggtgcttttgatctgtgttccgctgatccccgtagccattgctgcggtgcagacctgggccaaaaaactgctgtcccgctattgggggcagtataccgctctgggagatacttttctggaaaacctgcagggcctgaccaccctcaaaatctaccagaccgatggatacaaaaatgacgagatgaacacccaggccgaagaattccgccgcattaccatgaaggtgctgaccatgcagctcaactccatcaccatcatggacctggtggcctacggaggtgcggcgctgggcatggtcgtggcggtgttgcagttcgcgtccggtcgggtgtcgctggccggggcactgctcatcatcctgctggcggcggattttttcatccccatgcgtcagctgggatcgtttttccatattgccatgaatggcatggcggcttccgataaaattttccggctgctggacctgccggagccttcccggcgttcggtcacccgtatcccggaacagggggatattctgtgctccggtctgcgctttggctatgaaacggagcgggagatcctgcacggcgtaaacctgcgttttggggtgggaagcttcacggcgctggtaggggagagcggctgcggcaaatcgaccgtggcctccctgcttatgggccgcagcggcggctatgagggacatatcaccatagggggcatcgaccttgccgatatttccgaggactgtctcatgcaccatattacgtatgtcagccatcagagctatctcttcaagggaaccgtgcgggacaacctgtggatgggcgaccccgacgccagtgacgatgccatgtgggcggttctggaacgggtcaagctggcggaattcctgaaagccgggcaggggctggacacccagctgcaggagcgggcgagcaatctgtccggcggtcagcgtcagcggctggccctggcccgggcactgctgcatgacagtcccgtctatctttttgacgaagcgacctccaacatcgacgtggagagtgaaaatgacatcatggcggagattttccgccttgccaggacacggacggtcattttgatctctcatcgcctggccaatgtggaacaggccgacagcatctatgtgatggaggacggccgcattgcggaacagggcaggcacggggaacttttggcccgtggcggcctgtacgcaaagctttggacggcacagaaaatgctggaagattacagcagggaggtgggagcatgaaaaaacgcagcggattcgcagtcatgggacgtctgatcggcctggtcaggccgctgaccggatatatgatccgggctgtctgcatggggctggtggggcacctgtgcgctacatttatcacggtgttcggcatttttggagtgctggatgttcttggaatggattcgccggtccccatgggcgctgccttcgccggcatggcggtctttgccctgatgcggggatttctgcgctatgcggaacaggccagcaaccattttattgccttcaaactgctggcgctcatccgggacaaggtattccgcgccctgcgcagtctctgccctgccaaactggaaggccgggaccggggagacctgatcgcggtcatcacctcggacattgaacttctggaagtattttacgcgcacaccatttccccggcagccatcgccttgctgttttctgccgtcttgtgcctgttcatcggcagctggcatccggtgctggggcttctggcgctggcagcctatctgacggtgggcgtgctgatcccattgatcacatcgaaactcagtggagacgacggcctccgtttccgccgccgctcgggagaactgagcagttttgtattggacagcctgcgtggcttgcccgagaccatccagtatggtcaaggcgcccggcgcctggctgaactggaccgccgtaccgatgcccttgccgccgacgaagcgcgcatgaagcgcactgcgggccgtaatcaggcagtgaccaatacggtggtgctggcctttgatttgctgatgcttttgacaagcgcaatgctgtatcagcagggggcggtgtcttttgagggagtattggtgcctacggtggcattgttttcctccttcggcccggtcattgctctggccaacctgggcagcacgctccagaatacttttgcggcgggtaatcgagtgctggacatcctggatgaagtccccgccgtacaggaagtatccggccgtcccggcacatccttcaccggcgcagcagcccgtcatgtgggctttgcctacggggaagagacgatccttaccgatgtttcggtagatatcccccaaaatcaggtgatcggcattgtggggcgcagcggcagcggaaaatccacgctgctcaaactgttcatgcggttctgggatgtgcagcaggggcaggtggaaatatcgggccgggaggtggcggatatcaatacggccgatctgcgggcgatggaaggctacgtcacacaggagacccaccttttccatgacagcatcaaaaacaatctgcgcattgccaaactggacgccaccgatgccgagatcgaagccgcctgtaaaaaggcgtcggtacatgacttcatcctgacgctgccccggggctacgacacgccggtgggagaactgggcgacaccttgtcgggcggggaacgccagcgcctggggctggcccgggcttttctgcacgatgcgcccctgctgctgttggatgaacccaccagcaatctggacagcctcaatgaagcagtcattctccgctcccttggggaggaacgggggcagcgtacggtggtgctggtctctcaccggcagtccaccatgcgcattgccgatacggtatattcggtggagcaggggagggtgagctgaatggcaaaagatctccaggtcaagcgggagcgggaaaagcgcatggtgtccgagatgatcgccctttactgcaaaagccgccatggcagcagggaaggtctctgcccggagtgtgccgccctggaagcttacgcccggctgcgggcggacaaatgtccctttatggagacaaagactttctgttccaactgcaaggtccattgctaccggcccgaaatgcggcaaaagattcgggaagtcatgcgctttgcagggccgagaatgctgtttcaccatccggtcatggcggtgcggcatctgatcgaaagcaaaaaagaacaagcaagattggagagacaacgatgaacctgaaaaagatcctttaccttgtcctgggctgttttggccttgccatgggcgcggtgggggcggtgctgcctctgctgccggcctttccttttctgctgctggcagctttcagctttgccagaagttccgaacgtctccatacatggttcacagggacccggctgtacaaagaaaacctggagagctttgtgaaagggcagggcatgacctggaaaaccaagattcgcattatggtcacggtcacgctgctcatgaccttcggctttgtcatgatgaacgagatcgtggtagggcagatcgtcctgtcggtggtatgggccttccatatcctgtatttcatctttggagtcaagacccgtcaggacggctgagcttgctgtgctgacaggtcacagggggggatcccacacccccgaacataaaaagcccccgcatttcccggacattcagtcccgaaaaaagcgggggctttccttgtgaaagttacggagaaaagagtttcagctgcgggagcacttctccgcgtcgatggccagaaccaccatcagggcacagagggcatcgcggtcgtattccgtctcgatggagtaggtgtcggtccagttcagcagctccttggagatgaccgcaacagtggagccgtcggcgcgctggatctgatagtcccactcagtccagttgccttccacgtgccagccgttgaagtcgagattgtaccggggctggaggaagctgaactctttctgcagcattcccacatactgttccccgatgtaaaactcaaacttgggcagccaggtcagcaccacctgcttgacggtggcaatgtgttcgccctgggcattgaggatgtggagcacatgcccccagctcagctggccctccacggtgaaaagcacggaaccatcctcggcgtaaatgtcgtagctgtcaaaccaggagaaaaaacgctgtttgaaatacagtttcatgacatggcctccttcgtggaatcagacggcttcatcggtggtttctgtttcagggacctgggcggtggtgcgcggggtcacggccagaggatcgggcagatcgccgttctggatctgctgcagcacggtgggaacaccagggaagaacttggcgatgccggaccctttgcagtgcaggccgtcgaagaaatcgctttcctccagaccttcgatcagggtggggtcatagctgccgtagagcggcacgccgttctgcgcgcagtattcccggacccagttctccacctcaaagaagccctgatgcagatccgtttcgttcagcaggtagttgtacaggtaagggtgccaggggctcagcaccagaatgaccgtggtgccctggctgcgggcgtaccggatgaaggcgtcaaaggccttgcactgggtctcgctcagcgtgtcgaagccctccatgtgcacgctgttgaaggtggcacaggcctcggcggccttggtcagtacctgctctacgggcaggttgcggaagttcacgtcatacagcacgctgccgtccgaccgcttgatggcggattcctggttcatgggatcgccttccacggggttgaactcgatgggattgccgtcctcgtcggtaatggtagcctgcccccggtttttgaagtagtaggtgacattgccctggaaataagcgggttcggcaagggctttccacagctctaccttgtccggttcctcgtaatcggtttcgacacctagaacgtttgtcagaaactcatcgtaaagctcagcgtcggcgcgggagtcaaaggcgttttcgctgtcgtaaaagacccagggatcgacgctccacaaaaggaccttgggagccttgccgtaggtgatcatcttgtaatagctggtcatgttgtcccgcacatcggcgccggtgacgcccatattgaaaaagctgtcggaacccaccagctcactggtgaactgcagcacacggctggacccgatgccgatgacctccggggcttcggccacatcttgggcgtacagctgcaccacctggcgctcgtccatctgctcgaagttggtgacgtcatagccctggagcatcagatccacgatgcggcggggtgccagtgcaccctggaacaggccgctgcagtccacattgtagctgaacgccaccatgaacaccacgatggggacgagaagcaggcatttgaccagtgtcttgccgccgaaaaacaacctgcgggcaaggcccataaaaaagcggcggatcaaagaaggcccctttttctttttggcggagcctgcttttttgccggtcccgcgggatgctccggtacctgtgcgctggatggcggcgggagcggtcggcatgggggtgccggatttctgtgtttgatttgccatggtttacatctccctctgcacgatcaatagttctggtagatgaatgcggactggccgaacaccgcgaagaacaaaatcgcggcgcccatggcgtagtacagcgtccagcgaaggacaaaattctgcgagcggatccatttggcaacgttgcggccgttgctttccacggcaaagacgatcagcgtgccgcaggtcagcatgacgggcagacgtccgtccagaccgcagctgaccagcagggaagtgacatccttccaggcggcttccagcccggtccagccctgagtgatgccggcatagacggcatagggatcggcgttgtaaagggcgctggcaaaaaagaccagcgtaccggcaaacagaaggtagacaacagcccgctggaaccaccggtgcaaaagatcgctgcggaaaatgggattgtaccggacgaggatctcacgcggcttgcgggtcacaacggacagcaccgagatggcgccgcaggcaaagccccacatcagatagcgccagtccgcgccgtgccacaggccggacacgatgaaaatgatcatcaggttaagcagatgccgggccttgccgcagcggctgccgcccagggggaagtagatataatcccggaaccagccggtcatgctggtgtgccaacggcgccagaactcaccgaaactggtggattcaaagggagaactgaagttctcaatcaggtcatagcccaggatgcgggcggcaccgagggcgatgtcgcagcagccggaaaagtccatgtacagctgcagggcaaacagtaaagaagccgccagcaggttggggccgctcatctgggagaaatctccgtatacaaaggagacgtacagcgccagattgtcggccagcaccatcttttttacatagccccacgccatgcggaaagcaccgcccgcgcagcgggaatagctgaagcggcgggatttttcgatctggggccgcagatggggatagcgctcgatggggccggtgaccagggtggggaaaaagctgacgaacatggcgtagtgcagcagattgggttccactttgcagcggcgcttgaatacatcgatggtgtagctgagggaggcaaaggtaaagtagctcaaccccaggggggcaatcaggttgaaggagtagggctccaccttctgtccgaacagcccggccagattgacgatgcccagatcaaacagatcccagtatttgtagaacagcaaaatgcccagggcggtgaagatggccgccagcagaaacaggacgcgcaccaccttgtttttgctgttgccgatggcaagaccgcaggcccaggtcaccacagtggcgcccagcagcaccgggaccagggcgcggttttccggcgtatagcagaaaaacgcatagctggcgatgagcaggaaatagggccgcgccacacggggcagggcatagttcagcactgccaccgcagcaaaaaagccgagatacaaaagggtagttattgacacgttacattcacatccagccgccgcaaagggcaagagttatctcacggttttgtaagtcgacagataaaaaacagctgtcccgcagcggaaaccgcaagcaccgcaggacagacgttttatttggacatccggttttccaggtcacggacgcgcttttccaggatggcgttggcctgggtcagacggcggcatttttccgccagctggctgatggcgatgctcagactcaaaagaaccaccagcacaaagcagaacatcagcaaaaataccaggttgaccggcatttccacgtccagcagatcccgcagcacatacaccacgtaggggcatgcggcaaagatgaccagcacgatggaaagccccagccacaaaaggctgtatttgacggtcatcaggccttttttcaaaaagataaagataatgaccagcagcgccagcgcacccgccagcatacaggccttaaattgtaaggtcatggtgatccctccctgtttgtgttgcccggcgatcagttcccggagccggggcgctggcggcggatggccagacggtcgatgataagggacatcgacaccttgagcatgtagtacacgctcttgaccgcggaaatgctggacacaccgcccagacgctcatgcatgaccacaggggcctcgcccacgcggaagcctttcagactggcagccaggatggcctccggctcgggataatccgaagcatagtgatcggcaaaaaaggcggtcatttcggcgttggtggcacggaacccgctggtcacgtcggcgaccttgcgcccgcacaggatgcggatcatggcgctcaggaagcggatgcccacccggcgcatgaaactggtctggaagccttcatgggtgatgaaccggctgccgatgcacatatccagcttgccggacagcaccggctccaccacggtggccagataagcggggtcgtgctgaccgtcgccgtccatctggacggtgacatcgtagccgttcaggcgggaatactgatacccgcactgcacgccgccgccgatgcccaggttgacgggcaggtccagatagttgtaaccatggctgcgcagcagttcagcgctgtggtcggtggagcagtcgttgatgacgagataatctgcccaggggcaggcctcgcgcagatgctccacaacttttacaatgttgtcctgttcgttgtaacaggggatcaatacaaggatcctggcggaagtattcaaaagggcacctcacatccggcacgccggggcgtgaccaaaacgattgcgaaatcacggcaggtcagtcggccttgccgtccagtataaacgtctccaggcgcttgagcagcatgctgcgccggtaattggcaagatagtaggccttggcgttttcgcccagacgggcgcgctcctcgggcggagcattgtacagatccagaaggctctttgccagggtatccacatcgcaggcggggcaggcaggcccacatccggcagcccggatggctgcatagcccgcgccgtccatgctggcaatgaccggtttgccggcggccatatagctggcgaccttggcaggcaccgtcagccccaggtcaggggagtcggacaaggacacgatcagggcgtcggccagggtggtaaagcggggaatgtccgtcgcggggacgctgccatagaaggtcacgcagtccccggcattcagctcggccaccaggctggtcagggcgtcccggctcatgccgtcgcccaccagcagaaaatgcaggttggcggcacccatggcccgggccctgcacaccgcccggatcactgtttccaggctctgggcaggggtaaaggtcccggtaaataccaggttgaaccgcccgccgaaccgttcagccagcgcggcgtcctggatgggctgggcgtaaaaatcctcgcagtactgcgggatgaccgccacatcggcggcaaattttccggtacgttcgtacaggcgcttctgcaaaggctcgctcatggcgatcagccggtcgcaccggcggtacagccagtcgctgactccctgggccaccgagcgcagaaactggtttttcaccggcagcacgctgtacaggttttccggccagatgtccagcacatagttgacgcaggggatgtggtggcgcttggcatagaccaccgcgggccagcacatgagtaccgggctggtgttgaagcagaacaccgcgtcgtacccgcccggcagacggttcagggaccagcgggcgttccagggccagctgacataattcagaaaaatacgcaccgaggtattgcccttgcggggaacttccttgcagcgaaagacctgcgcggtgcggaaatgctcttcaaaggggccgtgggagtcgtagccgtcaaaccactcgcccttggggtagttgggcaggccacacagcacatcgacctcgatgccgtccgccagaaagccctccacaatatcgttgatgcggaaattttccggccagaaatgctgtgtcacgaccaggatgcgcttgcgcatgcgggcaacgtcctttcagtttttgcgccacaccatcttgttgaccacgccggtgtagctctggatgatcttgaccactttgttggaaacatcctcggtgtaataaggtaccgggatgcccaggtcgccgtttgcgttcatggcgacggcggtctccacggcctgctccacgccgccctcggcaatgccggccagcacaaagcagcccttgtccaaagcctcggggcgctcggtggaggtgcggatgcagacggcggggaagggatggcccacgctcaggaagaagctggactcctccggcagagtgcccgagtcgctcaccacgcagaaagcgttcatctgcaggtggttgtagtcgtggaagccgagaggctcatgcagcttgacccgggggtccagctggaactgcatggcttccagacgcttgcggctgcggggatggcaggagtagaggatgggcatatcgtaggtctccgccagatgattgatggaggtgaacaggtcgatgaaattcttctcggtgtcgatgttctcctcccggtgggcggacagcagcatatatttgtgcggttccagacccagacgttccagcacgtcgctggcttcgatcttggcaaggttggcatgcaggacctcggccatggggctgccggtgacaaaggtgcgctccttggcggtgccctcggcgttcagatagcggcgggcgtgctcggagtagcacatgttcacatcggcaatgtggtccacgatgcggcggttggtctcctcgggcaggcactcgtcaaagcagcggttgccggcttccatatggaagatgggaatgtgcagccgcttggcgccgatggcggacaggcagctgttggtgtcgcccaggatcagcagcgcgtcaggcttctgctccaccatcagggcgtagctcttggcaatgatgttgccgatggtctcgcccaggtccttgcccaccgcgtccaggtaaaagtccggcgcacgcaggcccagatcctcaaagaagatctggttgagggtgtagtcgtagttctgccccgtgtggacgaggatctggtcaaaatacttgtcgcactttttgatgacggcagacaggcggatgatctccggccgggtgccgatgatggtcatgagtttcagttttttcatgttgaaacagtccttctgtcagaatatggggcccaacttacacctgcatggcaaaggtgtcggggtgctcggggtcgaaggcctcgttggcccacatgaccgtcaccatctcgccctcgcccacattttcgatgttgtgggtatagccgcagggaatatccactacctgcagcttttcaccgctgacccggtactcgatcacctggtccgagaagatctgccggaagcggatgacgccctcgcccttgaccaccaggaacttctcgttcttggtgtggtgccagtggttgcccttgacgatgccgggcttggaaatgttcacactgacctggccccgctcgggggtgcgcagaaactcggtaaagctaccccggttgtcgcagtgcatgttcaggtcgtaggcaaactcgtcctccggcaggtaggacagataggtggaatagagctttttctcaaagctgcccgccgtcagttccggcacggccagggtgggcaggccgtcggtaccgagagccttggcggcagcgccgccccgggccttggcaaaaccttcaatggtatcggccagcgcccccagagtggtgcggtgcacaggatgaatgcggcagatgccttcctcgtcccgcacagcctcgccccgctccatggcatccaggatgcaggccaccacatcgtcgatgtagaccaggggcagctcgtagccggggtcacggacctggatgggaagcccatgggcgatgttgtggcagaaggtggcgaccacgctgttgtagttggggcggcaccacttgccgaacacgccctccatgcggaaaacgtagaccggcgcaccggtgcgtttgccgtgctggaagatggcgtcctcggcctgctttttgctcttgccgtagtcgttgtccagcgctgcttggatgctggaagtcaccagcaccgggcaggaattgccggaagtctccagcagcgacagcatggtgtcggtcagcccggagttgcccgcatagaactcgctggggtccttggggcggttgatgcctgccagatgcaccacaaaagcagcccggcggcagtagtcggccagggtctcgggggtgtcgaccttttcaaagcagagcagggaagtgtatccccgggcggtcagttcggccaccagatttttgcccacaaagccgccggctccggtgatcaggatggggcttgcctttgtcacggtattacttgccaatcttcgccagctcctcctggatatagtcggtggtcatgatcttctggatggtctcctccacgttcaggcggcgggtgttgtggctggtgtagtcctcgtcggcctgggtgtggacctgacccttgatgaagtacttgtcgtagttcaggtcacggttgtcggcggacacgcggaaataaccgcccatgtcctcgctgcgggtgcgctcctccttggtcatcagcgtctcatacagcttttcgccgtggcgggtgccgatgatgcgggtgccggtgtcgccgaacagcttctgcaccgccttggccagatcgccgatggtggaggcgtcggacttctggatgaacaggtcgccgggattggcgtgctcaaaggcgaacatgaccaggtccacggcctcgtccaggttcatcaggaaacgggtcatgttggggtcggtgatggtgatggggttacccgccttgatctgatccacgaacaggggaatgacgctgccgcggctgcacatgacgttgccgtaacgggtgcagcagatgaccgggccgccgcgctgagcggagacgcgggcgttggcggtgatgacgtgctccatcatggccttggaaatgcccatggcgttgatggggtaggctgccttgtcggtggacaggcagacgactcgcttaacgttggcctcgatggcggcgtggagcatgttgtcggtgccttcaatgttggtgcgcaccgcttccatggggaagaactcgcaggacggcacctgcttgagggccgccgcgtggaagatataatcaacgccgggcatgacgtcgcgcaggctctggatgttgcgcacgtcgccgatatagaatttgaccttctggtaatactcaggatagttggcctgcagttcatggcgcatgtcgtcctgctttttctcgtcgcgggagaaaatgcggatctcgccgatgtcggtggtcaggaaatgcttgagcaccgtgtggccaaagctgccggtaccgccggtgatcagcaatgttttatcatgaaaaatagtgtctgccataacagcctcccacgggggacgcggccgggccgtgcatccccaatttgtctattctacacaagtttatcataaaccaaggaaattgaaaagccttgcaggttggaaaagcgtgtattttgtgctagaatagcaaacggaggaaaccgcgcccaaatgtgcgggtccctccccacagttaccgcaaaggaaaggaatgaaacaaccatgcgtgcatacgaacgctttttacagtatgtgggggtccataccacctcggaccccaccagcgccagccatcccaccacggcgcgccagtttgatctggccaaccgcctggccgaggaaatgaaggccctgggcatctccgacgtccgcgtggacgagcactgctatgtgtacggcgtcatccccgccaccccgggttacgagtccgctcacgccctgggcttcatcgctcatatggacaccaccgacgatgcccccggcgacaacatcaagcccatcctgcatgaaaactacgacggcggcgacgtcaccctgccgggcagcggcgccaccatgcatgtggccgacttcccgttcctggcggagatgaagggccagaccctcatcaccaccgacggaaccaccctgctgggcgccgacgacaaggccggcgttgccgagatcctgaccatggcggagcgcgtccttgctgagaaccgtccccacggcaagatctgcatcggctttacccccgacgaggaggttggccagggtgcggacctgtttgacatcgagggcttcggcgccgactttgcctacaccgtggacggcggcgacgtgaacgagatcaactacgagaacttcaacgccgcagccgccgttgtgacggtgcacggcttttcggtccaccccggcacggccaaggacaagatgaagaatgccatgaacattgccatcgagttccacaacgccctgcccgagtttgaccgccccgagcataccgaggggtatgagggcttctatcacctgaccagcatgatgggcgatgtcaccaccgccaagctgggctatatcgtccgcgaccatgacgcggcccgcttcacctcccgcaaggcggagatggcccatatcgcggcccgcctcaacgaccgttacggcgagggctgtgttgagctggaactgaaagacagctacttcaatatgatcgagaaggtccagccccatttccacctcattgaaaatgcccgcaccgccctgcgcaatgccggtctggaaccggccgagacgcccatccgcggcggcaccgacggcgcgacgctgagcttcaagggcctgccctgtcccaacctgggtaccggcggcttcaactgccacggacccttcgagtgcacctcggtggagaagctggacaaaatggtggaagtgctcctcaacctggtggacctgtacaaggcctgaaccttccggtaaaactgcatactgcaaaacaaaggggagccccgcggccggtcaggccgcggggctcccctttgtcatccctgccgtgtggcgcagaaatcccaaagggcaggggagggaatggttcagttggcgatggcgttgccggtgtagagctggtaataccggcccttttcggcaagcagctggtcgtgggagccgcgctcgatgatgcggccctgctccagcaccatgatgcagtcggagttcttgacggtggacagccggtgggcgatgacaaaggtggtgcgcccggtcatcagggcgtccatgcctttctggaccagctcctcggtgcgggtgtcgatggaggaggtggcctcgtccaggatcagcaccggcgggtcggccactgccgcccgggcaatggccagcagctgccgctggccctggctcaggttggcaccgtcgccggtgagcatagtgttgtagccgtcgggcaggcggcggatgaagccgtcggcgttggccagcatggcggcggccatgcactcctcatcggaggcgtccaaccgtccgtagcggatgttttccatgacggtgccggtgaacaggtgggtgtcctgcagaacgatgcccaggctgcgccgcagatccgcctttttgatcttgttgatgttgatgccgtcgtagcggatctttccgtcggcaatgtcgtaaaagcggttgatcaggttggtgatggtggttttgcccgcgccggtggaaccgacaaaggcaatcttctggcccggctcggcgtagagcttgatgccgtgcagcacgatcttctccggcgtgtagccgaagtccaccccgtcaaaggtgacgttgccctgcaggcgggtgtaggtgacggtgccgtcgtggtgggggtgcttccatgcccagacgttggtgcgctcggtgcattcctccatggtgccgtcggctttttcccgggcgttgaccagggtaacgtagccctcgtcggtctcgggctgttcgtccatcaggtcaaagatacgccgggcgcccgccatggccatgacgatagagttggtctgcatgctgatctggctgaccggctgggtggagtttttgttcagggtcaaaaaggagaccagcgtacccagcgtcaggcccgcgtaaccgttcagagccagcatggcgcccaccacggcacacagaacgtagctgatgttgcccaggttggcgttgatgggcatggtcaggttggagaaggtattggccttgtcggcactgtcgcgcagttcgtcgttgagcttgcggaactgttcgatgctcttttcctcgtgacagaacaccttgacgactttctggccgtccatcatctcttcaatgtaggcgttgaccgcgcccaggtctttctgctggcgggcaaagtgcatggccgagcgccctgcaatgcgggaggtgacaaagagcatcaagccgatcatggccagggtgatgagggtcaggggaatgtccagcaccagcatgctgacaaaagaggtgaccacggtcacaaaggagttgatgacctgggggatgctctggctgatcagctggcgcagggtatccacgtcgttggtgtacaccgacatgatgtcgccgtgggcgtgggtgtcgaaatagcggatgggcagcgactccatgtgctcaaacagctcgatacgcagcttgcgcatggtgccctggctgatgctgaccatgatgcggttgtaaccgtaagcgcaaacaatgcccagggcataaaagcaggcgactttcagcagggcgcctgccagcggggcaaaatccggggaggcggactgggtcagcggcacgatgtaatcgtcgatcaggcgctgggtgaacagcacgccctgtacctgtgccagggctgcgcccagaatgcacaccaccaccataaaaaagggaaacttgtagtttttcagcatatagcccagcacgcggcccagtgtggcgccgagctgccggacatcggtcggtttcttctgcggcatcattgtgcaccatcctttccgctgtcgccgggctggtcaaagtcgccgccggcgctgctttgcgcttcgtagatctcacggtagatccggttgttagccagcaggttttcatgggtgtcaaatccgctgacacggccgtcgtccaggaccaggatgcggtcggcgtcctgcacgctggaaatgcgctgggcgatgatgagcttggtggtgccgggaatgctctgggcaaaggcccggcggatgtttgcgtcggtggcggtgtccaccgcactggtggagtcgtccaggatcagaatgcggggatttttcagcagggcgcgggcgatgcacagacgctgcttctgaccgcccgagacgttggtgccgccctgttcgatccaggtgtcgtacttgtcggggaagcgctcaatgaattcgtcggcgcaggccaggcggcaggcttgccggcattcctcaaaggtggcgtcctccttgccccagcgcaggttatccaggatagtgccggtgaacagcacgtttttctgcaacaccacggccacctggtcacgcagcagttccatgtcatagctgcggacgttcttgccgcccaccttgacgcagccttcgtccacgtcgtacagacggctgatgaggttgaccagactggatttgcccgagccggtcccgccgatgatgccgatggtctcgcccgatttgatgtgcaggtcgatgtcctgcaaggtcttttcgccgctgccgtgcttgtaggagaaggtgacatgctcaaagtcgatgctgccgtcggggatctcagtctcgggcttggcgggcggagccaggtcgggacgttcgttgaggacctccacgatacgccgggcgctggcagcactcatggtgatcatgacaaagaccatggacagcatcatcaggctcatgagcacgctcatgacgtaactgaacagcgaagtcagctcaccggtggtcagactgcccgccacgataaagtgggcgccgaaccaggacagggccaggatgcagctgtaaaccacgaacatcatgacagggttgttgaaggccagcaggctttccgccttgacgaacagccggcagagattgtccgccgctttccggaacttggagttttcgtgatcctcccggacgaacgccttgaccacccggatggcggagacgttttcctgcacgctggcgttcaggtcgtcgtatttgcgaaagacctgatcaaagatgcggatggtgcgcagcatgatgcagatcagcgccgccgacaggatgacgatggccaccaggaagatcaggctcagccgcgtgctgatgaagaagcacatgatcatactgcaaaccagcatcaggggggaacgcacggcaatgcgcaggatcatctggtaggcgttctgcaggttggtgacgtcggtggtcatgcgggtgacaagcccggcggtgctgaacttgtcaatgttggagaacgaaaaggtctgtacgttctggtacatggcatcgcgcagattgcaggcaaaacccgacgatgcattggcggcgtagcggccggccagcgtgccgaagcaaaggctcaaaaaagccatgaacagcatcagaatgccgtatcggtagacctggccaaggtccccggcctcgatacccttgtcaatgatggaggcggtcacaaaggggatcaggacctccatcagcacttccagcccggtaaacaggggcgccagcagtgacgcctttctgtattgccggacctgtgcaaacagtgttttcatcatgtgttttccctcccggcggtagtttgtttcagattgcggagcatggtgttcagcgcccgttcggcggcttccacttcctgtggcggaatgccccggcacagcccggcgctgtgttccagcatctgctcttcgatgcggcatctgagttccagtgcccggcgggtggggatgatgcgttttttgcggtcgtcaccggggaaaaactccatctccagataccctttgcggcacagggacttgagcgtcgcggacagcgcagccttggacacgcccagctgttcgtgcagctgcgccgcgcagaaatcccttccggagtgctgtaccaggtaacacaacgtcagcccttccgacgtagaaagtcccagcggccgcatctgtgcacgcccgtactgctccagcatcagattcagccggcgcagcaggggaatgagttcggtcgacatggcaaagaaacctcctgtccgatgttgcggtgtcgggcaaatcgtaaacttgtgaacggttcgcctgttgactattatacggattcccgcttgaatgtgaattcagaaaatgctattattaataacaaagacttattaatcaagacttgattttcccgtgggaggacacaatgaacacatttcaactgtcctgttttctggctgttgccgaaacgctcaattttgcccgtgcggcggagcagctgcacgtcacccagccggcggtgacccagcagatccattccctggaaaaggaactgggtgtcacgctgttccaccgtaccacccgcatcgtgcgcatcacaggggagggccttgcttttctcggggatgcccggcggatggtggatatctccatccaggcaaaaaagcggtttgagcatccggggcaggaggccatccgcaatctgtcggtaggctgccacgggtacgcgcagctgtttttgctgtcgcccatgctgcggcagctggcgcagcagtacccggacctgcacccggggctgcggacggtgccgtttcagcatctgtaccgcatgctggacgagggggaagtggaccttgtgctggcgttccgccagtcggaaacgcccccggcggccaagtgcgtttaccgggaactctgccgcgtgcccatggtctgcctttgcgcggcggataaccctctggccgggcaggacaccgtcacggcggaggatctccgtccgcaccggctggtcctgctggacccggcccgcgcccggctggaagctgcccagatgcaggggcggctgatcggggaccgcccgcccgccgagctgtatttctgtgagtctgccgaagccgccgtggtgctggtggaggcaggctttggggtgtcggtattgcccgacctgtttatcccacctgatctgtccatggcgcgtattccgctggagggaacggagccggtctccttcggcgtgtactataaacccagagccctccagaacaacccggccctcaaaagccttgtgcatatgctgcggaacgaaaactggccccgacagcagctgcaaaaagagaaactgcaaaacgccttgcccccatccggggaagggtgatatagtaaaaaggaacttgatctgcccaccgaaaggaagttaccgatatgcaaaaaacagacagccgctatgggatgtacctgtccattctgaaagaagaactgcttcttgccatgggctgtaccgagccggtggcggtggcctatgcggcagcctcggcgcgcagcctgctggccgaccctgccgctctgactgactgtgagctggacgtcagcggcaacatcattaaaaatgtaaagagcgtcattgtgcccaacaccggcggcatgaaaggtctggaagccgcggcggcggtgggcattgcggcgggggatgcggccgcgggtctgcaggtcatctcccatgtcacgccggaagggcgggacggcatgcacaggctgctgtcggactgccgcttcacggtcagcccggcccagagccccaagattttttacatcgaggtccgcctgaccactcccaccgagacggcccgcgccgtcattgaggatttccataccaacctgacctgcctggaacataacgggcaggcggtgccggtcccggcctcggcctgcggcgagggggaggaagccgcccagaccgatcgctccggcatgagcgtggagggcatcctggactttgccgccagcgccgacctggacgatgtgcgggaactgctggaacggcagatccgctgcaacatggcaatctcggaggaaggcctgacccatccgtggggcgcacaggtgggccgcaccatgctcaagggcgggaacgtggatgtttacacccgggcttcggcggctgccgccgcgggcagcgacgcccgcatgagcggctgtgaactgccagtggccattgtgtcgggcagcggcaaccagggcctgaccgcgtcggtgcctgtcatcgtttatgcccgggagaaaggcatggagcacgacaagctcctgcgggcgctgctggtgtccaacctcatcaccatccaccagaaaaccagtatcggccgactgtcggccttctgcggggcgaccagcgccggagtgggcgcggcctgcggcatcgcctggctggacggcggcggatatgaggagatctcccacaccatcgtcaacgcccttgccattttgtccggcatggtctgcgacggggcaaagccctcctgcgcagccaagatcgcggctgcggtgaacaacggtattttcgggtatcagctgttctgtcagggactgcagttctatgccggggacggcatcgtcaccaagggcgtggagaataccatcgccaatgtgggacgccttgccaaccgcggcatgcgcggcaccgactgcgagatcctggacatcatggtcggacgctgaccgctgctacatttaataaaacaaacagccgcccgctgcgaatcggttcgcagcgggcggctgtttttgtctgcctggggtagggggagagaagaacttacttgttggtgatctcctcaacgctgaccttgcggtcctcacgcagggagagggtagcggcatcggcggtggcgatggcagcgcgggcggcctcgccggtcatcaggggacggaactcgtcggtgatggcatcgccgtgcatcacgccgttgaagaactccatctcgtcgtacatgatgctgtgcagccacatgggaggtttcttgccgggatggccgtactggatggcgccgtccatctcggtgctgtggtagatacgggtgcggtcgtcgtcaatctcctggttggcgtggacgcagtagtgttcctcggtgccgtcggccagcttgacggtcatgccggtgttgcacatgtcaatgcggatggcgcccagggtgccctggatcaggacgtagtgctcgggccagtggaaggcggaaccccactcgcacagggcgtaggtgttgttgccgaattccaggttgatgagcagcatgtcgtcctcgtcaccgaactgaggtccgctgtgggcgacgttgccgccggtcatggtcacgcgcttggcgggtcccatgatgaactggatgcagtccagctcgtggatgtgatggtagaggtggccgccggacttggagcggatcttcttccagctgacggaaggctgcggctcttcccagccgttgcgggcggagtgggcatacagcaccttgccgatcttgccttcctggatcattttctttgccaggcggacgccgtggaagaagttcatgacatggccggccataaagacgacgccgttttccttgcaggcgttgaccatctcgtcgcagtcagcgtaggagagggcgatgggcttttcgcagaagacgttcttcttgtggcgggcggcggtgatgaccggctccttgtgcaggtagttgggcgtggcgacgatgaccgcgtcaatgtcggggcgggagcaaaggctctccagatcttcctcggcgtcgcagcccagttcctcggcaatggtcttgccgttttcggggtcatagacggcgacaatctttgcgccctctttctgagccatgatgcgtccgagttctgcgccgaagtaaccggtgccgacgattccgtaaccgatggttttcataataacattctcctattcaaaataagtgttggtgttgaagtttttacttgaccgcgccgtcggaaaggccgccggccagcttgctctggatgaagcagaagaagatgatggacgggacaacgacgatggcacaggctgccatcagggaaccccagttcaggatgtccgcgccttccagcgttttgaccgccaccgagatggtggtcttgtcggaactgctcatcaggatcatggagtagaggtattcgttccaggcgttgataaagacgtagatggcggtggaaacgatgccgggggcgaccaggggcaggaccacccggacaaagacctgcatcttgttggcgccgtcgatgcgggcggcttcctcaatgccgataggcaccgttttgaagaaacctaccagcatccagactgcatagggaacgctgaaggacaggtagacgagcaccaggcccacgcgggtgttggtgagccccagctttgccatgaccatggcgtaggggatgaccagcatgatggacgggaacatgtaggtggtgaccaggatcttggtcatcaggtcgcccagcttggggaagaaacggacgacgccgtaggcggccagcgaggagatgatgatggcgaccaccgtggtggcagcagcgatgatgacgctgttgcggatgttgatggtaaagttcagggtgatgagaacggtcttgaagttctccagtgtccagtcgatggggaagatgcgggtggggttgttgagcatctcactgctgctcttgaaggaggaaaccagcagccacagcagcgggaataccgcgaacaccgacaacaggatcaggtagatgttggacacgatgttgccaagacgcttgccttttttcatgaccggtcctccttctcccagcgggcgatgatggtaaagtagatcaggctgacgacgatcaggaacaacagcagcaggatggacgccgccgaggcgcggccgaccagcttgttggtccagcccagttcatagatgtagatgggcatggtggtggtgcgccctgcggggccgcccgccgtcgtcatgaagatgatgtcgaagttgttgaacacccagatggtacgcagcaccaccagcaggccgacaacgaccttgatgtgcgggaccgtgatgtggatgaaggactgccaggcgttggcaccgtcaatgacggcggcctcgtactgatccttgggaacggtctgcagtgcggcgtagacgttgaccatgatcatgggaacgccgaaccagatgttgatgaacaccagcgtaggcaggaccaggttgggatcactgaggaactggatcatgctgtcggaaaaaccgaggtccatgagcatggtggggataaaaccctgaatgccgttgagcatccatttccagaccagggcgatggcaacggaggggaatgcccaggggatgatcatgcagatgcggtagatggggcgggtgacccggttggagatgcggttgagcgccagggcaccggtaaaaccgatgaacagctggccgatcaggctggcggccgtccacacaagcgtcgtgccgaaggcgcggagaaaatcggggtcggacaggatcttgatgtagttgtccaggcccaggaacttgtagctggtcttgatgagcgtcttgttggtaaagctgtacagcagcgtcgaacccagcgggtagacgagcagacacagcacgaccagcatggcgggtgccacgaacagccaccgggtcaggttgcgatcctttttgtatggggcggatgcggcccgggtatgtatgcctttcaatttggtatcctccctgtcagagccttgcccgcaggcggtagagctggcggcgcaaagcccgttggcttattggccggcacatgctgcggtccgacataatgcaggagggggaagtttttgcttccccctccctgcgtttcaaagtcaggcgatcatggtgtcgaagatctcgttcagacggtcttccgcagcctgagccgcagtctccacgtcggtaccattcgtgatgatatcctggaacatttcctcaatgacaccctgggaagtcagatagctggcctgagcggtaggaccatgctcaaagccgatggcgtggccggtatcaacggcggtctggatgatgtccacacaatcggagtactcctgaatggtgggatcattgagataagcctcgttggtggcaatgtcgctcagtgcgggcagcatgccgacgggaacggcgtggatgaactcgatgtaattgtcgtcctgatacaggtactcgataaaggccttgcagatctcgggatgttcggagttcttccaaacgaccagaggaatgtgagaggtctcggcactgtaaatcggatcgtccgcgttcatgcggggcagcggagcgcagcgcacatactcggcaatttcgggcgtgttgctctggacgccgctgatcatgaagccggagttgaagtcgaaagcggtcgtgccctgatagaacaaggtggcgtggtcgttgacggtgtagttgatggtctcggcgggggagcagttcttgtagacgtccacccagaacttgatgccctcaatggcttcggggctggtcaggttggcggtcaggtcatcgttgagcaggctgccgccggcgctgaccacgtagtagttgaggtaacggctgcaaagcaggtcgttggggttgcaggagaacgccgcgccgtagacgccgtctttggtcagggcaacggcagcgtcatagaactcgtcccaggtctgggggacttccaggttggcggcttccagcaggtcggtgcggtaccacatgacctgtgcgtgagagtagtagggaacgccgtacacggcgccgtccacgctcatatcggccagcgcattctcagagaagcggtcgcggccgatgctgtccacgatatcatccatgggggagatgacctcggcgttgatcatttccacgacctcgccggtgccctgggcggtgctgatgtcgggcaggtcgccggtggtgatgccggcattccacttggtgttgaagtcaccccaggagtaggtctcgatgttgatcttgacgccggggttggcagccatgaaagaatctgcggctttctggatggcatccatgcgtgcgccctgggtgaaggaatgccagaacgtgatctcgccttccaggggagcgtcagtgtcggtggcggtagaggtctcgggggaggtggtggtgctgccttgcgaggtgtcgccgttgcatccggcgaacagcgacgctgccataccgacagccaacagggacgctaatatttttttcatgtctttgtatcctcctgatttggtttgtgtcagttccggtaagccggccgccggaaccattgtttcgatgcgttgaaacgctttgatcagggcgtttcctgttgactttattatacggaatcccgcccctgctttgtagaccaaaacctgcgcaatgctatcacaaaacgcttaatttgtgattgtattgtttcaaagtgtacaacgattcgtccgttttttgttcattttgctaacgtctggtcacatctcgtgggaggtgcgccgatattccagcggagaaatgccgaacacttctttgaagcatttggcaaaatagctgggggcctcatagccaagctcgtaagcgatggaggagatcggctcgttggtcaccagcagcttgcgcgcggcgttggtcattttggtgtccttgataaagtcgtacagggtttttccggtctgttccttgaataggcggcgcagggtgctttcgctgaacccggccagttcgcacaattccttgctggtaaagtttttctccggatgcgtgatgatggtatccacaataatggtaatgcgggggtccttgttggtacgtgccgatttttccgcccggtgccggatgctctgtacatcaaagtgagcctcggtattgcggcggtcctcctccagggtggagtcgcggttgaagttttcctttgatacccgggccagctgtgcgcagatcaggttgaggtatccgcggatctccagcatcttgaaggtactgcgggtcagggcgctggcatatacccgttcaaaataggaaagcatgtccggcgtgtcggcaaaattgtgctggatggggaccttccacagcatctgaagcatgtcggtgctggccagctggatggacccgatgaaacggatgctgataaaaacgatctcctccttggctgcgcaggacaggatgcttccctggggaatgtaaaacacatccccggggccgacttcataatgcgtatcgcccagggaaaaggtagcggtacccgacaccacgtaccgcaccagagaataaggtaccggcgcgctggggtagacccagttcttggaaaaacggtatttgtctacatagataaagatgggatagtagtcagaatagatggcttccatggcagatactcctttctctgtgcgggttgccgtgccgacggcgttccctgtgcccgccgccgaaaagaaacagggggattcggcggtgaaaggccagaaaacagaccgggacacggggcaccctccgcggcgcacatttgaattttccgctttcagtataacagaatcacggcatttgtgtaaacgatacgtttattttgtgagcgtatttttttatagattggcgttttttctataacaccccgccgggcggattggtatactgaaagcagaaggcggcgcggtgttgcccaagggggaaataccggcccggataacggaatctgccgcagggtgcggccaacaatacaccaaggcaaggagcgttcgtatcatgaaagacatcaacaagtatcgcggcgtgatcccggcattttatgcctgctacgacaaggacggcgagatctccgtggagggcgtcaaagccctgacccgtcacctgatcgccaagggcgtcaagggcgtctacgtgggcggttcctccggcgagtgcatctaccagcaccccgatgagcgcaaggcggtcctggaagcggtgatgagcgaggcaaaaggcaagatcactgtcattgcccacgtggcctgcaacaacacggcggactcggtggagctggccgctcatgccgagcagtgcggcgttgacgccattgcggcgatcccgcccatctacttccgcctgcccgagcacgccatcgtggactattggaacgctatgagcgccgcggcgcccaacaccgatttcgtgatctacaacattccgcagctggcaggcaccgccctgaccatgagcctgctgggcgagatgctgaaaaatcccaacgtggcggcggtgaaaaactcctccatgcccacccaggacatccagatgttcaaggacgccggtaccgcagcccgcggcaaggacggctttgccgtgttcaacggccccgatgagcagtttgtctccggccgtgtcatgggcgcggacggcggcatcggcggcacctacgccgttatgcccgagctgttcctcaagatgaacgagctggtggacaagggcgaaaatgaaaaggcccgcgacctccagtatgaggccgaccgcatcatttataaaatgtgcgaagcccgcggcaatctctatgccgtcatgaaggagatcctgcggcggatgtacggcctggaactgggcggcgtgcgtgcacccctgcccaacctcaagccgggcgacgagaaggtcgtcgccgaggccgaggccatgatccgtgcggccatcgccaaagcggcagcgctgtaatatgacccgagacccggcgttttccggcccatggcggcacggcggagcgccgggttttctcaaatgatggaggtacctgccatgatcaccgatcacctcaacaatctgtcccgctaccggggcctgcatcccgccctggataccgccattgactggttggcaaatcatgatcttgccgcgctgccgctgggctgcaccgagatcgacggccgccgcgtttatgtcaatgtgatggatgcggccctgcgccccgccgagggtgccgagtttgaatatcatcgcctttatgccgacctgcagatcaatctggaaggcagcgaatcctggggttgggcctctgacgcacagggggacaagccttttgatgagcaggcggactgcggttttgccgccggtcccgaacattgcagcggcctgctgggggaggggcggtttgcccttttcctgcccggggaataccataaacccagctgcatcagcagccggtcgtcgtcggtgcgcaaagccgtggtcaagatccggatgggcgaataacagagcatagaaaaggagtgcgcagctatgcagaaagaagcagttttccaacagatcgaacacggtctgatcgtttcctgtcaggcattggagcatgaaccgctgtataccagggaaggcggcgtcatgccgctgatggccaaggccgccgccatgagcggtgcggtgggcatccgcgccaacacggtgcgggacatcacccagatcaaacaggtggtggacctgccggtcatcggcatcatcaagaaagactaccccggcacccctatgtacattaccgtgaccatgaaggaagtggacgaactggtggcctgcggtgtggatattctggcggtgcaggggacctcggccctgcggcccgacggcaagacctcggcggagttcatccgggagatcaaggcgaagtatcccgaccagctggtgatggcggacattgccaccgaagaggaggccatggcctgtgccgaagccggagcggattttgtcggcaccaccatgcgcggctatacccccgaaaccaaaggcattgacgagacggactttgcctttatcgcacgcctggcacagacctgcccggccaaagtcattgcggaagggcatatccattacccggaacaggcccgcaaggctctggaagccggtgcctttgccctggtggtgggcggtgctatcacccgcccggcagagatcaccgcacgctttaccgcggcgattaaggatgtgaagtgacatgaaatattatctgggcatcgatatcggcggcacggcagtcaaactgggcctggtggacgagaccggccgggtactccgccgcggggaggaaagcgtcagctttgacggttaccgtacccccatcctgaccacggtcgtggcggcggcccggaactttgccgggcagtgccgcgccgaaggcctggaagcggagggcgtcggtgtttcggcaacaggccagatcgacagcgtgcggggcgtggtggccgggacctgcggcagcctgcccggctggaccggtgcgcccatccgggaagaactggaacaggctctgggcctgccggtgacggtagccaacgacgccaactgcatgatcctgggcgaggcctggaccggtgcggcccaaggctgcactgatgtggtgggggtgaccatcggcaccggcctgggcggcggcgtcctgacggcgggccatcttctggaaggcgcccgcggcctgggcggcgaactgggccatatgcgcacccatgccattgatggcgtggactgcacctgcggtgccaaaggctgctgggagcggtatgcttccacctcggcgctggtgcgggcggcaaaggaactggaccctgccctcgacagcggccgcgcgatttttgctgcggcggagcaggagaacgctgccgttcttgccctgctggatcgctggatggacgagatcgcggagggtcttgcggggcttgtgcacatctttaacccgcagtgcatcctgatcggcggcggtgtcagcgcgcagcaggaacttctgatcgatcctcttgcccggcgggtgcgggataaggtaatgcctgccttttcccggaagctggacgtccgtgcggcggcgctgaaaaacgatgccggcctggtgggcgcggtgcggtatttcctggacagaggactgcaaaaataaataagcaatagagatttctcccggatctttccctatcataaagcactttgggccacaccctgtttgcggtgtggcccaaagtgcttttatgaaattctcggtggcttcaaggagaaggaaggcgccccaaagagcaaaagaaaagatgcttttcaagcatatgcagctatgagaataaggtattcgacataggacggcatggcccgtataatgggaacaaacgaacaggaggtacgcagtatgcagtatcgcaagcttccccatggggatgagcagatcagcatcatcggcatgggcaccagctccatcggcaaggccggggacaaggagatcgaagccaccgtggcaatggcgctggaaaacggcgtcaattactttgatatggcatcgtcggacgcggcgccattcccggcttttggccgtgccatccggggccggcgggaaaaggtgtattttcagatccatttcggggcggactaccacaccgggcagtacggttggaccaccgacctggatgtcatcaagcggtcggtggactggcagctttcggcgctgggcacggattatatcgactttgccttcctgcactgcctggatgaacaggacgacctgcgcaccgcactgaaaggcggaacgctggagtatatccgggaactcaaggaacagggcgtggtgcggcatatcggtatgtcctcccacacgccggcggtggctcaggcggccctggacgaggggattctggatatgctgatgttcagcatcaacccggcgtatgattaccaccgggaaggcgagttcgccatcggtgaggtaggggagcgcatggccctctaccgccggtgtgaagccgagggcgtgggcatctcggtcatgaaggcgttttcggccgggcagctgctcagcgatggaacatcgcccttcggccgcgctctgaccgagtatcagtgcatccgctatgccctggacaaacccggcgtgctgaccgtgctgccgggcatccgcaaccgtgaggacctcaagcgcatcctcggttttctggatgcctcctctgaggaaaccgattactcgatcctgggtacctttgcaccccaggaggcggagggcgtatgcgtctactgcaaccactgccagccctgccccgcgggactggatgtggggctcatcaataaatactatgacctttcccgggcaggggacgccctggcccgcgaccattacgccaatctcgcccgcaaggcgggggactgcgtcggctgcggtcactgtgacaagcgctgccccttccacgtggcccaatctcggcgcatgaaaaccatccgggactatttcggtgcataaacctctcgaccccggaatttatgccataaaatcaaactcccgccccgcaggacgtaccttgcggggcgggagtttttgcatccgtgtgtgccggagtacccgttgcgccccggacaccgggaaccggacgtgacaaacaaaaaaacagcgccgaaccttacggttcaacgctgttttggtgcggaagatgggacttgaacccacacgtcatggacacacgcacctcaaacgtgcctgtctgccgattccagcacttccgcataagcgacaccaacgtttccgtggtatcgcaaaagcaatgttagcatatccgaccggtaaaagtcaagtctttttgcaaaaaacattgcaaatccgcacggcgttataggaaaaccaagccgcgaaattccggcggcaaagtacagcagccgtgtgatgggggactctccacaggggaaaactccgaccttgccgctcttactcggtgaacatgggggtggacagataccgctcgccggtgtcgggcagcagggcgacgatcatcttgccctggttttccggccgctttgccagctgaatggcagcccatgcggcggcgccggagctgatgcccaccaggaagccttccttgcgtgcaatgtcgcgcccggcggcgtatgcgtcctcgttggtgacggtgatgatctcatcgtacacggtggtgtccagcgtgttgggtacaaaacccgcaccgatgccctgcagtccgtggggaccggccttgccgccgctcagcacgggggaggcagccggctccaccgcaaccacccgcacattggggttttgcttttttagataacggcccacgccggacagcgtgccgccggtgcccacgcccgccacaaagatgtcgatctggccgtaggtgtcgtgccagatctcgggaccggtggacgccatgtgcgccgccgggttggcggggttctcaaactgtccggggacaaagctgccgggggtggcggcggccagttcattggccttttcaatggcgcccgacatgcctttggcgcccggcgtcagaacgatctcggcaccgtatgccttgagcagattgcggcgctccacactcatggtctcgggcatggtcaggatgacgcggtagccccgcgcggcggccagtgcggccagaccgatgccggtgttgccgctggtcggttcaatgatgactgcgccgggggagagcttgccctcctgttcggccctgtccagcatggacttggccacgcggtccttgacgctgccggcggggttgaagtattccagtttggcaacgatgggggacttcagtccctgtgctgccgaatagtttgacaaatataccaggggtgtatgcccgatcagggcgctgataccggatgcgattttcatgcgggaaaccctcctgtccgcgttgtagtgacacgcccggggcgtgcgcaactattataccacaagccgccgcccgcgcacagtatcggccggtgtaaaataatgccgccggtcagggcagggataagccgtccccgcgccgcataggcatacggtaaagaccgtggagagaggaggacgggtttatgaaaaaacaaccggggaaacagtcccgccggtgcctgggctgtgcggtgctgctggtgctgctctgcggtatggcgctgtatctgggggcaaaggtttttgcaccctttgaaccggaggagggcaccatccccaacgatgtttttgccgtccagggggaggcagaggacagcgtggaggcgatgatgctcaaaatcgtctgcctgacctttgacgacggaccttcccccaacaccgagccgattctggaaattctgagagagaaagacgtcccagctaccttttttgtgaccgcccaggacgtgaatcaggactatctgcccctgctgcatcaggtggcggaggaggggcatcaggtggcgctgcacagtgccacccaccgttactccgatatctatgccagcaccgaggccttctggctggacatcaaggcgctgcgggaagcaatttcgccctatgtggacatcgattcggtccactggctgcggttcccgggaggcagcaccaacacggtcagtcacaaatacggcggcagcggcatcatgaaacggctcattgcccaggcggaggaaaaaggctacgaatggatcgactggaacgtgtcggcggaggatgccacctcccagcatccagacgcggcgcagatcctggaaaacgtccgcgccggagccgagggccgggacctctgcgtggtgctgatgcatgacacggcaaagaccgacgccaccgtggaggccctgccggacatgatcgactggttcctggcacaggggtatcacttctgcactgtggaacagatgtatgaaatgcgggacggcggctgaacaccgttgcaatttcacaaataaaatatacagaaatacgaaagttttgaacaagacgtcaaaaaaatcacaaaattggattgcaacggcggtctcggcagggtataatgaatgcggccccaaggccgaaaaaaggagttgacttttgcatgcaccgccgtacccggacgtttcagatcgcactgtgcggtgtgttgggcgcgctgagcgtggccatactggcaatgggcggattgatcccccttgccacctactgtgcgcccatgctagcgggcatagcgctggtgccggtgctgggggaatgccctcagaaatacggctggatgacctgggcggcggtgtcggtgctggcggtcctgctggtgccggaccgggaactttccctggtctatgcgctggtgctggggccgtatcccatgctcaaacgccgcatcgaccgcctgggcggcgctttggctcgtaccctgtgccggctgatcgtctttaatctctcggtgctggtctgttatggatggctgctggtggtttttcctctgcccggcctgatggaggaattcaccgcgggtggtgcgctgctgaccgcagccaccctggtcaccggcaacctggcatttctggtgtacgatgcggccctgcgcgccgtggcggtgctgtatgcccgccgtctgcgtccgttgcttcgctttctgcactgagtaaggaggaaccgccatgaaacaggatacccggaagctgctgctgaccgttttcggcgcggttgtggatgtggcccttgttgctgtgtgggcggttctggtgtttgcgccggaacctgtcctgagccgggtggagctgcgccttgcgtttccgattttgttcgcgcttgccatggtgtattcttggcttagaaagacctggcagccggaacaccataccccaaaggcggtaaaaatcgcagccgtggtcatgatcgccgtgctgctgatccgccttatctggatcacctttgcatgacttctcccgctgaccctgcggcgggtacgccgtgaccgccggccggcccggaaaccggcaacgaaaaagaaaggactgttgcgttatgtggtttgacaatgccgtcatctatcagatctatcccattggcctgtgcggggctccgctgaaaaacgaaggccccgatcccgaacacccccaccgcctgcttcgggtgctggactgggtggaccatatcaaggatctgggcgccacctgcgtgctgttcaatcctctgtttgagagcgacgcccacggttatgatacccgggatttcaaccaggtggactgccgcctggggaccaacgacgatctcaaagcggtgtgcgatgctctgcacggggcggggctcaaggtcatgctggacggcgttttcaaccatgtgggccggggcttttgggcctttgaggatgtgcggaaaaaccgccacgccagccgctataaggactggttccacatttcctttgacggtgataccaactacggcgacggcttctggtatgaagcctgggaaggctgcaacgagctggtcaagctcaacctgcacaatcccgaagtccgtcagtatatctttgatgcggtgcgctcctgggtgcaggaatatgacatcgacggtctgcgcctggacgtggcctactgcctggatctgggcttcctggccgaactgcgcagcgtgacggacggcctcaaaccggagttcgctctggtgggcgagacgctccacggcgactataaccgctggatgaacgaccatgcctgccattcggtcaccaactacgaatgctacaagggcctgtattccagcttcaactcgggcaatatgcacgagatcgcatacagcctgaaccgccagttcggctccgagcagtggtgcctgtacaccggcaagcatctgctcagttttgtggacaaccacgacgtcagccgcatcgccaccatcctgactgataagaactgcctcaaacccatctacggcctgctgttcggcatgccgggcacgcctgcggtctactacggcagcgagtggggcgtggagggcgacaagaaaaacggcgaccccaccctgcggcctgagatcgctctgccggagaaaaacgacctgacggagtggatcaccgctctggccggggcgcgcactgccagcccggccctgtgcaatggcagctaccgcaatgtcatggtccagcccaaacagctgatttttgagcgccgctgcggtgaggaccgggtgctggtggccatcaatgccgacgacaaaccctatcacgccgacttcaacgccgaggcgggccgggcggtcgacctcatcaccggcgacgcccatgacttcggcggcggcagcgacctgcccccgtactcctgcatgttctggaaaacggagtaagccttgccccatagcctgacgaaacggggagggaaatcacgcacatgcggccgcggccgataccgcctccccatgccgccgcccggacaggcggacgatgaaatgcaaaaaagcccccggcggatcggaaggttccggtttgccgggggctttgctgtgcgttactgtaaggggagagaggaaacggttggaaactcagcgcaggaccagtgcgccgttctccacgtccacggtgagggtgtcgccgggaacgcggctgccgccgatgatctccttggcaatcatggtctccacgttcgcctggatataccgcttgagcggacgggcgccgtagatgggatcgtagccgttgtccacaatgaaagccttggcggcgtcggtgacgaccagggtgagctgcttgtcagccaggcgcttgcgcaggtcgttcagcatcaggtcgacgatgctgccgatctcgtcgcgggtcaggctcttgtagtagacgatgtcatccagacggttgaggaactcgggacggaactgccgcttgagcagctgggagatcttctcccgggcctcggcggacagctcgttgccgccctgggaacggctgtgctccagatcatccagaatgatgtcggagcccaggttggatgtcaggatgatgacggtgttcttgaagtcgacggtgcggccctggctgtcggtgatgcgtccgtcgtccagcacctgaagcaggatgttgaagacgtcggggtgggccttctccacctcgtcgaacagcacgacgctgtaagggcggcggcggacggcctcggtcagctgaccgccttcctcatagcccacgtatcccggaggcgcaccgatcagacgggagacactaaatttctccatatactccgtcatatcgatacggatcagattcttctcatcgtcaaacagggtctgggccagcgccttggccagctcggtcttgccgacaccggtgggaccgaggaacaggaagctgccgatggggcggccggggttggcgatgcccgcacgggaacgcaggatggcgtcggaaaccttgcggacagcctcgtcctggccgatcacccgctgatgcagcacttccggcaggcggagcagcttctcacgctcgccttccaccagcttctccacggggatgccggtccagcgggccacgatgcgggcaatctcctcgtcggtgacgcggtcacgcagcaggctggactctttcttttcggcggccagcttttcctgctcttccagttctttctgcagattgggcagcttgccgtactgcagttcgcccgccttggcgtaatcgccggtgcgggtggccttttcaatctcggccttggtctgctccacctcggcgcgcaggctctgtaccttgccgatggcgttcttctcattttcccactgggcctttttgctgttgaagctgtcacgcagctcggccagctccttctccagagccgccagacgctgctgggacatggggtcggtctccttcttcaggctgacctcctcgatctgcagctgggtgatgcgatggttcaggtcgtccagctcggcgggcatggaatccagctcggtcttgaccatggcgcaggcttcgtccaccaggtcgatggccttgtcgggcaggaaccggtcggtgatgtaccggtcggacagggtggcagcggcaatgagagcggcatcctggatcttgacgccgtggaacacctcatagcgctctttcaggccgcgcaggatggagatggtgtcctccaccgtgggctcgttcaccataacgggctggaaccggcgctccagagcggggtccttctcgatatattcgcggtactcgtccagagtggtggcaccgatgcagtgcagttcgccccgggccagcagaggcttgagcaggttgccggcgtccatggcgccgtccgtcttgcccgcacccacgatggtgtgcagctcgtcgatgaacaggatgatctggccttcgctcttcttgacttcgttgagcacgctcttcagacgttcctcaaactcgccgcggtacttggcgcccgccaccagcgcgcccatatccaggctgaaaatgcggcggtctttcaggttttccggcacgtcgccgcgcacgatacgctgggccaggccttccgcgatggcggtcttgccgacgccggcttcgccgatcagcacgggattgttcttgcgcttacgggaaagaatgcggatgacgttgcggatctccacatcacggccgatgaccgggtccagcttgttctgcttggcggcggccaccagatcggtgccgtatttttcaagggcgttgtaggtctcttcgggattgtcgctggtcacgcgctggttgccgcgcacggcggacagctgctgcatgaacttttcctgcgtgatgccgaactggcgcagcagttcgcccgcggccttgccggggcgctgcagaatgcccaggaatacatgctctacgctgatgtattcgtccttcatctgcttggcctggtcctcggcggcgttcagcgcgcggtccaggtcaccggagatgtaaactttctcggggtcacggccggaaccggtcacccggggcagggcagcgaccttgtcgactgcggcggcggaaaagctgcccggatcaacgttcattttggtcagcatctgggggatcagcccgtcggactgctgggccagcgcggccaggatgtgctcctgctccagagcctggttggaatattcaacggcgaggcgctgcgcgctctgcagagcctcgatggttttttgggtgaattgattcatgttcatatcgcagacctcctttggattggacacgatgtgataccctggcagacaaacgcgcggactgctaaacactcgcttgcgctcctgcgttctctgcggtcgagcatgggagaaatgctgaactgtgagaaggaatgatttgaaatttcacattttagcactctacttgcctgactgctaacattgtagcacgccgggctgaaaatgcaagggctgacacaaaatgtttacaattttacctgcagggtggggatgcagcacggcggcttttgtaaaagtatgggaaaatcctgccggtctattgcaccgcacaggtatcagggggtataatgtacgcatattaccttttataggcagacggtctgtccggtatacaagtttgcccggaggacgtgccgccgcagggaaaaatgacctgattctgttttagctttgggagattctgtcatggcttctgatttttatacctaccgcaaggaagtcaagtcccgccgcagccgcaagcgcggggtgctggtggtgcttggccttcttttgatcttgtctgccgtctccggcggtttctggttctggaaagggcaggggacgcccgcctcggcggtccaggctacgccggaggaggcacaggccactgccgagccgacccccacgcccacgccggtgccggaaactcaggcaacggccgagagtgccggctttgaagcgcgccgccttctgccggaggtggataacgcttcctgggataagtcggaaaaggtggaggcgaccctcaaccaggattaccagaacaccgaccaccgcatggtggctctgcccatgctgggtaccgtgaccgacgattatttcaataccgtcacctttgtgggcgatagcctgacttccggcctgggtatttacgtgaccggctaccagaacgcacactacgccgcatacaagaacatcggccccgacgtcattgtcaacaacagtaccgtcaccaatgcggtcaccggcgccaccgagacccccattgagaccatcgtggcaagccagcctgattatgtctacctgctgttcggcaccaacactctggtgcagcccaataatgaagagaaacttctcgcttattatgagaaaatgattgacaccctgcgggaaaatcttgatcccggcgtcattttctacgtccagtccattcccggcgtgcaggaggacgtggtacagagccatcccggcctggacaatgcccgcattgcggcggtcaacgatcagatcgccaatctggcgctgcgcaaaggctgttacttcgtcaatatccgtgaggcccttaccaatcctgacggcagcatgatcgacgagtacgacgccaactatgacggcgtgcacttcaaccccgacggctaccaggcctggagcgactatctcgccacccacacggcatggaaccgccgcagcatttatatcggtgagaatccctattatatttatggaacctgaccaaccggcggagtgttttagcacaaataaataacaaaaagcagttttctgtaaagttcagcccgcacccccgtacgacaaatttgccgtgcgggggtgctttttttgcgcaaaccgacaaggatttgtaaaattatgtataagttttgcacaaatcagaaaagtagagtctgatttttttagcagattataacagaaaaaccttgaaattccttaatgaaacaggtaatatagtaatagcaaaattctggcggtgtgcagccgccgtaaaggggagattacagtgaaacaggcagccaaagaagccgattatcctgttttcctgttcaaacagggcaacaaccacgaagcctaccgctatttcggcgcgcatttgtgcgagcaggacggcaagcatggtgtggtattccgcgtatgggcgccgcacgccaaggctgtgtccgtggtgggcgatttcaacagctgggttcccagcagccatcccatgcagaaagttgacgagggcggcatctgggagatcttcattcccggcattgaggagtacgaagtctacaaatactgtgtcaccagcccgtcggacgagctgctgttcaaggcggacccgtatgcattccataccgagacccgtccttccaacggcagcaaggtctacgaactgagcggctatacctggaacgattccgcctgggaggccgagcagcagaaaaaggatgtcatcaacgggccgatgagcatctatgagctgcaggtcggcagctggaagatgaaggaaggggacatcccttacaactattccgaactggctgaccagctcatcccgtacatcaaggatatgggctatactcatgtggagctgctgcccatcaccgagtatccctttgacggcagctggggctatcaggtcacgggctactttgcccccaccagccgttacggcacccccaaagatttcatgaactttgtggacaaaatgcaccaggccggcatcggcgtgatcctggactgggtgcctgcccacttccccaaggacgcctacggcctgtacatgttcgacggcgctccctgctatgaggaccccaacccccgccgcggcgagcacaaggaatggggcaccatggtcttcaactacggcatgggcgaagtccagagcttcctgatctccagtgcactgttctggatcgagcagtaccatctggacggcctgcgcgtggacgcggtggccagtatgctgtacctggactacaaccgccgtgacggcgagtgggaacagaactccaagggcggcaaggagaacctggaggccattgccttcctgcagaagtgcaacggcgcggttctgggccgtcatccccacaagatgatgatcgcggaagaatccaccgcgtggccgctggtcaccaagcccgcggcggacggcggtctgggcttcaacttcaagtggaacatgggctggatgaacgacatgctcagctacatgaagaccgaccctctcttccgtgccggcaaccacggcaaggtcaccttcagcttcttctacgcgttcagcgagaacttcatcctgcccatcagccatgacgaggtggtgcacggcaagtgcagcctcatcaacaagatgcccggcgattacgaggccaagttctccaacctgcgtaccttctacggctacatgatggcccatcccggcaagaaactgctcttcatggggcaggagttcggccagttcatcgagtgggacgaaaagaaacctctggactggatgctgttgggctacgaaaaacatcagcagctgcagtcttacgtccgcgacctcaaccacttctatcacgacaccccggccatgtggcaggtggattactcgtgggaaggcttccagtggatcgtgccggatgacaaccagcagagtgtcgtcatcttcctgcgccgcgacgcggcgggcaagatggtcctgatcgcctgcaacttcaaccccgtcctgcgcgagaattaccagctgggtgtgcctgtggcaggtacttataaagagctgatcagctccgacgatgtgaagtacggcggttccggtgtccataacgcgccggtccgcagcgtaaagggcgctatgcacggctttgaccagcatatcagcatcacgctgccgccgctgtccaccgtttacttctcggtcccgacgccgcgtgtccgcaagcccaaggcagaggacgccaaggccgaaaaggccccggcaaagaccacccgcaaaaagaccgccgcaaagacctccgctgccaaaacagcggaacccaaaaagacggccaagaaggcggccagcaaagccaaaacgccgaaggcgtgaggaatcccgccccgggtgaaagcccggacgcggggcgataaaagacccaaggcaatgtttatcaatggcgaaagccgaataaggggagattatcatggcaaaagaaatgatcgcaatgattctggccggcggccagggttcgcgtttgtatgcgctgacccaaaagctcgccaagcccgcagtgccgtttggcggaaagtatcgtatcatcgacttcccgctgtccaactgcgtcaactctgatatcgataccgtcggtatcctgacgcagtatcagccgctcgtcctcaacgagtatgtgggcaacggccagccgtgggaccttgaccgtctgcatggcggcgtgcatgttctgccgccgtatcagcaggcctccggttccgactggtacaagggcacggccaatgcgatttatcagaatatctcgttcatcgaccgttacgatcccaagtatgtcatcatcctgtccggtgaccagatctgcaagcaggattactctgacttcctgcgcttccataaggaaaagaacgccgagttcagcgtcgccgtcatggaagtgccttggagcgaggcttcccgcttcggcctgatggtcaccgacgcggacgaccgcatcaatgctttccaggagaagccgaaggagcccaagagcaacctggcttccatgggcatctacatcttcaactgggacatcctgaagtcctacctgatcgccgacgaagccgaccccgagagcgagaacgactttggcaagaacgtcattcccgccctgctgcgtgacggtcgccgtatgtatgcttaccgctttgccggttactggaaggacgtgggaaccatctcctccctgtggcaggccaacatggaagtgctggacccctctcactccggcatcaacctgtttgacgaaagctggaagatctactcccgcaacagcggcaatccctgccagaagatcggcgcggatgctgatatcgaaaactccatggtcaccgagggctgcaaagtcaacggcaccgtcaaggactccatcctcttcccgggtgttgtcgtcgaaaaaggcgccacggtcgaggctgccgtcgtcatgggcggcaccgtcatcaaggcgggggctaccgtcaagcactgcatcgtggcggagaacgtcatgatcgaggaaggtgccaccgtcggcgcaatgcctgcggacggctgcgatatcgccaaccccggcgacgttgccaccgtcggttcgggcgtgcggatcggcaagggcgctaccgtcggccccaaagcgatggtctccaatgatgtaaaggatggtgaggagcaatggtaagcagcaacgcaagcgccctgggcgtcatttttgccaatacgtatgataaccttgtcccggaactggtggcggagcgcacgatggcctccatcccgttcggcggacgttaccgcatgatcgactttgtcctgtccaacatggcaaactccggcatcgacaatatctcggtcatcgttcggaaaaattaccactccctgatggatcacctgggcgcaggccgtgagtgggacctgacccgtaagcgcggcggtctgaacatcgtcccgccctttgcggagcgcagcgtcaagatgtactccggccgtgtggacgccatggccagcatcctgtcctggatcaatgcccagaaagagaagtacgttattctgtccgacgcctgcatcgccatgaacttcgacttcaacaagctgatcgaagagcatgtcaagagcggcgctgacgtcaccatggtctacaaccgtgccgagatccccgagggcgcccgcaacgataactacaccgttcagatcaaggacggccgcgttactgagctgctctccaatgattatcgtcccggcgttcagaacctggcgatgaacatttacatcatcgagcgcgagagcctgatccagttggtacgtgacgcttccgtccgcggtatggtctactttgagcgtgacattctggcccgcaacctgaacctgctcaatgttcatgcctatgaatataccggttatgcggcccgtatctccgatatgaagagctactttgacgagaatatgcgcctgctggaaggcgacaacgtcgaagcgctgttcgatccggccaaccccatctacaccaagatccgcgacgacaacccgtcccgctacctgaccggcagcaaagtcaagaactctctgctggccgacggctgcgtgatcgagggcgttgtggaaaacagcgttctgttccgcggctgccaggtcaagaaaggcgccgttgtcaaaaactgcgttctgatgcaggacactgttgttgaggcaaactcctctgtggagtatgtcgtcaccgacaagaacgtccacatcaccgccgacaagaaactcagcggtaccgaatctttcccggtgtttgttgccaagaaccacaccgtgtaagccaagcctcaatgggctgtgacgccaaatctccccggcatcacggtctttgagagggcgggagaggggcgccggtgacggaaaagcgcggcccggttccgggccaggcatcccccatgtgcgcaggccgccggacgcgatcgctcggctgtgccgccgctggcaggccgcagccctgccgcgcctcgcgcctgctgccgtggatgcggatgtgcctttccgtacaggtgtcccggctcccgccccttcttttattattgtgcgcatccgttggggtgcgccgccagatacacggcccaagctctgcccgtcggcaaagcggcgggctacgataaggaggataagatgaggatcctttacgcttccagtgaagctgctccctttgcgaaatccggcggcttggccgatgtcgcgggcgctctgcccaaggctctggtccgggacggcgttgactgccgcgtggtcatgcctctgtacggcgatctgaaattccgtgaccgtttgacctatgtcaccaacttcagtgtccccgtgggctggcgcagccagtactgcggcctgttcaaggcagagaatgacggcgtcactttctacttcattgacaacgagtactacttcaagcgcagcggcctgtacggcttctatgatgacggcgagcgctttgctttctttgcccgtgccatcctcgaaatgctgttctataccgatttcgagcccgacatcatcaactgcaatgactggcagacggcgctgactccggtttatctgaacctgtactaccgccatctggataagttcaaccacatcaagacggtgttcaccatccacaacatcgcctatcagggcaagtatggcctggatatcctggaggatacctgcggcatcggcgctcgggatgcccatgtggtggagtatgacggctgcgccaacttcatgaagggcgccatcgagacctccgataaggtcaccaccgtcagccccacctacgcgcaggagatcctcgacccgtggttcagccatggtctcgacggcctgctgcgtcagaagcagtataagctgtgcggcattctcaacggcatcgacgtggatgtgttcaaccccgccaccgatcccgacatcgccaagaactatgacgtgaactccttccaggaaggcaaagccatctgcaaggctgctctgcaggatcagatgggcctgaacaaggatggcagtcccgtcatggctatggtcacccgtctggtgggccataaaggcgtcgacctggtccgtaccattgccgaaggcctgctgcagcagggcatcgaactggtgatcctgggctccggcgaggcaggctacgaggccttcttcaatgagctgtgcgcccgtcatcccggccgtgtgggcgtctacatcggcttcaacgccaagctggcgcagcagatctacgccggcgcggatatgttcctgatgccttcccgcagcgagccttgcggccttgcccagatggtctcctgccgctacggcaccattcccatcgtccgtgagaccggcggcctgcgcgactctatccacgactccggcgacggctacggcaatggctttacctttgccaactacaacgcccatgagctgtacgaagcctgctggcgtgccaaggaaggctactggcagaaagacggctggcccatcctggtccgccgtgccatggagtgcgatttcagctggtccaactcggccaagagctacgagggcctgtacaatgaggtcgtgacgctctggtaaaaagccgatgcactgtgtgcaaaaaatcagttctgtagactaaaaagctcccccttgcttttcgcggcacaggggagcttttgatttgaccggaattgactgtttgtgtaaaaaatgataccctcctaaaggaatgataaatggtgagggattctcatgaaagaaagaaatgctgtccttgatattgccagaggtatcggaattttactgatggttgcgggacattcaggaatgccggaaacggagtatatttatctttttcatgtcccgctcttttttatactcagtggttgggtattcaattcaaaacacagtgcggactttcacagtgtgcttcgttttgtgtggggaaaaatcaagcgattgtggtttccttttgtggcggcaaatactgcgttcaccttgctgaacaatgtctttctccacatgaacatactgacggccaatccgcgaattacagaattggccggcaatgttgtatcggatcgtgtaagcattaaagatataattgggcggacattgcactggtgcgtatttgacggaggaacccaactgggaggggcgctgtggtttattccagtcttgtttcaaattacagtgctgtatgtgctgcttgattatttgatgaagcggtatttctccgggaaaatggtggatgtgttgcagggagtggtatccgttttattactgactgcaggatatacctgccaacagtttggatgggatttctggcaactgccgattgcttgcagcagctatattttatattatatgggacatatgttgagtaagtataaaatattccaggtgaagggaaagaaaggattcgcatatgggatatcagcgcttctgcttttgattttggcgaaacagttcggcagtgtggatctggcaagcaatttttatacaaatcctttctttttggtggcctgtgcctttgcgggctggattctggtctgggaaattgcgcttttgtgttctgggaatgcagccgttgcacggtttatgtgtacgatgggacaacatacgatgccgattttgattttgcattttcttgcgtttaaggctgttacctggtgcggaatttccatttttggtatggaagattatttgctggcagctttcccggtatatttcaaaggcggaatctggtggattttgtatacggcggcaggaaccgtattgccgttgctggcatataaaggattcgaccttgtcaaaaacgcagcccagagaactggcaaactaagtaatgcatagaacggagtctaatatcaaaagctgcggtatatgcaacgagtaaaacccgccgcggaccatccgtacaggacgtccgcggcgggtttttgtttgaaaagaatggtttgcagattcaaaacaagaaaacaaaaatcccccgggcagtgtctgggggataggaaaagtcagattccgttcagatgattggacacccatttgatgagcatatccagggccacggcatttttgccgccctccgggatgatcaggtctgccttgcgtttgctgggctccacgaactgttcgtgcatgggcttgacggtggtcagatactgggtcaccacgctgtccaacgtacggccgcgagatttgacatcccgcacgatacggcgcaggatgcggacatcggcgtcggtatccacaaagaccttgatgtccatctggtcgcaaagctcctgggaggcaaagatcagaatgccctccacaatgatgacaggcgccggattgacggtgatcgtgtcattgctgcggttgtggatagtgtagtcgtaaaccgggacctggacgctctgtcctgcgcgcagctgcttcaggtgctcgatcatcaggtcggtgtcaaaagaatcaggatgatcgtagttgagcttgcagcgctcctcgtaggggagttcgtcgtggcgtttgtagtagctgtcatggttgatgacactgacttcctgctcgccgaaatgctcccgcagcttccgggtcagggtcgtcttgccgctgccggtgccgccggcaatgccaatcacgatggtgttcatgaagattcctccgcttttttcggattcctgccgctgtacaggtcagaccgtgagattgagctcccggccggacggatgatacgcgcggtatttgacgccggtcatgttgaacagccggcggcttgccatgctggatggcgcgtcatggtatttgtccgagtaataaatgatctccttgatgccgctctggatgatggccttggcacactcgttgcaggggaacagcgtcacatagacgcgggcgcctgtcaggttgctgtgagccgagttcagaatggcgttcaattcggcatggcagacatacatatacttggtgtccaggggatcgccctcccgctcccagggcatatcgtcgtcattgcagccgatgggcataccgttgtaacccagagacaggatcttgttttcggggctgacgatgcaggcacccacctggctgctgtcgtccttggagcgcatagcggtcagcagcgcaatgcccataaagtattcatcccaggagatataatccttgcgtttcatggttcgcacgacctttctgacatgggagttcctgccatccgccggtgtccggtccgcaggccaaacacgggatggagccggattcttttccctttattatacaggctgtgcagtgcaggtgcaagccctgctcagcggtgatcgggcgggtgtaccgcgctcagccgcagaaacttcctgcgggtcgcttcgccgccgcgcaggtggcgttcggccttgtttttttgcagtaccagctggacctcccgccacagggcgggacactgcctgcgcagccgggtctgatctttccagacggtgctcttgctcacgccgaacactgccgccgttgcccgcaccgtcgtgccgtgctgtacaatgtagcgccccacctcgaccgcgcgttcatccgcgtcgcctttcatcatgcacgccctccttttttggcgcctgcgcgccaggcttctgccaaaccgtatgcggaggggaaaggggatagaacgagggaaattcagcccggggaaaaatcacagacggaacggggaattttattcgagcagacagcgcagaaaaacggggcagtcgtttttggcgcgaatccccacagcccggcggtaaccgcagtgcagataaaaggtttccgcagtgtcgctggtcagcaggacaaggtccaaaccttgtgcggcaaattgcttctcggcactacgcagcagccgtcggccgaagccctgcccgcgcagggagggcgcaacccagaattcctggataaaagcagcgctgccttcaaaaaaggaactggaaaaggggagcggggcatacagtaaaaaagccgccacatcagcatccggggaacacaggagcaaagcctgagcaccggagacagccatctcccggtaaacggcttcccagtcatcaacggcaacctccagttccgcaaaatagcgttcaaatgcccggcgaaatcctaagtgggaaaaatcagagagcgttctttcggtgaaatcggaaacaaaagtctttttcatggcaaatcctttccggcccgatcggggccaaaacaaaagcgcccccgtttgacaaagcggggacgcttggatttgccggctgagggggcagggcctgcggtcagcgcagaccggacagcgaacgacaacgatacccacaaaagcgtatacatttcatgtcgttcacctgcctctccagttgacagtttaccatatgacggcaggttgactcaagaggaaaaatcagttttccttgctcttggttgcggttttacggcgggccttttttgcggctgcctgctctgccttggcggcctcggcggctgcataggccttgccgcgctccaataccggcttcaggtactgaccggtaaaggagttggggttctcggccacctgttccggcgtgccggtggcaacgatgcgtccaccgccgctgccgccctcgggacccaggtcgatgatataatcggcccgcttgatgacgtccaggttgtgctcgatgacgatgacggtgttgcctgcatccaccagcttgtccagaaccttgaccagacggtgaacgtcggccacgtgcaggccggtggtgggctcgtccagaatatagacggtctgcccggtgtcccggcgggccagttcattggccagcttgacgcgctgggcctcgccgccggacagggtggtggccgcctggcccagctggatataccccaggcccacctccagcagggtctgcaatttgcggtggatcttgggcaggttggcaaagaaggtgcaggcctcctccaccgtcatgtccagcacgtcggcgatggtcttgcccttgtagtggacttccagcgtttcgcggttgtaccgcttgcccttgcagacgtcgcaggggacaaagatgtcgggcaaaaagtgcatctcgatctggaggataccgccgccctcgcaggcttcgcagcggccgcccttgacattgaagctgaaccgtccggggccgtagccgcgcatcttggcctcctgggtctcggcaaacagggtgcggatgtcgctgaacacaccggtgtaggtggcggggttggagcggggcgtccggccgatgggggactggtcgatgccgatgaccttgtccacccattccatgccttccacgtcctcgcactggccgggacggctgcgggcaccgttcagggcggcggccagcgtcttgtacaaaatctcgttgaccagggtggatttgccggaaccggacacgccggtgacacagatcatcttgcccagggggaaatccacgtcgatgccggtaaggttgttttcccgggcacccaccacacgcaggaacttgccgttgccctcccgtcggatggcggggacctccacggctttgcggccggacagataggcgccggtctcgctgcgcttggatgcacagatgtcctccacgctgccggcggccacgatctcgccgccgtgcacgcccgcaccgggacccacatccacgatgtagtccgcctggcgcatggtgtcctcgtcgtgctccaccacaatcagggtgttgcccagatcccgcagccgcttcatggtggcaatgagcttgtcgttgtcacgctggtgcaggccgatgctgggctcgtccagcacgtagagaacgccggtcagagcgctgccgatctgggtggccagacggatgcgctggctctcgccgccggacagggatgccgcaccccgggacagggtcaggtatcccaggcccacgctttgcaaaaagcccaggcgttcccgcacttccttgaagatggaagcgccgatcatctggtcacgctcggacaccgaggcagtcttgatgaactccagttcctcgttgacgctcatgtcgcagaagtcggagatgttgatgccgcccaccgtcaccgccaggctggtgggtttcagacggcggccatggcaggtggggcattcctcgctggacatgacctgtgcgatttcctccttgacccactcgctgctggtctcgcggaagcggcgctccaggttggggacgatgccctcaaagtcgtttttgtaggtgccggagccgaacatgttctcccgctgcatctccagcttttcgcccttggtgccgtacaggatggcgttgagggcttccttgctcatctccttgatgggggtgtccagggagaagccgtagcgcttgcccagggccacgtagtacatctccgagatggaaccctcggcgtagtaccagccgctggccttgatggcgctctgacggatggacttgcgcttgtcaggaatgatgcgggcggggtccaccttcatgaaggtacccaggccggtgcaggtctcgcaggcgccgaaggggttgttgaagctgaacatccggggcgtcagctcttcaatggagatgccgtgctcggggcaggcgtagttctggctgaactgcatgggttcgccgccgatgacatcgatgaccaccagcccgtcggtcaggctgagagccgtctcaatggagtcggccaggcggctgcggatgccgtcgttgatggacaggcggtccaccacgatctccaccgtgtgcttgatgtttttctccagcttgatctcctcgtccagatcatacatgctgccgtccacacgcacacggacatagccggctcgccgtgcggcgtccagctctttctgctgggtgcctttgcgcccgcgcaccacgggggcaagcacctggaaccgggtgcgctcgggcagcttgagaacctcgtccaccatttcgtccacgctctgctggctgatgacccgcccgcagaccgggcagtggggaatgccgatgcgggcgtacatcaggcggagataatcgtagatctcggtgacggtgcccacagtggaacgggggttgtggctggtggttttctggtcgatggagatggccggggacagaccggtgatctcgtccacgtcgggcttttccatctggcccaggaactgccgggcgtagctggaaaggctctccatataacggcgctggccgtcggcgtagatggtgtcaaaggcaaggctggacttgcccgaaccggacaggccggtcataacgatcatcttgttgcgcggcagcgtcaggtcgatgtttttcaggttgtgttcccgcgcacccttgataacgatacgctggttgggatcgatcttgattttgctcaatgttttcctttccccctgccttttctgcttccggcccgccgcttctgatcggcggcatgccgctgttcggtatccatttcggtcgggtcctcgccccgctgcaaacgctgaatctggtcacgcaggaaggcagcgtgttcgaattccagcagacgggcggcctctttcatctccttggtcaggcgggcaatggtctgctcccgctcggccttgctcatgcggcgctggcggagtttcttgttctcctccgacatgctgatctccaacccgccggaaatggccttgacgatggtcttgggcgtgatgccgtgggccttgttgtaggcgtcctgaatgccccggcggcgctcggtctccatgatggcccgctccatgctgggggtgacctcgtcggcgtacatcaggaccacgccgttggcgttacgggccgcacggccgatggtctggatcaggctggtctcgctgcgcaaaaagccctccttgtcagcgtccaggatggcgatgagggacacttccggcaggtccagaccctcgcgcagcaggttgatgcccacaatgacgtcgatggcgcccacgcgcagatccttgataagctccatccgctcaaaggtgtccacttcatggtggagataccgggccttgacgccgtgctcctccagatagttggtcaggtcctcggccattttcacggtcagggtggtgaccagggcgcgctcgccccggtcgatgcgggtgcggatctcgcccagcagatcctcgatctggccttccaccgggcgcaccatgatgatggggtccagcaatccggtggggcggatgacctgctcggccacccgggtggaatgttccttctcgtaaggccccggggtggcgctgacaaagatagtctgccccactttcgcctcgaactcctcaaaccggaggggacggttgtcaaaggcggagggcaggcggaagccgtactccaccagggtggccttgcggctgtggtcgccggcgtacatgccccgcacctggggcagcatgacatggctttcgtccaccatcaacaggaagtcgtcggggaagtagtccagcagcgtggtgggggtggaccccggcgcacgaccggacaataccgccgagtagttctcgatgcccttgcacatgccaacttcctgcagcatttccatgtcgtagttggtgcgctgggcaatgcgctgggcctccagcagcttgccctcctcggtgaatttcttcacctgctcgtccatctcctgggcgattttggccaggccgaccttcatcttttcggggccgacgatgtagtggctggcagggaagatggccacatggcgcactacgttctgacgctcgccggtcagggggcgcatctcgctgattcggtcgatctcgtccccgaaaaactccacccggatggccaggtcgtccatgtaggccaggtagatgtccacaatgtccccgtggacccggaacttgttgcgggtaaagttgatgtcgttgcgctcgtactgcaacttgaccagacggcggcaaagctcgtcccggctcatctccatgccggggcgcaggctgatgaccatgctccggtagtcgatggggtcgcccaacgagtaaatgcaggagacgctggccacgatgatgacgttgcgccgttcggacagggccgccgtggccgagtgccgcagccggtcgatctcgtcgttgatggcactgtccttctcaatataggtatcggtggagggaatataggcctccggctgatagtagtcgtagtaggaaacgaagtactccaccgcatcgtcggggaaaaaactccgcatctcggtgcagatctggctggccagggtcttgttcggctccaggatcagggtgggacggttgcaccgggcaatgatgttcgccatggtgaaggtcttgcccgaaccggtcacgcccaaaagcgtctgggccttgtccccctggttgatgccctccaccagggcgtcaatggcctggggctggtcgccagtgggggagaagggggcctgcagatgaaaaatcgaaggctcttccataaaagctcctttgcttgctgatgctgcctgaacgtttggcaaagcgtcaggcatatcgcgcccgccgggatagagaaaaataaacccgacgaaacagaaaaaataacaacgataggttgttgtcacaaaaattatatcacaatacttcctatccgtaaacactataaataaaaaactataagaggggcgtgtctccggcaacaaacagcagggagaaaatggtgtattctgacaacaggacggcaggggacagaccgacgaccgggccctgccgccgctcccgggggccgcccgtgatactgtttccgccgctgtcggaccgttcaccgcggcgcaggaaaggactcttgtgcttttttgcgagttgcggtatactaaaacggtatatttggtatctgtgcccttttttggggactgcatacccgacacttcaaattcatgcttcggagagacggctttggaaaagaccacttacacccatgacgcggccgcggcgcgcacgctggccgaatattacgacaccccgcccatggcctatgtgcacagctacggctgccagcagaacgtcaacgacggtgaaaaaatccgcggcgttctgatggatgtcggctacggcatctgcgacaatgtggagcaggcggacctgatcttgttcaacacctgcgccgtgcgggagcacgccgagcagcgggtattcggcaatgtgggcgccctcaagcgcctgaaagagaagaacccccgcctgatgatcggcatctgcggctgtatggcccagcagaagagcgtggtggacaagctccgagccagctatccttatgtggacctggtctttggcgtggacggcatcgaccgtctgcccgccatcctggccgagcgcatccgccggggcaagcggtatctgcaggaccccgtccagcgggacgccgtggtggaggaaatgcccatccgccgggattccggcttccgggcctggctgcccatcatgtacggctgcgacaacttctgcacctattgtatcgtaccctatgtacgcgggcgggagcgcagccgggaaccccaggccgtgctggaagaattccgcagcctggtgcaggccggttacaaggagatcaccctcctgggccagaacgtcaacagctacggcaagggcctggcgaaacccatcgactttgccgacctgctggaactgctctgccagacccccggcgactacaaggtgcggttcatgaccagccatcccaaggatgccagccgcaagctcattgacaccatcgccaccaacaaccacctgtgcaagcacatccacctgccggtgcagtcgggcagcgaccgggtgctggcggccatgaaccgccattacacctcggcccagtacctggagctcatcgactacgccaaggaaaagattcccggtgtgaccttctccagcgacatcatcgtcggcttccccggcgagacggaggaggagtttgagcagacgctggaactggtgaaaaaggtgggctatatgcagctgttcacctttatctattccaagcgcggcggaaccaaagccgccgagatgcccgaccccaccacccatgcccaaaagaccgcccgcatggaacgcctgctgcgtacccaggatgaggtcgccttcccgcgcattgcggccatggcggggcagatggtgcgggtgcttgtggaggcctgcggccgtacccccggcaccctcaacgggcgtctggacaataacctggtcgtcgaattccccggcggagaggaactcatcggcagctgggccgacgtggagctgaccggctcccgggcggcactgctcaccggcaaggccgtgaccaacggctgagaaaatcctccgcgatataaaaataaaaaaatacaaacaacaaaggagaaccctatcatggattgcattgatctgttcaagaaagccgctgccgctatgcagaccgacccccgttacctggagctggacgccgcccgccgtatgaacgacgccgacgaggaactgcagaagatgatcggcgagttcaacctccagcgcctcgacctcaaccgtgccagcgccgaggctgagcccgacagcgcccgcattgccgagctgaaccagaagatcaacgacctgtacacccagatcatgtccagcgagggcatggtccgctacaacgccgccaagagcgagtgcgaggccatggtcaaccacatcgacgccatcatcaacaccgccatgaacggcggcgaccccatgaccgtccaggcgccccagggcggctgcaccggcagctgtgcatcctgctccggctgccactgattgtatcgaatacgcagattgtccggcgggggagagcatcccccgcctttccagaagaagtatccccccggaccgcggcaacggcggtcccggcccggaacaggagtgtgaaacatggcagaacaagcagtttctcccatgatgcagcaatattttgagatcaaaaagcagcacccggacgagatccttttctatcgcgtgggcgacttttatgaaatgttctacgacgacgccctcaccgcgtcccgggaactggaactgacgctgaccggtaagaactgcggcaaggaggagcgcgcccccatgtgcggcgtgcctttccattcttacgagggttacgtggcccggctcatcgccaaggggtacaaggtcgccatctgtgagcagatggaggaccccgccctggccaaaggcctggtcaagcgggacatcatccgcgtggtgacccccggcaccgtcattgaaagcagcatgctggcggaggacaagaacaactacctctgcgccatctacctgaaaaagcagcgccgcagctggcgggcaggcgtctgctttgccgatatttccaccggcgaagcctacgccaccgaactctccgccgagaagatgggcggcgccatcatcacggaactctgccgctatatgcccagcgagatcctcatcaacaccgccatgctggacctcaaggacgtgacggcctacatcaagcagcacaccagcgctctggtggaactgcgggaggacgcctgctgcaaggacagcgtggtggacgccgagctttccgcccagttcggcgcggactggcgcaagacctgcggctttgccgagggcggcatggttccctatgcggtggccatgctgctgggctacctcaaggagacccagaaacatggcatcgagcgcatccgcgcggtgcagaattacgccgacgcccagtacatgcgcctttccccggtgacccgcgccaatctggaactgaccgagaccatgcgcggccgggagaaaaaaggcaccctgctctgggtgctggacaaaaccgagacttccatgggcaagcgcctgctccgcgcctggatcgagcagcccctggtggactcggcggccatcaacgcccgcctggacgcggtggacgccctctatcaggagaacgtggcccgcggcgacctgaaagaagccctgggccgggtgtttgacatcgagcgcctgaccacccgtatcctgtacggctccgccaccccccgggaggtctgcgccctgggagacacctgtgacgctctgccggaggtgcgccgcatcgcggaagcctccgcggcgcccctgctgcaaaaactggccgccgacatcgaccccctggaggacattctctcccgtatccggtcggccatcggggacgacccgcccgccagcctcaaggacggcggcgtcatccgccccggctacaatgccgaggtggacgaactgcgggacatcatgcacggcggcaagggctatctttcgcagctggaagcccgcctgcgggaggagaccggcattcccaagctgaagatcggcttcaataaggtgttcggctactatatcgaggtcagccgctcctataccggcagcgtgccggataccttcacccgcaagcagactctcaccaccggcgagcgctacattactcccgagctgaaagacctggaaaacaagatcctgggcgccaacgagcggctgctggtgttggaacatcagctctttgccgacctgctcagcgccatctccgcggagattctgcgtatccagaaaactgcctccgccgtggcccagctggacgtgctggccgcctttgcggaggtcgccgtctgcaacaactacgtcaagcccgtggtggacgacagcgacgtgctggacattgcggagggccgccatcctgtcattgagcagatgctcaagggcagcctgttcgttcccaacgacaccactctggatgagaccgacaaccgcatgctcatcatcaccggccccaacatggcgggcaagtccacctatatgcgccagaacgccctcattgcgctgatggcgcagatcggcagcttcgtcccggcggcgtcttgccgggtgggcgtggtggacgccatctttacccgcgtgggcgcctccgacgacctggcggcgggccagtccaccttcatggtggagatgaccgaggtggccgaaattctggaacacgccaccaagaacagcctggtcattctcgacgagatcggccgcggcacctccacctttgacggcatgagcattgcccgggcggtggtggaacacatctgcgcccacatcggctgcaagacgctgtttgccacccactaccacgaactgaccgaactggagcaggatgtggagggcgtcaagaactataacatcgcggtgaaaaagcgcggggaggacatcaccttcctgcggcgcatcgtggccggcccggcggacgacagctacggcatcgaggtcgccaagctggcaggcctgccctccagcgtgacccgccgcgcccatgaggtgctgcgccagctggaagcttcggcccccggagcaaacgcctccatgcagctggactttgagacggtccacgcctaccagaaccccgaagtccccagcgaagtggtggacaaactcaaaaacgtggatgtggagaccctcacccccatcgaggccctcaacttcctctatgaactgaaaaaagcgctggcaaaataatgtccggcgtcccacactgataccggccgccgcgttcccgaaagcaggggacacggcgggcttgtttccccattgcaaaggcaaggtgacttatggcagagatccgcgtgctggacaagcacacatccgaactcatcgccgcgggcgaggtggtggaacgccccgcctcggtggcgaaagaactgctggaaaacgccatcgacgcgggtgcgaccaagatcaccctgtccatccgccgcggcggcattgaacagcttcaaatcattgataacggtaccggcatcgaggccgagtacatcgacaaggccttcatccgtcacgccaccagcaagatcaagacggcggacgatttgaacagcatccacaccttgggcttccgcggcgaggcattggcctccatcgccagcgtggcccgggtggaagtcctcacccgcacccaggcggatgaatacgcctgcctttaccgcatcgcaggcggggaacagcagggcatggagcctggcgcccgcccggtgggtaccaccattacggtgcgggacctgttctacaacacccccgcccgcatgaagttcctgaaaaaggacgccagcgaaggcacttttgtggccgacgtggtgctgcacacctccctgtcccacccggagatctctttccgctttgagcgggagggcaaactgcagttcgtcacccccggcgacggcaagctgctcagtgcggtgcacgccgcggtgggccgggacttcgcccgggacctgctgccggtggagggggagtccggcgtctatcaggtgtcgggactggtcaccccgccccgtgcctgccgtgcctcccgcggggcgcagtatttctatgtgaacggccgctacgtcaaaaaccgcaccatgatggccgccatggaaaacgcctacaaggggaccctgatgcagggcaagttccccggcggtgtcctcatgctgacgctgcccgccgaactggtggacgtcaacgtccaccccgctaagaccgagatccgctttgcccgggagggcgacgtctttgacgcggtctaccgtgccgtgcgcaacgctctgaccgcccccggcagcggggaatgccgcttctccatggagcggggcgagcagggcaaacagccctctgcctccgcgcagcctgcaccccaggtcacggcccgcccggcggctgccccgcagaacggcgcgcaccactcccagaccacaggcggctttgccaccatgacggcggcgcagtaccgcgctgcccacaccctgacagaacctatcccgccccggccggtcccgggccttactgcggtgcccggccagggcgccgttcgcacggtgcgggaggactataataaaccgtcggcccccgcacctgccgcaccgcaggctgggacccttgctgccggcatggcccgtggcgcatcggaggccgttctggacatcctgcccgacctgccggaggaaaacactcccgcgactccgaccccggtccccgctgctgcacctgcgccggagaacacccccgccgctgctgcacagcctgttcccgcatcggaagcagtctccgaacagaccgccttcgtcccggacctcaccggggaagagccggaggagggggcagcctccgccctcagcgctctgcccacaggcacgccggaacagaccaccctggcccccgcaccccaaagcgaacccctgcgcctggtgggcgaggtgttccgcacctacatcattaccgagcgggcgggcgaactctgcctcattgacaagcacgccgcccacgagcgcatcctttttgaaaagctgtccaaggattacggcaacgtgccagcccagatgcttctggtgccggtgcaggtcaatctctcggcggaggaaaagctggccgtcctgcagaaccagaaaatgctggaggacgcaggcatcgaggccgaggactacggcggagccaccgtcattgtgcgggccgtcccggcggacgttcccgtggacgatgtggaggacatgctggtagagctggcctcccgcctggccaagggcggcgacgccctgcgggaaaagaccgagtgggtgctccattccatcgcctgccgcgcggcggtcaaggcgggggaccgcagcaacccggcggaactgctggccctggcacagcagatcatggacggcagcgtgccgcccttctgcccccacggccgcccctgtgtcctcaagatcacccggaaggagctggaaaaacagtttggccgcattgtctgacctgccccgtgtggtggccatcggtggccccaccgccaccggcaagacggcgctgtccgtcgccctggcaaaggagtttgacggcgagatcatcagcgccgactccatgcagatctataaaggtctggatgtgggcactgccaaagtcacccccgaggaaatgcaggggatcccccatcatctcatcgacattctggacccggcgcagctgttcagcgtggcggagttcaccgcccgggcggatgccgccatccgggacattaccgcccggagtaagctgcccctggtggtcgggggaacggggctgtatatctccagcctgctcaacggggtggcctttgccccccagccggaggaccccaccttccgagccgccctccaacagcgcatcgaaaacggggagacacaggccgtctatgaggaactttgccgcgttgaccccgactacgcctgcaccctgcaccccaataacacccaccgggtcatccgtgccctggaactctatcacctgacaggccgcaccatgagcgagcagcgggcagagtccctcccggcgcagaaaccttaccgggccttgtgcctttgcctgacctgcgccgaccgcgcccggctttaccgccgcatcgacctgcgggtggaccgcatggtggaagcgggaattctggaagaggcagagtacgtctggaacaaccgcgagaccttccgcaccgcggcccaggccatcggatacaaggaattatttccctattttgaagggaccgggacgctggccgagtgcaccgccaaactcaagcaggcgtcgcgcaattacgccaaacgccagctgacctggttccgccgccagacggacgccgtctggctggagatcgaagatcccgacacgcccacgcgcgccggggagcttgtccgcaatttcctggccggggaggactgatcctccggcccgccgcccccgcaaggggaggggagtaccgatccatgcagagagatccggctgagcgccgccgtgttgccaaaaacttttcggtggcgctgatcaccgtcattctgatttttgccgtgctttatgtgggcgtccagctgtacgccatcctgcaccatacctataaaacagagaccgccatccttgccaccatgtcggacagcgtcaaactgaccggcaccgccgtgtttgacgccacgccggtgtcgggggagggcgacctgggctacctggtggaaaacggtgagcgcgtcaccgtaggcaccgtcattgccgagcgctacaccgccgagggccaggacctgcagcgggaagccctgaccaacctggaccgggagatctcgctgctgaacaagtcccagaactcgtcgggcagcgacctttcggtgctgaccacccagacccagacggccctttacaacctgctggaccagctggaccggggtgcctacggcaacatccggtctgccgaggaagacttcctgctggcccagaaccgcatgcagatctccaccggacagagcagcggctttgatgccaccatcgccgaactgcaggcggagcgggattccatcgccgccagcctggacggcctggaaaaccttgttgccgagaccaacggctatttcgtctcgtcggattccgcccacctgaccacgctggaccaggagacggcggacaacgccacggtctcggagctgtccgacctgctgagccaggacctcacggcctcggcggacggcaaagccgggtggatcgtgtcgggcttttcctggcggttttacgccacctgcgacctggacaccgccgcccggtttgacgggctgaccagcgtcaagatcagtgtgcccggcaaacaggacgacccgctgtccgccacggtggtctcggtggagacggacgaggaggcgggcctagccaagatcgtgctggaatgcggcaccatcaattctgaagtcctgaccctgggacaggagactgcccagatcgacctgcacacctacaccggtatccgcatcgacagcaaggcgctgcatatcgtggacggcaacaacggcgtctacgtcaaggtgggcaacctccagcgcttccgcaagatcaccatcctctaccagaacgaggactacattctggtggacaccgacggcgccgtgggcaccgacaacgaggtccgcctgtacgacgaggtcatcgtggaaggcaccaacctccaggatggaaaattgatgtaaatatcggacagacagtcaaatatttccgcgcaaaggccgctgcaaacggccaaaaatgccgcccgctgatactatttttacaaagcgggcggcatttttgaaagaaaaaccgtcgtttttccggtctgcatccgaaaaatccggcctgcctgccgtcactattgacttttgacgctaaaaaagcgataatacttaatgtatatcgctgtattcagtgaaattctgccgctttgacggcaggcagcctttgcggctgcagcagccataagttaaggagaatccatcatgtccatgttcgaaggcttcaaaaatatgctcggcatcaatcccgacccggaagatgacgagtacctggacggcggcgaagacgagatctttgccggcaaccagggtgcggcggcccaggatagctatgcccaggccgaagctgccaagcagcgcaacaaggtggtcaacatcaatgccacgacccagcttcaggtcgttctggtcaagccggagcgctttgacgatgcgtcgaccattgccgaccagctcaacgccaagcgcaccgtcgtgctgaacctcgagtccaccaacaaagaggtctcccgccgcctgatcgacttcttgtccggcgttgcctacgccaacaacggccagatcaagcgcgtggccaccagcaccttcattattactccctacaacgtcgatatcatgggcgacctgatcgacgagctggagaacaatggcgtattcttctgatcccgcggaaaccggccgtacggcccgcggctttttgcccccgcagaatgaggaagaacgccgtctgatgcgccgtgtggaggaactctgcacccttgcccagcgccggggcatcccccgctatacggggtttctgtccgaccgggagcagtctctcgcagaggctgccgccaaccgggcgcaggtcacctgcatccggttctggggcgggtttgaggatgccgagcgccgggtcctttgcattgaaccggaggatgcctggcaggaagaaccggttgcctgcctgcgcctgcgcgcacaccttgcgccgggggcagaacctccggcccaccgggatattctgggggcggtattggggctgggtctggaacggacctgcctgggggacatccgccccgaccccgaccatccgggggactgttatctgttccttttacaggacaagctggactttgtatcggccaacctgacggcagcgggccatgtccgcctggacgcggctccctgcgatcagccgccccagtcggcgctccgggaaccggaacgccagctgcgccaggcgacggtcagctctctgcgtgcggattcggtgctggcagccatgctgcacacctcccgcgggcaggccgcccaggtcatatccgtaggccgggtccaggtcaatcatgttcccctgcgcagcgcccatgacgcggtttatgcgggggatattttcacggtacgcggcagcggccgctaccggctgcaggagatcggcggcaaaagccgcagtgaccgcacctttatcctgttctatcaatattaagtgcggcagtttggccatacaaccaatcccgggcacggcccgagacaggaggaatatagaatgatcgcttcggaggatgtacggcgcgtcacatttgaaaaagccatgcggggctatcgctgtgacgatgtcgatgattatctcagacaggtggcggacagtctggacgctctcagcgccgaaaacgaggatctgcagaagaaactcgtggtgctggcacagcgcatcgaccagtaccgcgccgaggaggataccctgcacaccacgctcatcaacgctcagcgtctgggtgagaacgtgatcaaggaagccaagcagaaggctgccgaagtgatccgcgccgccaacatccgtgccgaggaccgggagcagcgcgcccgtgacgaggtcgaattggcccagcaggaactgaccaccatccgcaaggagaccgaaaacttcaaaaagtctctgctggccatgtaccgcaagcatatcgagctgctttccaagatcccggaagcgtccgataccgtcgagccgcagccggaggaggagaccaaatcccagccggaaccgcagcccgtccagcagccggtttacgagaccccgcagcctgcttacgagccggagcctgcctttgagcagccctcctatgagccgcctgcctacgaggaaccggccccggtctatgagcccgcccccgtggaggaacccctccccgagcagcaggcggaaccctattttgacgacccggaggaggaagccctccccgagaccgaggaaaaggtcgataccgttgagtttgccatcgcccccaagccggacgagccggaagacctgcgggaggagcctcctgccatggcggcgcctgctcctgcggcatccaccggcaagttccagcccggcgcaggcctgtatgaccttcccgatgaggagcccccggctcccccaaaaaagaccacccgcagcaagtccaccacccgcagaagttccacttcgacccgccggacgaaaaagcaggcccagccggacccgctgcccgcgtcctttgacacgttctccggcgtggactttgacagttgacagccatacgcgttccgttacgggcgtgtatcgtgataccgcgcaccggcaccggcgcgccgtgactttgccgaaacagccaggggctgtatggggcagggaacggccgtgccgggtttgtgcgtgaatgaagtatagaggagagtaggaaaccttggcgcagaatttcaatgacaccatccatctgccgtccacaccgttccagatgcgggcgggcctgccgaagaaagagccggtcatgctggaagactgggagaaaaaccaggtctatgaacagatgatcaagaacaacgagggcaagccgtccttcatcctgcacgacggccctccgtatgccaacggcagcattcacatgggcaccgccctgaataagatcatcaaggatatcatcatccgctacaagaatatgtccggctactgcgctccgtatgttcccggctacgacacccacggcctgcccatcgagctgaaggccctgggctctctgggcgacaacaaggcgggcgtttccaagctggaactgcgcaagatctgcaaggaattcgccaccgagcatatcgatgtcatgaactcccagttcaagcgcctgggcgttcagggcgactttgacaacccctacctcaccctcaagcccgagtttgaagcccgccaggtggagatcttcggcgagatggcgaagaagggctacatctacaagggcctcaaggctgtctactggtgccccgaggaccgcacggccctggccgaagccgagatcgagtatgccgaggacggctgcgattccatctatgtccgctacaaactgaccaaggaccccaagggcgttctggccaagtacggcattgacctggacaaggcatggatcgtcatctggacgaccaccacttggactttgcccggcaacgtggcaacctgcctgaacccctccatcgagtacgctttcgtggagatcgacggccagtatcacatcatggcggccgacctggtcaaggccaccatggaagcctgccatattgaaaactacaccgttctggagccccgtgttctcggttccgaactggaaatgctggagtaccagcatcccttcctggaccgcaccggcctggtcatcctgggagaccacgtcaccctggaaggcggcaccggctgtgtccacaccgcccccggccacggcgtcgaggactttgaagtctgcacccagcactatccccagctgcctgtggtcgttcccgtggacgacgccggctgcctgaccgccgaggctggcgagaagttcgccggtctcaaggtgtgggatgccaacaaggtcattctggagcacatcaagggcaccggccacctgatgggtgtgcagcacatcgtccaccagtatccccattgctggcgctgccacaatcccatcatcttccgcgccaccgagcagtggttctgctccatcgacgccttcaaggaggatgtctacaaggctatcgacagcgtgcactggcagcccgtctggggccatgaccgtatgcagggcatggtccgcgaccgcagcgactggtgcatcagccgtcagcgcgtctggggcgttcccatcccggtgttctactgcaagaagtgcggcaagtaccacatcaccgacgcttccatcaaggccgtcagcgacctgttccgcaaggagggcagcgacgcctggtacaagtatgatgccaacgacatcatgcccaagaccgaggtctgcgaatgcggcgcttccgactgggagaaggaccccgacatcatggacgtctggttcgactccggctccacctggagcgctgtctgccgcgagcgtcctgagctgcactggcccgtcgacctttacatggagggcgctgaccagttccgcggctggttccagtccagcctgctgaccagcgttgccacccagggcattgcgccgtacaagggcgttctgtgccatggctgggtcgtggacgagcagggcaagcagatgcacaaatccgccggcaacggcgttgagccttccgagctgatccgtgactacggcgccgacatcgtccgtttgtgggtcgcgtccagcgactacaccgtggacgtgcgtgccggcaaggagatcttccgtcagctgtccgaggcctaccgcaagatgcgcaacaccgcccgcttcatgctgggcaacctcaacggcttcgaccccgccaaggatatggtggaggaggaccagctgtttgagatcgaccgctgggcgctgcaggccacccgtgcgctgaccgccaccgtgcgtgacagctacgagacctacgatttctcccgcgcttaccacgccatctacaatttctgcgtcctggatatgtccaacttctatatggacgtcatcaaggatcgcctgtactgcgccgacgatcatgcccgccgctgcgcacagacggctctctaccgcattctggtggacttcacccgtctgctggctcccatcctctgcttcaccagccaggagatctggagctatatccccaaactgcccggcatgaaggactacgtcgtcttcgagcagatgcccgaggccggtgcggctcccgaagaggcgttcaccgccaagtgggacaagatcatggccgtgcgcgacgacgtcaagaaggtgctggagcagtcccgtgccgacaaggtgatcggttcctctctggaagcctgcgtcaccctgtactgcagcgatgccatgtatgacttcctcaacgccatccccatggatgagctggccgacctgctcatcgtctcccaggtcaacctggtcaagggcgagggcggcgtcaagggcgtctgcgagggcctgggcactgcggctgagcatgctcacggcgccaagtgcctgcgctgctggaagtacgacgacgcggtcaacgaggaaggcctctgcccgcgctgcgccaaagttctggcaaaataaaatccaataacgacgagctgccggtttttctgctttggcggggcgatgtcggggacgctttggaccgggctgaaaagtcccgcccaaagcgcggagtgcaaggtttgcaaaagcgggtgccgcatctgccggtgcctgaccgctgcggccttggactgcacctttgaacgttgcttagtgcctttgcgggagggccggcgctcggctgattttggcccgcttagcgggcggaccacagggaggaccgcatggttttcggtttcatatccattgcggcggccgcggtgctggtcgtcattgaccagctgctcaaggcatgggccaccgcggaactgctgcccgtcggttccatgacgctgatcccgcatgtcgttgaactgcgctactctctcaatgaagggatggcgttctcgctgctgtggggcaagcagggctttctcattgccgtcacctcggtggcgctcctggtcctgctgggctacctgctgctgcgcaaaatgccggtgctggagcgcatcgcctggaccatggtgctgggcggcggcgtcggcaacctgatcgaccgcatcgtcagcggccaggtcgtcgactatatcaatttcctgttcatggattttgccatcttcaactttgccgacatctgcgtgacggtaggcgttgccctgctgtttgtctacgttctgtgggccgagctgaaggaccgcaaaaagaaatcctccggggaggagcccgccgccgatgcagacgcttgaattcaccgccgctccggaagcggaaggccagcgccttgactgcttcctgacggaacagtgcgacggcattacccgcagcgccctgcaaaaccttatcgaggaaggcgctgccctgtgcaacggcagcccggcgcccaaaaggtacaaggtccgggcaggggacagggtgtccatcaccatccccgacccgcgccctctggatgcccaaccccaggacatcccgctggacatcgtctatgaggacgacagcctgatcgtggtgaacaagcccaagggcatggtggtgcatcccgcccccggaaaccccgacggcacattggtcaatgcattgctttaccactgtgcggggcagctttcgggtatcggcggagccatccgtccgggtatcgtccaccgcatcgacaaggacaccagcggcctgctggtcattgccaaggacgacgccgcccatcaggcgctgagcgaacagatgagcgtccattccatccaccgggtctatcatgccgtggtttacggcaacctcaaggaggatgccggctttgtggaggcccccatcggccgggacccccgggaccgcaaaaagatggcggtcaccgacaaccacagccggtacgcctataccggctggcaggtgctggaacgcttcgggaactttacttatattgcctgccgcctcaagacggggcgtacccatcagatccgcgtccatatggcctccatcggccacccgctggcgggggatgcggtctacggacccaaaaatgtcatccgtgccctgaacggtcaatgcctgcacgccaaggagctgggctttgtccatccggtcacgggggaatacatgcagtttgattcgcccctgccggcgtatttcaacgattatctgacgaaactgagaaaggaatgccgtcaatgaaggagagtctgcacgactatcttgtcttttgcgatatggacaatacgctgctgaccgccaaggagggcatcccttcctgcaaccgcacggtcatcaagctgttcacccagctggggggacgctttaccgtagccaccggccgcccgccggagtccatccgtgccgcgctgggagacctggagctttcgctgccggccatttcctgcaacggttcgctgctgtatgatttctccaccaacacggtgctgcgccgggctacgctggaccgcaaccaggccaccctggccattgcggatatcctgcgccagttcccgcgcatcggcgtggaggtcatggcccacgcgggggagctgtatgtcattcacgccaatgaatacacccatgcccaccaggtggacgaaaagatccccggggtctgctgcccgctggaaagcgttcccgacggctgggtcaaggtggtctttgccggcccgccggagatgatccgcaagctgtcccagtacgccaagaccaaatactatggccgggaaaactacttccttgccaccaacagcatttactttgagatcatgcccggcggcgtgggcaaggcatccggtttgcgggacctgtgcaccctgctgggtgagccgctgcaaaagaccatcgtcatcggcgactactacaatgacctggagatcatgaaagtggcagggcattcggtggctgtggccaatgcccccggcgaggtcaaggccaacgccgacgaggtcaccacctgcacctgctccgagggcgcggtgggagaatatctgtaccgtctcatcaacaccgtcacgggctgagttcccgcggagggtaccgttatgaaagtcagtcaactgctcagccgggagagcgtgctggtccgcgccgatgttcccgatgcctccaatgccctgggcattctggtggaattgcaggaagccagcggcatcattaccaacgggaccgcctactataatgcggtatgcgaccgggagaccgccggcggctccaccgccatcggggaaggcatcgccctgccccatgcctgcaatgcgggtgtggcggcgccgggtgtggctgcccttgccctgaacgagggcatcgactggggcgcgccggacggcaagccggtggacctgatctttatgctggccatgccgccccaggcccagagcgaccatctgttgctgctggcccggctggtgaatcttctgtccgacaacaacctgacccaggctttgcgccaggcgctgacgcgggagcggttcattgaactgctggcccgcgccgaggctgagcgctttgccgagtgacccgcaaaaacactgcatccgggagccgagcgccgcagactgcgtccttggctcctgtttttatgctccgcagtcggactggggcggccaaagaactttgttttgtagccttccagccatagcgcaaaacccagtatccgatcattcaaaaaagtaccaaaaggagagccatcatgagcgaatcctggtttgccgtcactcccatcgacggggagacctttgccatcagcgaacccttccactgggaggaaccccacagctatctcctgtgcggagaaagccgcgccctgctcattgataccgggctgggtgtggaggatataggggctgtggtgcgcagcctgacctcgctgccggtgctggctgccgtgacccacgcccattgggatcacatcggtggtcttggctgctttgagcataccgcagtccatcaggcggaggcctcctggctgtccgggcacttcccgctgccgccgcaggcagtgagggcgaacctcaccgcccggccctgtacctttccccgcggcttttgcccggacgattaccaggtttatgcgggcggcgccgaccgcctgctgaaagacggcgacgtgatcgacctgggcaaccggcaggtgaggatcatccatacgccgggacactcccccgggcattgctgcttctatgaggaagcacgcggcctgctgtttgcgggggatcttctctatgccgggtgtctggatgccttttaccccaccaccgatcccgcggcgtttgcacgctcggtccggaaggtgaggcagcttccggtacagcgcatcctgcccgggcatcaccggctggaactgccgcccgactttgccgcacgggtggatgatgcctggcaaagcctgatgagtcgggaactcttgcggcaggggagcggcgtatttgattttgacggcttccaaatccatatctgaacctgttctgttgccaggcggaccgctgcccaatcgggaaaagcggcccgctttttctgtgaatggggatgaaatggtgaaactgccgaaaaacagtgcagtataagcaaggaaactgtatgattaaccattgaaatggcaaaatgtctatgctatactttaatacattaaatcgccaaaggggaagaggacaccgcccgcacaacaggcggcgccccggcgataaacgaatggggagagatacagtatgaaaaaagcactttctatcctgaccgcagcctgtatggcactcagcctggccgcgtgcagcggcggcaccgattccacctcccaggcggcggacacttcttcggaagcatcggcgtccacctctacggcggagggctccgcgtccggtacttataccatcggcatctgccagcagcagccccacgaggcgctggactccgccacccagggcttcaaggatgctctggtggaggctttcggtgaggatggcgtcactttcgacgaacagaacgcccagggcgatgccaacacctgctccaccatcatcaacggctttgtttccagcagctatgatctgatcatggccaacggcaccaacgcattgcaggcggcggccgcaggcacttccgagattcccatcctgggcacgtccgtcaccgagtacggcgtggcgctgggcatcgacggctttgacggcacggtgggcggcaatgtttccggcaccagtgaccttgccccgctggatcagcaggcgaccatgctcagcgacctcttcccggtggaagagtaccccaatgtgggcatgctgtactgcagcgccgagcccaacagtgagtaccaggtggagcaggtcaccaaatacctgatcgaactgggctacacctgcaccgattactccttcagcgattccaacgacctggcgaccatcgccaccagcgctgccaatgagtgcgacgtcatctacgtccccaccgataacacggcggcctccaacaccgagatcatcaataacatctgcctgcccgccggtgttcccatcattgcgggagaggagggcatctgcggcggctgcggcgttgccaccctgtccatcagctactatgatctgggctacgccaccggcgagatggcagccaagatcctgaagggtgaggcggacatctccaccatgcccatcgagtacgcgcccaacttcaccaagaagtacaaccccaccaactgtgaggaactgggcgtcaccgttcctgatgattacgtcgccatcgagggttaaatatcgtcaaacagccgcgtgaattccggtaaacggaaggcggggaaaagggagttccctttttcccgccttaatgtggctttctgtgatttggggaacattgcaccccgcaacaaaagtgcggcggaaccctggcatcggtccggagccgcggcacagaggaggactgtgaaatcttggatatcatgagtttggtgaacgccctgcccggtgcagcggcgcaaggcctgatctgggccattatggccatcggtgtgtacattacctatcgcgtgctggatattgccgacctgaccgtcgacggcacgctgtgcaccggcggcgctgtctgcatcatgtgcatgctcaacggctgcaacgtctgggtcgccattctggcggctacctgtgcgggactgctggcaggccttgtcaccggcattttccataccttcatgggaatccaggccatcctggccggtatcctgacccagctggcgctgtggtcggtcaacctcaagatcatgggcaagtccaaccaggccatcaatgtggacaagtatgatctgcttgtctcgctgcgcttcatcaaggacgtacccttctaccgcaacaccatcctggtggttgccgttgtcattgcggtggttatcggcattttgtactggttcttcggcaccgagctgggctgcggcatccgtgccaccggctgcaactccaacatggcccgcgctcagggcatcaataccaacttcaacaaggtcatcggcctgatgatctccaatggtctggtcgctctgtccggcgcactgctggcccagtatcagggctttgccgacatcaacatgggccgcggcgccatcgtcatcggtctggctgccgtcatcatcggcgaggctattttcagcaagatcttccgtaactttgccctcaaattgctgtccgttgccttcggcagcattatttattacctggtgctgcaggtggtcatctggttcaaggtggataccgacatgctcaagatgttcagcgccgtagtcgtggccatcttcctggcgatcccgtactggaagcgcctctacttcaccaagcccaccgtccgcaaaggaggcaaccccaatgcttgagatcaaaaacgtatacaagactttcaatgccggtaccgtcaatcagaaagtggccctcaacggcctggacctcaaactggaggacggcgattttgtcaccgtcattggcggcaacggtgcgggcaagtccaccatgctcaatgccatcgcgggtgtctggcccattgatatgggcaagatcctggtggacggcaaggacatcacccgcctgccggagcacaagcgcgccaagtacatcggccgtgtgttccaggaccccatgatgggcaccgccgcgaccatgggcattgatgaaaacctggccctggcccgccgccgcggccagcccagaacgctgcggcagggcatttccgtcaaggagcgcgacggctaccgggaactggtcaagaccctgggccttggcctggaggaccgcatgaccagcaaggtgggcctgctttccggcggccagcgccaggcaatcacgctgctcatggctacgctgcagcagccgcgtctgctgctgttggatgaacacaccgccgcccttgaccccaaaacggcggccaaggtgctggaactgtccgacaagatcgtccatgagcataacctgaccaccctgatgatcacccacaacatgaaggatgccatcaagtacggcaaccgcctgatcatgatgtatgagggccgcatcatctacgacgtccgcggcgaggaaaaagccgccctgaaagtatccgatctgctggcccgctttgagcaggtcagcgacggcagcttcgccaacgaccggatgctgctttcctgaaaactgtatcaccctgacggagcgcggggccggattttccggccccgcgctccttttgtgcagcatgtaaaaaatacctgcaaggcagactgttcaaaaagacaacgcccgcccttacagatcgaattcaaagcaaccgacaaccttgtctcaaacatccaacccggcgcagaaaaccggcggtgtcaggccgcttgacggcataggaacctgcattttccccgtatcccgggggaggggagcgcggcggaacagagtctcgttaccaacttgtaatcccccggaatttttatgaaatgatgttcaaatcaaaaaatctatgctataatgtaatctactgtacctggggggatttatttgccgcgctatgacgctgttttgtttgatgtggacggaacgctgatccattcccgtcccggcattgaaaattcatttgcctatgcgtttgccgagatggggctggaccccgcacagatcgacctttcccgctatctgggaccgccgctgcgctggagcttcggtcagcatttttccgatgaagccgacgtcgagcgcgcggtggagatctaccgtgaccgttatgcacggctgggcatgcacgagtgcagcctgtttcccggggtacggcagctgctggagcgcctgcgcgcagccggagtgcggctggcaacggcgacgtccaaaccgagagaagtagtcttgccgattttggaggagcaggatatcctgcggtacttcgacctggtcggcggggccagtatggataagagcgtggataccaagacggccgtcatccgtcaggacctgaccgacccgaatttttcgacgggcagggtgctgatggtaggcgaccgccgggatgatatgcagggagccgccgactgcggcctgcccgccgccgcggtgctgtacggatacggcagccgcgaggaactggaggcatggaacccggtatatcttgctccggactgtgccgcgctggcagactttattttgcagtccgtctgaatttgattggaggttacagactcattatgagccgtagagattcacaggggcgcgcgtccttcagcccgacccagcgtaaggcctgcctggttttggcaggctgctttgccgccatcatcgtcagctttgttgccgcctggattttgcccgatatgctgtttggctccaccggcgactatgaccccgacgcctatcccgtggatacctcgctgggagcggtcctcaccgagagcagcgacgcgggcaacgattatctttcctccactgtctttgtgggggatgacaacgtggtcgcgctgacggcctccagctccatcaccatcgaccgctatgtgggcgaaaacgggctttcggtctccaatatgagcaaaaagtcctgcgtctattttgaggatgattcctcggcctacaccatcccgcaggccatcgccaagatgaagccccgccgcgtcattgtcatgatcggcaaaaacgacgtggacggcaacaccacggtggacagctttatccagtcgtacacccaggcgctggacaacctgcacaccgcctatgagtactgcgacatcatcgtcagcgccatcccgcccgtgacggaggattcctccgatgcagccgtggtgcagacccgtatcgaccagttcaaccaggcccttgccaaaatgtgcgaggacaacggctacaagtacctcaacagcgccgaggagctgaaaagcagcaacggctatgccgaaggtgcatacgtcagcaaggacaccggcgtgatgacttcctccggcgtgaatgcctacctggattacgtcaccacccatgcctacgagacggaggaccgccgtcccgataccaacgacattccccgccgcgcggccgaggctgccgacaaggaatccaccgccacgcccagccccacgccggtgcgctacaccgtcagctacaaggcggaagcaggcaagggcactctgaccggcaacgatcagacgggcgcgtcctcgctggaatttgaggtttccgaaaatgataccgtcaccatcaccgcagtcgcggcggaaggctataccttctacaagtgggacgacggccagaccaatcccaagcgcgtggatgttgtgaccaaggacatctcggtcacggcactgttcaatgacgcccgcgtggcccttaccctggaccgcggtgacaccaccatgacggtgggggacagcgtcaccttcaatgcgtcggtcacactgggcggcaaggagtacagcaactccaacgtgcagtgggccatcaacgatgaactggaacagaacggcggcagctttacctttacgccgtccgaggccggtacctacaagctgaaagccggcatcgaggtcaacggcggccgcgccgaggtgacggtgaacatcactgtcaattccaagccgaccaaggtgacccttaccgcgccgaccaccctgacggcgggcaccagcaccaccctgagcgccagcgtggagaacggctccggagaaacgacctgggcctgcccgcagctgcccagctggtccgccaccggcaaccaggtgcagttcagcgcctcccagccgggccgctactatgtgcaggtgaccaataacggcgtgactgccgagctggccattgaggtcactgcggcgccgaccccgacccccacgccgaacaaagaagatgacaaggacgacgattaagcgctgtgccttgctgcaagtattaggagcaaaccatggcaaattatacctgtcttttgttggatgtagacaacaccctgctggattttgatgcggcggagcgtcaggctctgaccgataccctgcggcagtatgaactgccctgcgacgcccatgcctgcgatgtttaccatgaggtcaaccgcaagctgtggacctcccttgccaagggcgagctgaacaagaataaactttttgccatccgttttgcccgctttatgcaggcaatggaactgcccgacaacggcaagagccgcgagatcaacgattactacgaggatcagctggccctgcatgcagacatcattcccggcgccatgtctgcgctggaggaactggccgaggtggctacgctggccatcgtctccaacggcgccaccaaggtgcagcagtcccgcatcaaagcgtcgggcatcgaccgctatatggacggcatctatatctcggagcatatcggtgcggcaaagccttctgccaagctgtttgacacggtgctcaaggatctgggcatcaccaaccgcagccgggtgctggtggtgggggatgaccttcacgccgacatcaagggcggcctgaacgccgggctggatacctgctgggtcaactttaccggcagtgacaatgacaccgacattcagcccaagtacaccatcggttcgtatgaggatttgtaccgcatcgtgatggaaccggaagaactggaaaacatcggcgtgcgtaaccgccgccacatgaatgacctgtaaccaacgggcggcaggtcccgtattgtgccgctgcatcccaagtgcagcggcacaattttggcctgacgccgcaagagggatggagtaagagaacttatgctgatcgaactgcaaagcctgggaaagagctttggtgagcatgaagtgctgcgggatgtgaccgccagcgtggaaaaaggggaccgcatcggcatcatcggagccaacggcaccggcaagaccacgctgctgcgggtgctgtgcgggcagagcctgcccgataccggcagcgccgattttgctgccggagccacctgcggctatctggaacagaccgccaacctggaccccgacgccaccgtctacgacacggcccgggagtctttccgcccggcactggacgccatggaccggctggaaacgctgcaaaagcagctggccggccaccccggtgacccggaaatcaccgcgggcattgagcactgcaccgccgtcattgatgccatggacggctacaacatggacacccagatccggaaaatgctcaacggtatgggctttcccaacgatacctggcagaaaaaggccggggtgctttccggcggcgagcagactcgcctgcgcctggccgggctgcttctgcgccagcccgacatcctgattctggacgaacccacaaaccatctggacatcgagaccatggcctggctggaaacttatctcaagacctgccggggtgcggtgctggtggtcagccatgaccggtatttcctggacgcggtctgcaccaagatctgggaactgcgggaaaagaccatccagacctaccggggcaactactcggcctacctgcctcagcgccaggccgccgatgaacgccggcagaaacagcatgacgccgacgtggaaaaggccgccaagctgcaggattacatcgaccgcaatctggtgcgtgcctccaccaccaaaatggcccagagccgccgcaaacagctggaaaagctggagatcaccgcggccccggtcaacgaggcccgggaactgggcttccgctttgaatatgatatcgaaccctatgacgagctggtgaccatgaaggacatcagcatccgcatgggggagcgcaccctggtcaaggacctcaattatgtggtgcaccgtggagataagctggtcattgcaggtcccaacggcacgggcaaatccaccctgctgcaggtgctggacggcaagcgccgtccttccggcggtatggtgcgcctgggcggcggtgcgcgcaccggcatcttcacccagcagcaggcccgccgcattggccgggtcatcgacgccatctgggacaagtatccccgctttaccgagctggaggtccgcagccatctggcacgcttcggcttccgcggggaggaagtgttcaaggactgcgccacgctgtccggcggcgagctggcccgcctgcgctttgcggagctggccctggaacgtcccaacctgatgtttttggacgaacccaccaaccatctggacatctatgtccgtgaaagcctgacccaggctcttgccgcctataccggcacgctgatcctggtcacccatgaccgttacctcatgcagaccctgggctgccccatcctgtatctggaggaaggggacaccaccttctaccgtgactttgccgcattgcgggacaaaaacacggctgccgcccagagccctgcccgcggggaaccggaaaagccccagcgccaggcctacggcaaggagcagcgccgccgccgtgcggaggtccgtgcccgcatcaaggccgtggagaccgagatcgaggaactgggtgcgcatatcgtggaactggaaaatgagctcaacgacccggaagtcctgcgcgatcacctgcttgtgcgggataaatgcgacgatctggaggacacccgcttccatcagcaggaactgtttgacgagtgggaaaaactgctggaagaacaggaacgctttgaggcggaggactccggcgaggtctgagtccgtcccttcgacagattttacaactctgttgtctaactgtaacttgtattctgcgtcaaaagcgatatacttacataataagtgttgttttgtccatgtgcgccgccgtgccagtggacgatacggatcgcaggaagcgctccggaccggggtgtccggacgctctgccagtgaaaacggggatacgctttgaaaaccaagatcatcattgccacgcacaagccctactgggtaccggatgatccggtttatctgccggtgcagatgggccatgcgattcatcccgacatcgggtatgtcggtgacgatacgggcgaaaatatatcggaaaaaaactggaatttctgtgagctgacggggctgtactgggcagtgcacaacattgatgccgagtatctgggcattgtgcattaccgccgttatttcggcagccgccgccatcgttttgcgcccaaaaaagagcgggtcatttcggggcaggagctggacgagatcctgcagcataccaacgtcatcctgcccaagcagcggcattatttcattgagaccaactacacccagtatatccatgcccatcacaagcaggacctggtggtcacccgccgcatcattgagcgcaaatgcccggaatatctgcccgcttacgacatgtatatgtccaagacgcacgggcaccacttcaacatgttcatcatgaagaaggaactgctggagcattacagcacctggctgttcgacattctgtttgaactggaacgggaactggatatctcggactattccaccaacgacaagcgggtgttcggctttgtcagcgaacgcctgctggacgcatggctcatcaccaaccgcatctcttacgaggagctggacgtggtgtatatggaaagccagcactggctgcgcaagggagcctccttcctggcgcgcaaactgttccccaaaaagcaaaaggagtaatctgttatgcaacccatcgcggccgtggtggtgacctataaccgcaaggcgcttctggcggaatgtattgcctgcctgcgcgcccagcagggcgccgcctgcgacatttttgtggtggataacgccagcaccgacggcacggcggaactgcttgaaaccctggcaggccccgatttgcacagcctgaacaccggggaaaacctgggcggtgcgggcgggtttgcccggggcgtggaagccgcggtgcaggccggataccaagccctgtggctgatggacgatgatacgctgccggaacctggtgctctggcggcgcttttgcgctgtgaacaggatctgcagggaaattacggctggctgtcctcccgggcggtggaccgcgacggagccgaccagcccatgaaccgccagcgccgcacgccttaccgggacattgcgggctatggcgacgagccggtccccagcgtcatggccagctttgtgtcactgtttctccgcgctgacacggtgcgagagtttggcctgcccattgcggaattcttcatctggtcggatgactgggagtatacccggcgcatttcccgcagccgcccctgctacacggtgccccaaagccgggtggtccatgccatgcagcataaaacggtggtcaacatcgcaaaggacacccccgaccgactgggccgttaccgttacttttaccgcaacgatgtggtgctttaccggggggaggggctgaccggctggctgtggcttttgtgcaaggacgcctggcattcggtgcaggtgctgacgggtaaatcccccgataaaggcaagcgcctggggatcatctggcggtcctttgcggcgggggtaaagttccacccgcagattcgccgcccgggcgattgataagacgaaaacaaagattttgagggaaaggacggagaacaggatgcgggaccttgaccggcttgccggcagttatcgcgcggtggctttcgatgtgttcgacacattgatccaccgcgatgtcgccgcgcccaccgacgtctttgcccggatggaagcagccggtgtcgtgccggaaggcttttccgcccgccgcatcgccgccgaagccgccgcccgggctgcctgtacgccccgggaagtgaccctggcggagatctacacccaaaaagaactggagggcatcgaccccaaggcggagatcgatgccgaactgtcgctgatagtgccggacgccgggatgcaggcactttacaacgcctgccgcgcccgcggccaggcggtctatgtggtatcggatatgtacctgcctgcgcaggtcattgccgatatgctccggacctgcggctatgatgcgcccgacggactgtttgtctcgtcggaatacggcgtgcagaagcgcagcggcaaactgttccggctgtttctggaaaagaccggcctttcgccccgggacgtgctgttttttggggatgaccgccgtgccgactgcatcggagcggcgctggcgggcatccgcagcgtcagggcgccgggacgcttgccccggcccgactattaccccgaacctgtcacagcgggggagggaacgctggccgctttctgcgccaaccgggcccagttcctcgacaaccaggaggaacgcttcggctatacggtgacaggccccctggtgctggcttttgctgcctggctgcgccggcgccgtgccgaacatccggaaggacggctggtgtttctggcccgggatatgtacctggtgcgggaagtctgccgcatcctgggggaaaaggagtcggggtacctgtgcgtctcccggcgcagcctctgcccggcactgctcatgcgccccatgacgccggaggcccaggccctgctgctggataccttgccccgccaggtcatgcgcgtggacgagattctctctttctgcggcttcccgccggacactcagcttcccgattacgacggctgccggatgtttgacctccgtcagcgcccggcggacgccgaactgaccaaactgcttttgcgcatctgcgccctcagccgcggcacggcaggccttgccgtgcgggaaagcgccgcccgtgtgcgcgcctacctgcgggactttgatttgacccgccccgggaccatgctggtggacatcggcagcggcggcaccacccagcgggtgctgcaggaactttgcggcgcaccgctgcacggcctttacctggcctgcgacgaccgtctgtttgagcgcctgcccagaaccgacgctcaggtctgcctgttcggcggcgagcctgcgcctctgtggttctggatggcccagcctcttttggagtacctgatctcggaaccctgcggtcccaccctgggctaccatgaagcgggaacatccgtcagcccggtgcgggagcccgtcacgcccccggcggaactgctggcggtacagcggggcgtgctgcgctttgcaaaggagtggagcgcttcctccctgaacggcctggaactctctcccgaccggacgattttgccgtttctgcgtatggcccgccgccctgctctgcggcaggcggcatgcttcggggatttcacgctggaggacggcgtcagtttccgtctggcggcgcccgctccgctgacggcctatctgagaaacccggccaggctggcgcgggatttcaaggactcccgctggaaaatcggatttctgcggcggcttttgcgcctgccgctgccctatgacgcggtgtacagcctgctcaaaggcggctctgccccgggaaaggatggatgaagactgtggcgtgtgtcagtgtcatcatgccggtctataacgcggcggcccacctggaagctgccgtgcagagcgtgctgtgccagaccctgggcgacctggagctgatcctggtggacgacgggtccaccgacggcagcgccgccctgtgcgatgccgccgctgagtccgatccccgggtgcgggcggtgcatcaggcaaacgccggcatctgtgcggcgcgcaaccgcgggctggaactggcggcaggggagtacgtcactttctgcgacgacgacgacgccttcctgcccgactttctggagacagccctcaatgcggcaagggagaatgctgccgaccttgtgcggatggacttccgtctgtttcgcagcgatgccgccgggcgggagtttgaactccgccacccggccggacagccctgctgcctggttttgaaagacaatccccgggattacggcctctttctccgcatggctgggccgctgtttgtctggaatgccctttaccgccgggaagcgctggcggatctccgctttgatacccggtgccgccggggcgtggaggactttgtgttcaatgcgcagttccatgcccgtatggaacgggcggtgctgctgccccaggttgcctgcctgcactatgagcgggcgcagggcagcacctcggcctgcttttcccgggaggcggtggaggcacgggtggaagccgcgtccttgtgggcgcaggcggaagccgatgccctgaaacgctggtgcacgccccaaacccttgccccggtacgcagcgagcgccgggccgagatcgtcacgtttttgatgcatcagctgcgggatgcgcatgccccgcacccggtccgccgggcctgctggcggacgctgcgcgccgccctggacgacgccttgccgtcccaagcatttgactttttgcgcgtagaggggcaaaataagaagcagatacttgcactgtttttgtatgaggtgcatctgcagggattgtaccaatggttcccaaacagggaggataaacaatgaaaacgattcttgtgaccggcgcgggcggctatatcggccgccacgttgtcaaggaagctctggaccggggctacaaggtcattgcttccgatttttccttcaaaggcgtggacgagcgggcgcagttctgtgacgtgcccattttcagcggcagccgggacatctaccgccagctgggggagcccgacgtgctgatccatatggcctggcgcgacggctttatccataacgcttcctctcatatgaaggatctgtccaaccatgtgatcttcctcaacaacatggccaagggcggtctgcccgcactgaccgtcatgggtaccatgcacgagatcggctactgggagggcgccatcgacgagaacaccccctgcaacccccagagccagtacggcatcgccaaaaatgccctgcgccagagtctgatgctctccctcaaggacacgccctgccacctgcactggctgcgtgcttattacatcaccggcgacgaggctcacggcagctccatctttgccaagatcacccaggcggagcaggacggcaaaaagaccttccccttcaccagcgggaaaaatctgtatgatttcatcgacatccatgatcttgcccgcatgatcgtgctggcaagcgtccaggacaaggtggacggcattatcaacgtctgcaccggcaaacccatgtccctggccgaccgggtggagcagtttttgcgggataagggctaccatatccgcctggattacggtgccttcccggaccgtccctatgacagccccggcgtctggggcgatccctcccgcatcgaaagcatcctgaaagatgcacagaccaacgaggagactgtatgaaacgactgggtatcttctttttctatgagaaaaacggctatgtggacgattttttgacctattacctggcggacctgtgcaaaaacctgtccgagctggtggtggtcgtcaacggaaagctcagcgatcagggccgggcggaatttgaaaagttcacctccaacattatcgtgcgggagaacaagggcctggacgtctgggcatacaagactgccattgactcctacggctgggaaaagctgtcggagtttgacgaggtggtcatgaccaactccaccctgatgggtccggtgcgtcctctggccgaaatgttcgacgagatggcaaagaatccggacctggatttctggggcctgaccgtccaccatggtgccgagggcaatcccttcaagggcaagcacatctacgatcatctgccggtgcacattcagtcccactttatcgtctaccgcaaaaagttcatccagagcccggaactgcagaactactgggataccatgcccatgatccaggggtacatggactcggtacagcggtatgagtcggtgtttaccaaaatgtttgctgacaagggcttccagtgggacgtctatgtcaagaccgacgacctcaaagcctttaccgactatcccttgctggtctgcccggtgcggctgctgcgggacaagaagtgcccgttgttcaagcgccgcagcttcatgcacgagtttgaggcctacctcaatgatacggcaggggagcccgccaaggaactgtacgactacctgcgggacgagaccgactaccccctggaactgctgtggcggaacatgattcgcaccatgcatccctttgactttacccgggatcttgccctgacccgcatcatccctgagcgcctgcaggaccccgcctgcgccgagcaggtgcgcaagacccgccgcatcgctctggccatgcatctgttcttcaccgacatgctgccccagagcaaggcctttgccgccaagatgccccctgagaccgacgtctttgtctccaccaataccgaggagaaaaaggcggccatcgaagcctgctttgccgacctgccggtgcacagtgtcaccgtcaaggtggtggaaaaccgcggccgggacgtggcggcattcctgtgcgaccttgccccggaacttaagggttacgattacgcctgcttcatgcacgacaaaaaggcgatccagaccaagcccggcagcgtgggcgccagcttcggctatgtctgcaacgagaacatctgccgcagcaaagaccacgtcctcaacgttctgaccgagtttgagaaggatcccttcctgggcatcctctgcccgccgttccccacccatggcgcatacttcctgaatatgtgctccagcggctggggccccaacttcgacaataccaaggcgctgatgaaaaagctgggcatcgacgtgcccatctcgggggagaaggcccccatcgcaccctttggcagcgtgttctggttccgggtcaaggcgctgcagccgttgtttgaccgcgactggcaccacgacgatttcccgcccgagcctctggctccggatggcaccatcagccatgcggtcgagcgtatctatccctttgtggcccagggggcggggtattatcccgccatcgtcatgagctcggtgtttgcggtgcagcggggcgataccatgcaggcctacgccaccggtatgatccggccgctggcccgcatcatggattgcacaacgttctggggcgcatcccgcgccatttccatctttgcggcaaagcggcattttggtcttaaggtctacggcccctatgcaaacagccgccgccgccgcgcccgcaactggctgcgcgaccgcatgccggaatctacctacaacaagatgatgggcgtcaagcgcgcggtgttcggcccccatctggacagctacgaggactgacgtcggacagggggaaagcagatgcccggacgttttgtcatctatttccattatgatcccaacgggcaggcggacaacgcctgcctgtttgccgtgcgtgccatgcgggaagaatgccgcggcctgctgtttgtcacaaacggcagactgaatgaggaatcccggacagcggtgcaggcactggatgttcagcttctggaacgggagaacaccggctttgacgtgggtgcctatcgtgacgccctgatgcttttgaaaaagcatgggctggaggagatcgatgagctgatcctcatgaactacaccctggcggggccggtcacgcccctccgggcgctgtttgtcaaaatggacgcccgccccgagctggatttctggggcctgacccgtcactacgccatgaaaagccgccgcttcaaaacgaagtacggggaagtgccggagcacatccagtcccattttattgcggtgcggccccggctgctgaactcggaggcgttctggacctactgggagacgatgcctctgccccaaagctacgaacagtcggtggccgggcatgaagcccgcttcacccgccactttgccgatctgggctactgctgggacaccgcggtggataccggggacctgcaggatattttcgtcaaccccatcatggcatgcccgcaggagctggccgcccggcggggctgcccctttttcaagcgccgcagctttttcacgccctacgccgacgaactgcgccgtaccgacggcactgccgccgccgaactgtatcactggctcaaaacgtccaccgactatccggtggatgatctgatccgcgccctgctgcgcacccagccccttgcgcccatggcgcagaacctgcactggaacgcggttttgccgcgggatgggcaagcggcggtcaatgtgccgccggtgcgcctggtgacctggcggccgggggaccctgcccccgccattgccccgggggagatcctctgcctgtactgcccgcctgacgaacaagcccagacaccggaggactggtatacccgccgcatggcccgcgcccttgccgaggatgaaaacctccgcaatgccgcaggggctgtgctggccgcccgcccgctggcgggcattgccggcccggcggtgcctgcctttggtccggcacagctgcgccgggcaggggagtggcaggcggttttgcctgctctccgtgccgaggcagcccgcctgggctggcagatgcccatcgacgcccagcctttaccggtgccttatggggactgtgtgttcctgcggggggatgcgttcccccaggggctgccgccgttggatggcccggcgggatggtggctgctgccgctggcagcccagcaggcaggctacggctgcctgacgctgtataccgacacgcagactcatgccatcccggaccagctggactgcgcctttgccgcccgccgggatgccaaagaaactgccaaggacctggcccgcattctgcgccgccgcctgcgcagcaaacactaacaaaggaaaaggggactgcctgatgtccaagcgcccgcgcctgttttatcttgatctggtccgcactctcgcgctgatctgtattcttatcattcatttcaacgccaccgtcaccgggtattttacgctgccccacaagctgttcaccagcacgctgccggggggcatttacctgggagatttcggctcgtcgctgtttttcattgtgtcgggagcagcccttgcctacacggcaaaggaaccgttctccgcgtcagccttttataagcggcgcgcccatgccgtctatcccatgttctggctggcgtggtgcatctgcttttccatccgcttcgtcacccagccggggtactatgccgccgccaagacccccacgctgattctatccgtcctgggccttgataacttcgccgtggcggcgggctgggtccataccgactttgcctgcgtgggcgagtggtttttgggcagcatcctgtttttgtacctgctgttcccgctgctctatgcgggcatgcgcaaaaacaaggcgctcacttgggcggtaacactggtcctggccctggggctgcatttttcggggctggacgcccagctcatcggcgtgcatctgctggaattcctgttcggcatcaccatggtgggggccaagcgccccaaatggccggtggtcatcgccgccgcactggtctggccggtgctctgggcggtcagcaaggtcacagtgttggatgccaaactgctctgcgccgttgtctcggcagctgtgtttgtggtgctgtccgcctggcccaaagccgcttcccccgcgtggctgcagcgcacctgcgctttggcaggcaagtacagctacgccgtctttctggtgcatcacttcattattttgcagatggtgcagaaatttgacctggccgccctgacccgcagggataccgccctgctgttcggcgcttatctggtcatcaccgccgccgcatcctgggggctgtatcgcctggatgtgcgggtacgggctgctgcggggcgtctgttcgcccgctgagcggagccaaagcacagaatcaggaaactttaccgcccgatttttgtacaagatcgctgtacaaaaatcgggcggtacgttataatgtttctatatactggcgcggcgcgggcaggtgcctgccgcagctaaagtgaaaggggcgaataccatggaagaacagcaattttccgtgacattggacagagtggccgaagaatccggcctgacagtcgcttacacacccaaagatctcaaggagatcaaggtgtacgccgcggaggtctatcgccccggcatcatgctggcgggatattaccagtactttgacagtgcccgtatccagatcatcggcctgaccgagatgtcctacctcaatgagctggaaccggatatccgccgcacccatctggaaaaactgttctccttccagcctccggccgtggtcatttcccgggatatggaacccctgcctgagatgatggagtttgccaaacagtacggcgtggccctgctgctttcctccgagatgacctctccgctgatgagcagcatgatcaccaccctcaacaccgagcttgctccccgcatcacccgccacggcgttctcgttgaggtctacggcgagggcatcctcatcatgggcgactccggcgttggcaaaagcgagaccgccattgagctggtcaagcgtggccaccgcctgatcgccgacgacgcggtggaactgcgccgtgtttcttcccacaagatcatgggatccgcgccggagaacatccgccactttattgaactgcgcggcatcggcatcatcaacgtcgcccgcctgttcggcattggctctgtcaagaacagcgtcgaggtggagatcgtggtggaactggaaccctgggaccgcaccaaaaactacgaccgcaccggtctggagaccgacagctatgatattctgggcgtcaaagtccccagtatgctgatcccggtcatgcccggacgtaacctggcagtcattctggagactgccgccatgaacaaccgttccaaggagatgggctataacgcggcccgtgaactgctcaagcacctgggactggaaaacgatttctaagcattgccgcgcccgtatccgcgcagccgaaggagagtcacacacttcatgaatccgatcatcgcagacctgcacacccataccctcagcgccacccatgcctatcactcccttgaggagatggcagcggaggccaaacgcctgggctaccgcgccctggccgttaccgaccatgcacccgccatgccggactcgccccatatctggcacttccagaacttttcggctctggaccgtaccgtcggcggcgtcgtcatgctctacggcgcggaagtcaacgtcatggacatcaacggcggcctggacctgccccagagccttctggccgggatggactgggtggtggcatccatccacagcacctgtgtgccgggcctgctgaccgaaaaggaggccacccgcctctggctttcggtggcggaaaaccccgccattgactgcatcggccattcggagcagcagaactaccgctatgactacgacctggtcaccaaagcctttgcggccaaccataaggtcgtggaactcaacggcaactccttcaacgtgcgcaaggacggcattcccaatatgcgcgctctggtgcgtgcctgcctgaaaaacggctgccgcatcgcgctggataccgacgcgcacagcacccgccagctgcgtgagaacatgcagccgctggtgacgcttctggaggaagtggactacccgtccgaactggtggtcaacgcttcctgccaggctcttgtggaaactttgaaactgcaccgcagagcttctgcggaggaaataggaggactgttacaatgagcaaatataccattggtatcgatctgggcggcaccaccatgacggcgggccttgtggacgaaaactacgagatcgtgagcaagatcacctgggcgacccgtctgccccgtcccgcgcaggaactggaggaagcccttgccaagctctgccgcaccgtcgccaaggagaacaaggttcccttcgaccaggtggcctatgtgggcatcggcacccctggcagcgtcaacttcaccaccgggtttgtgggctacaacaccaacttcaactactatgactggaacctcggccccgatatggaaaagctgctgggctgcaaggtctatgtggaaaacgacgccaacgccgccgctttcggtgagtacatcgcgggcggcgccaagggctaccgcgacgcggtcatcatcaccctgggcaccggcatcggcaccggcatcatcctgggcggcaagatcctgcgcggcttcaactttgccgcgggcgaaatggggcatactgtcatcgtgaaggacggccgccagtgcaactgcggacgccgcggctgctgggagcgctatgcttccgcccgcgccctgagcgaggatacccgtgaggccatgaagaccgctcccggcagcgtcatgtggaagatcgccggcgacctggaccatgtcaacgccaagactgcctttgacgcggcggagcagggcgacggcctggccaagcaggtcattgacacctgggtggaatatgtggcctgcggcgttgccaacgtggtcaacaccttccagccggaagtcatctgcatcggcggcggcgtgtccaaccagggcgaagtcctgctggcccccatccgtgcttatgtggagaaggaaacgcataatatcactacgggcaagtgccccgcgatccatgcctgcgtgctgcgcaacgatgcaggcgtcatcggcgccgctgcactggcggattcgatttaagagtacctgccgggaacgttcccggcggtgaacaaagggaggaaacctatggcagacatggcggcctttgtgcaggcactgcgggggcagcagatcccgtttctggagagggaacccctcagccggcacaccagtttccgcatcggaggcccggcggcagtgttctgcctgccggagaccccggcgcagcttctgcgtgcgctggaactctgccgggaacatgatatccggcactatcttctgggcaacggctccaacacattgtttgcggacgagggttttgatggtgcggtcctttgcaccgtggccctcaaagcgcccgtcaccgtgtccggtacgacggtctgcgccgcagccggagcatctctggcggcggtctgccgtcaggcacagcaggccggcctgaccgggctggaatttgcctacggcattcccggcacggtgggcggcgcggtgtatatgaacgccggcgcttacggcggcgaactcaaacaggtgctcagccgggtgaccttcctggataaaaacctgaacctggaaacgctgccggtggaagaactggccctgggctaccgcaccagccgctttgagacccacggcggctgcattctggaagcggtctttgccctgcagcccggcgaccctcaggaaatcgaggcccggatgcaggaactcatggcccgacgcaaggagaagcagcccctggagctgccttccgcgggcagcaccttcaagcgtccggagggcgcttttgcaggtcagctcatcgagcagtgcggcctgcggggctttgcggtgggcggcgctgccgtcagcaccaaacattgcgggtttgtggtcaataccggcggcgcgacctgtgccgacgtgatccggctgaccgatgaaattcaaaggatcgtggaggaaaagaccggctaccggctttccagggagatccgcgtcgtccgctgaaccgggcggcgcgcacagcccggccggagaaaagggaacagataaggcgggggaacgggaatgaaacttttggttgtgacaggcctgtccggcgcaggcaaatccatggcggtcaacgcgctggaggatatcggctttttctgcatcgataacctcccggcggggctggtgtcccggttgatcgactttgcccagcagggcgaaaaccagctcaaccgtgtggcggtggtgctggacgtccggggcctgcgcactgtgcaggacgtggacgcggcccttgccgccctggatgagaaaaaggtggactacgagatcctgtttctggatgcgtccgacgcagtcatccgccgccgctataaggagacccgccgtcagcaccccctgtccatcagtgacgggcttcctattcaggaggccgtcgcccgggaacggcaggtgctgcagccgttgcgggagcgtgccaaatatgtcatcgacacttcgctgctctccgcggcccagaaccgggagcgtgtctgcgggctgttcctcaaccggggacagagcgccatggccctgaccatcatgtctttcggcttcaaatacggcctgcctccggaggcggacatcgtctttgacgtacgctgcctgcccaacccgttctacgtacccgaactcaaaaaccagaccggcctggaacaggccgttgtggattatgtgatggatgcacccgaatcccgggaactgctcaaacgcatggaaagcctgctggaatacgccttgcccctctatgtcaaggagggcaagagccagctggtcattgcggtgggctgtacgggcggcaagcatcgttccatcacctttgcgcgcctgctgggtgaattttgccagaagcagggctacgccccggcggtccagcaccgcgacgcgcgccgcaacgtttaagcggagcggggcacaaccaccagacaggaggggaacatccgcttgagcttttctcaggatgtgaaaaacgagatcctgcgccgcaagatccagcggccttgctgcacccaggccgccgcctatgcggtggcctgcttcggcagatactttgacgaccgcggtgtggtgctccagaccgagcatgaaggcattgccgcccttgcccgcaaactgtacgagcgctgcggcattgcggggaccatcctgcccaaggagcgtccttccggcacggtgtacgaattttcggtcaaggacccggccgaggtgaaaaagatgctggacctgttcggccataccgggcgggaacctgccctgcgcatccgtcccgagtgctttgtctgccgggactgcgtgtcgcattttctgtccacggcttttctgtgctgcggcacggccaccgacccggaaaagggttacaccctggagttcctctctacccggtaccatgtgtcccgccagctggaagccatcctgtccgagcatgatttccgcccccaccgcacgctgcgcaagggggccaatgtggtatatatcaaggccagcgaccagatcgaggaccttctgaccttcatgggggcaggcggcgcggccatgcgcgtcatggaacagcgcatgtacaacgatatgcgcaaccgcaccaaccgcctttccaactgcgagaccgcaaatctgggcaagagcgttcaggcggcggtccaggtgcagatggccatccgggctctggaggaagccggcgcactggagactttgcccgagcagcttcaggaaaccgcacgtctgcggatggaatatcccgacctgaccctggcacgcctggccgaaaaatttgacccgccggtgagcaaggcggggctttcccaccgattcaaacgcatacaggaggcggcccgccgccttgaggctgccggcagaaccaccggacagccggcggaaaaaggttaagcaatgacggaagcaaaaagacagtttacccatctgcatgttcataccgagtacagcctgctggacggcgcctgccgcatcgacaggctgtttgaccatatcaaggaaatggggcagacggccattgccatcaccgaccacggcgtcatgtacggctgcgtgcagttttatgacgcggcggtggcggcgggcatcaagcctatcattggctgcgaggtctatgttgccacccgtacccgctttgacaaggtcaaccgtgtggacggcaataaccacctgatcctgctgtgcaaaaacgataccggctataagaacctcatcaaactggtgtcggccggattcctggaaggcttttactccaagccccgggtggacaagcagctgctggaacagtaccacgacggcctgatctgcctgtccgcctgtctggcaggggagatcccccaggccattctggcgggggattaccagaaagccaaacagacggccctgtactataacgaactgttcggtcagggcaattattatatcgaactgcaggatcacggcctggaggaagaccgggtcgtcctgccccagctcatccgcctggcacgggagacgggcatccctctggccgccaccaacgacgcccactacatccgcaaagaggatgccaagatgcagagcatccttctgtgcatccagaccggcaagaccattgccgacatcgaccggatggagttccagaccgacgagttctacctgaaaagcaccgacgagatgtatgacctgttctccatggcccccgatgcctgcgagaacaccaaccgcatcgccgacatgtgcgacttccactttgagtacggccagaccaagctgccctacttcaaagcgcccgacggcatggaaaaccaggaatactttgaaaagctctgccgggagggcctggaacgccgctatcccggcaaggtcaccgacgagctgcgggaacgcctggaatatgagatcaacgtcatcaagacgatgggctacaccaactactatctcatcgtctatgacttcatcaactatgccaagagcaaaggcatccccgtaggcccgggacgcggttccggtgcgggcagcctggcggcatacagcgtgggcatcaccgacatcgatcccatccgctacaacctgatcttcgagcggttcttgaaccccgagcgcgtctccatgcccgactttgacgtggacttctgctacgagcgccgccaggaggtcatcgactacgtcaacgaaaagtatggccgggaccatgtggcccagattgtgaccttcggcaccatggcggcccgcaatgcggtgcgcgatgtggggcgtgtcatgggcctgccttatcaggacgtggacaaggtggccaagctcatccccatggagctgaaaatgaccctccatcacgccctggaggtctcgcccgacctgaaaaagctctacgataccgacgaaaagatccacgaactcatcgacaccgccatcgccgtggaaggcatgccccgccatgcgtccacccacgcagcgggcgtcgtcattacccgggacgctgccaccgagtatgtgcctttggccaccaacgacggtctgcccgtcacccagttcaacatgaccgagatcgagcgcctgggcctgctcaaaatggactttctgggcctgcgcaccctgacggtcatccatgacaccgaagtggcagtccagcgccgggaaccggactttgccatggcaaagatcgactacgacgaccagcccacttacgccatgctgaccaacggcgagaccgagggcgtgttccagctggaatccaccggcatgcgccaggttctcatgggcctgcgcccccgcaacctggaagatgtcatcgccctgatctccctctaccgtcccggccccatggactccatccccacctacctgcgcaaccgccgggaaccggacaagatcagctacaaaacgccccagctggcgcacatccttgatgtcaccaacggctgtatcgtctaccaggagcaggtcatgcagatctgccgggaactggcaggcttcagctacggccaggcggataatgtccgccgcgccatgagcaagaaaaagcacaaggtcatggaggccgagcgcgaccattttgtccacggctgcaccgaccccggtcacgaatgtcccggctgcgtcaataacggcatttcggagcaggctgccaatgagatctacgatgacatgagcagctttgcctcctacgccttcaacaaatcccacgcggcctgctacgcctacgtggccttccagaccgcctatcttaaatgtcactatcccagggagttcatggccgccctgctgaccagcgtgttggataacacttccaaggtcatcgaatactccaccgagtgccagcgcctgggcatcaaggtcctgccgccggacatcaacgtctcccggggcggcttcaccgtggacggtgacgctatccgtttcggcctcaacgcggtgaaaaacgtgggccgcaacctcatcgaggcggtcgtcgccaagcgggaggagcggccgttccgtggcctgtacgacttctgcaagcgtctgcacggcaacgaactcaaccgccgcgcggtggagagcctgatccgtgccggtgccttcgatggattggaaccctcccggcggggcatgctggaaagtgtggaacccatcctcaagagcattgagaatgagcagcggcataacctggaagggcagatggacctgttcagtgtcatggcaggggagagcagtccccagaatgacgactacaaagtcccgcccatggtagagtacaccaccgctgagcttctccagatggagaaggatgtctccggcctgtacctgtccggccatccgctggatgcctaccgggagcagatcggcaagatctccacctgcaccgtctcccagctctgcggtgaggacgccaaaaactttgacaaccagcatgtgaccatcctgtgcacggtggtcaagaataaggtcatgaccacccgttccaataccctcatggcctttaccaccatcgaggacctgaccggcaccatggaaatgctggtgttccccaaagtgtttgccgagtgccgtgcctacctgcaggagaacgcggtcattgtcaccagcggccgcgtatcctataaggaggacgagggcacccgccttctggtggaaggggtacgtcccatcgacggttatgacgcggaccattccttcggagaaaaccgcgttgccgcccatgaacaggcccgccaggcggagcgcaaagtcacaagcctgtggctgctggtgccgtccatgcagagcaaggaaatgcacgcggtggaaaatctgctgcgcaacattttcgacggtccaacgccggtgtacttcaaatttgaggataccggccaaagaatgcgtgctccccagagcatgtgggcgcacgatcacccttatttgcgcgcagaattggagcggattttgggcaaagatcacgtaaaagagcagactgcaaaataaatccatgacttttgcaagaatcgtccataatctgtattgccgagctgtggtataatgaggttgtgaaaaatttgatttattgtttcctgaaatggaggggcaactcttatggcaaaggaaattaaaactattggcgttttgaccagcggcggcgacgctcccggtatgaacgcggcggtccgtgcaatcgtgcgtaccggcatcaccaaaggttaccgcatgatgggcattcagcgcggttacaacggcctcatcaacggcgagtgctacgagatgaacgtccgcagcgtttccgagatcatccatcgcggcggcaccatcctgtataccgcacgttgcctcgaattcaagacccaggccggccaggccaaggcccttgcccgctgcaaggagctgggcattgacgcgctggtcgtcatcggcggcgacggctccttcatgggcgcccgtgcgctggccaaccagggcattccctgcgtgggcatccccggcaccatcgataacgacatcgcctgcagcgagtataccatcggctatgacaccgccatgaacaccgcggtggaagccatcgataaactgcgcgacaccacccagagccacgaccgctgcagcgtcgtcgaggtcatgggccatcacgccggttacatcgccctcaacgtcggcattgccaccggtgcgctggcggtcctgctgccggagcgtccctttgacttcgagcgtgacattctgtcccgtatgcgtcagacccaggtcaccggcaaaaagcacttcatcatcatcgtttccgagggcgtcatcagcgctcaggaactggccaaccagatccaggctgccacgggcgtcgattcccgcgctaccgttctgggccatatccagcgcggcggctctcccacggtccgcgaccgcgtcaacgcttctctcatgggctatcacgccatcgacctgctggataagggcgtttacaaccgcgttgttgccatgtccggcgacaagatcgtcgactacgatgtcaacgtcgctctgtccatgcacaagaccatcgacatggatatgctggaagtggcaaactccatctccatctgatcgtacagacaaacatatcacgccggggaaggcagcatgccttccccggcgtttttgcatgttccccgacaggtgcaggaaagaggagaggccggagggcgacaaaccattttgattgccccgcccgcatcccacagagcgaaaaagtttcaaagtctttccgcaaacacaaaccgccccggcagaggccatcaggcactctgccggggcggtagtttcaaagggaaatcaggcgttaaaaacgtacttgttcagccggtcaaaggcttccttgaccacagcggtggggactgccaggttcatgcggatggcgcactccccgtggaaggggcggccgtcctgccagacaacgcccacgcccacgccggcgcacagcagctcgtccagcgtcttgccgtgtttggcacaccagccgctgcaatccaggaacagcatataggtgccttccggccgggccagggacacgccgtcaaagtgctcggcaatgtagtcgcaggcatagcggacgttttcgcccagaacttcccgcagctcgtccacccaggtttcaccttccggggtgtaggcgcccatcagggcgtgcatccacagcacgttcatggaattgtagtgggacaaggatgcttccttgttgatgcggtcgcgcagcgccttgttgtagacgatatggtagctgcccaccagacccgcaaggttaaaggtcttggaaggtgcatacattgcaatggtgcgggtacgggcatcctcgttcaccgactgggtggggatgtgcttgtatccgggcagagtcaggtcggaccagatctcgtccgaaatgacaaaaacgtcgttgcggcggtagacgtccatggcctgctccagttcctcccgagtccagacacggccgcaggggttgtggggggaacagaaaatggcggcgtgaatatggttctcctggatcttgcgctccatgtccgcatagtccatgcgccatacacctgcatcatcctgatacagcgggcttgccacaatgttgtagccgttatttttcagcacattggtaaagccgatgtaggtgggggagtgcaccagcaccgagtcaccggtggagcacagcacccgcagcgctgtgatgacgccgcccagaacgccgttttcgtagccgatgtcctccggggtcaggccctgcacgccgttgcgctctgcctgccagcggatgatggcgtcgaagtattccttccggggctgaaaatagccaaaggccggatgctgcgcgcggcggatgatggattcggtaatggcgggcagtgtggcaaagttcatgtccgcgacccacatgggaatacgggaaaatccctcctgaatctgtgcgccgggaatggggatcttctccacggcaatggcatcctgtccttcccggggcagcatggtggtgaaatcgtacggcataaaacatttccctctttctgtctgtgcggttccataaaaaagcaaggctgcaaaattcactctgaaaagcggcagatgctccgttgtgagccattggcggcaatgcagtatcttggatttttatgtccctcacgatttattgtggcggagcaggcagcatggggcttgctccgcagagatatgccggactgcgttgctgcaatcagcggcccgcaggcggtagctgtcatttcgattttaacagactgtgcaatcaaacgcaagcaggaccgggaggggcggtctctgtccttccgtatgcagagcggacaaggtgcaaaaaacagatttttggcttatatgcgcaaagtggcgccgaaagcgctgaaatttttgataaaattacggtaaaatcttaattcggcagatgaaaaaaacacggcgccgtggtataatcaaaataatatctgagtgcgctgggggcggtactatgcggcgggataaagatgcccgggtgctgctgctggcgacacttgccgcactggcagccatcgggtttggggcgctgtttctcattgcgccggtatggcagccggggtacacgacccgggccacgatgtcggtcagcgaggcggcgcaaaggacggagcggcaggatgccgcccctgccgaggaacagggagaacccgtcaatatcaacaccgcaacgctggaagagctgatgactctgcccggcatcggggaggcaaaaggccgcgcgatcctggcataccgggaggaacacggcggttttgacacggtgcagcagctggcagagatcagcggcatttctcagcgcatggtggatgaatggggcgatcgcgtctgcgtttcagattaaaacgggagggaaccgctttggattcaatggattcgatttttatcaatcgcgaactcagctggctggacttcaacagccgcgtactagcgctggccaaggataaggccgtgcctttgggggagcgtctcaaatttgaggccatcttcggcagcaacctggatgagttcttcatggtgcgcgtggggtcgctgtatgaccagacgctgctcaaggacaacaagctggacaacatgacccacatgaccgcctcgcagcagctggcggccatcatgcccaaggtggcggaactgcaggccaagtgcgacaaatattatctgcacctgctggatcagctggcacagaacggctaccacaagatcgactttgccaatctgaacaaacggcaggagcattcctggaaaagctatttccagaacgagatcttccctgtcctcagcccgcagatcgtggaccagcgccatccgttccccttcctgcgcaacaagggaacctactatatcgtgcagctggtcagcaaaaacgacggcgtacattacggcatcattcccatcaacagccagtttgagcgggtcctcttcgtgcgcgaggaagacaaaacctacttcgcctttgtggaggaactcatcgcccattttgcgcccatggtgttcggcaagagcgcggtgcagaaatcctgcctgttccgcgtgacccgcaatgcggacatcaccgtggacgagggcatgatggatcatgacatcgacttccgtgacgtcatgagcgaactgctgaaaaagcgccgcaagctggcggcggtccgtctgcagttctggccggatgcaccgcaggacatcgtcaagttcctgcgggaaaaactggtggtccccgccgaccgctgcctggcccaggtatcgcctttggacctgagctgcatgtaccgcctgacctcccgcatgtctgcggatggccgtcaggaactgttctatccgccggcaaagcccatccaggctccgaccacctacaacctgtatgaggaagccaagcaccgggacgtgctcattgcctacccgtaccagagcatccgccccttcatccgtatgctgatgcgtgcgggcgccgaccctgatgtcgtctccatcaagatgaccctttaccgcatggccaacgactcccagatcgttcaggcgctgattgcagcggcggaaaacggcaaacaggtcgtggccatggtggagctgcgtgcccgctttgacgagcagaacaacattgactggtccaaacagctggaggacgcgggctgcaccgtgttctacggttttgacgactacaaggtccattccaagctgacccttatcaccagcaaggtggacggcaaataccgttacctcacccagatcggtaccggcaactacaacgaaaagaccagcgagctctataccgacctgtccttcatcaccgccaatcaggaaatcggcgaggaagccagtgccgtgttcaacaacatggcccttcagcgcctgaccagcgaggccgacaccatgctggtggcgcccctgcgcttcaagtcggtgctgatgaacgagatggaccgccagattgcccgggccaagcacggcctgccggcgtccatgatcctgaaaaacaactccattaacgaccccgagatcattgccaagatcagcgaagccagctgtgcgggtgtccgggtggatatgatcgtgcgcggcatctgctgcgtgcgggcaggtgtgccgggcaagacggagaatgtccatatccgcagcctggtgggccgctatctggaacactcccgcatttactgcttcggggaaggggagagccggcatatctatattgcctcgggcgacttcctgacccgcaacaccgagcgccgcgtggaggtgggcgtccgcattgacgacccggccattgccaagcagctctacggcattctggacctgcagctgagggataccgtcaacgcccgggtcatgctgccggacggcacctatgtcaaggtcaagccggaggaaggcaagccgccggtggacagccagatggcaatgtacggttacttccagcacggctgggatgctccggccaagcctgcgcccgccgcacaggaaccggcccgcaagaccggcaccgtcaaagcccgccgggtaccttccggtactgctcaaaagacggagggggcatcctcgacccgcttccggggtattttcggcggactgttcgggcggggcaaaaaataagccgccgcaccggacaggcgaaagaaggaaacgcaccgtcccggcgctgtgctcggacggacaaggagagaaaaacaatgaaaagctgtgtactgacccgcaccttctcgtgtgatcccagccggatctggctgtatctgaccaacccggccatgaaccactggcgcaaggatgtgaccgccgccgacatcagcgccgacggcatgcaggtggtggagaccatgaccgacggcagcaaaaccgagatcacctttaccgacaaggaaaagccccgccgcatgacgggaacctttgtccacggcaaggtaaagggcggattcacggtcatcctgctgggcggcggtgactgcaccagcgtggagtgcacctttgaagccgagggtctgggcctgttcaccaagcccaaaaaactgctggaagagcggttcgatatgctggcacagactctgggcgcctgaacctgaactgtttcagggcagacgatcataaacaagcggggcacgctatggggaaattccccgggcgggccccgctttttctgtgagaaaaccggtcatgctttggcagcggccgcatatatatcggttgtgagcaaaaacgggcgccatgccgcagccgaaagaaagggaggcagccgaaatgtgggaggacgcgacacccaaacccatgccggaaacggcggaacaccgggacggttcatcgcccgccccggcgtcccgacgcagcgacggcaagacgcaggataacctgatcctttgggcgcagatcctgctgtgcgcggcgatcctggcgggggtgtacgcggccaagacccttggcctgcccatctatgccactctgcgcacggcctttgaccaggccatgcaggagcagggactggacgccttcggggaggaacgggaactggtgcgattcatccagaccggcatcgatacccttggcgaggccgcccagcaggtggcggtgtctctggctgacggagctgccacgggggagactgcctcccggacggtacatggccgcaatgcgccgcagcaggccccggcggggagctcgctggaaagctatctcccggattttgagctgactctcccattgccggcagggttcagctgtacatcgggatatggctggcggcagaaccccacggcggacgacggcagcgaggatttccacaccgggaaagaccttgccgccgccgaaggcacaccggtctatgccgccgccgacggcaccgtgcgaacggccgcccttggcagcagctacggcaattatgtgcggattctccatgaagcgggggatgagacgctctatgcgcatatgcagtatgtttttgtgcggccgggggagcaggtccgtcagggacagcagatcggcacggtggggcagacgggcaacgtcacaggacctcacctccattttgaactgctccacgccgggatacgctacgaccccaccgaagcccttggccttgcctgaactgcgcctgcgggtcaaaacgccctgcgggctgctgttcttttatacgctgcttctggcggcggactccaccggcgtgctgcggctggggctgctctgcgccctgctccatgagtgcggccacattgccgtgttcgtggccctggaacaccgcctgcctgcactggaagcgtctttctcggggctgtgtctttccatgcggggcgtgctgctctcgccggggagggaactgctgctggctgccgccggccccggcgtcaacctgggactggccgctgcggctctgctgtggatggaaggcccggcggggtacggatatttcgggctgtggtttgcctgtaccaatctgttggtgggcggtttcaatctgctgccggtccccgggctggatggctggcgcatggcgggctgcctgcgcccgctgctgtccggagcgtttgcccgccgcggtaaggctgttccttatatataataggaaaggaccgcacaggggagagcattctcccgctgtgcggtccttttgtctgccccggcggggcagggtcattcgtaagtacgccgcccggcaaagatgcagagggggcggcgggatttgcccgcgttcatcagctgaacggcggcggccagggtggctcccgcgctggtgcaggcaggtaccccgtcaaagaagagcacctcccgtgcggcgcgctcggcgtcggcagtggagaccgtcagcaccgtgtccaccacgtaggggttgtagttttccgggacaaagccggggccgatgcccgcgatgccgtgatgccctggcagcccgccgctgatggccgcgcactcgctgggttctaccgccacaatgcggatcatgctgttccaggctttcaggtattcggccacgccggtgatggtgccgccgctgcccacgcccaccaccaccgcgtcgatgctgtcgcccgcggctttcaggatctgcgggccggtgactcggcggtggtattcagggttgtcgtcgttggaaaaataattggtgaagtagccgttgtagcgggcggcagtgtccgccgccacacggtccagagccttgcgtccgccgctgctgcataccacgatgcgcgcacccagactttgcaggtgctgccggcgggagatgggaagggcgctggggaccaccagaatgcaggggtggccggtggtcgcgcaggagaccgccagcgccgcgccaaagctgccggaactggcttccaccaccggcatccccggtttgagagtgccgcgctcggtagccagggccagcatggtctcagccaccccgtccttgcaggtccccgtagccccgccgaaatccagataagccgctatgctggcctgaaggccgtgccgccccgaaaagcccgacagctcaacgacagggcacttgtacacgtcctgatagtagctttgcaggatccccactgcgccaaccgtcctttcacacaaaaaatcgtaccgcccgcaggaacggctcctgtacgttccatggtacagttccgcaagcgtcccgcgcggcgccggcggggacagacccctgccggacaaggaaatgctttcttattataccatatttttatcttttgtgtgagaatcccgccgggaaaatgcgaaaaaagccggaatcttgtcccaccgtgccgaaaaaacatgaattttttcaaggagcaccagggccgtcgttcctgcctgtgaaaaaagtcagaacacagcatctgctccgaaaccgggcaggggaggcggtatgcccctatatctggggatgacctgccgggacaagctgcgaaaagacggggaaaaggcaaaaaaataatcggggtttgtcaagccaaactgcttgacacccgcccccggctctgttataatcactagctgtaaaggaaccgactttacacaaacgaccgtccgctgaacgtacaggaggcaccaccgtggcacaggcaatgaaggatctggaattttcgatcctgctggaccattacggttcggtgctcaccgagcgtcagcgcagcattctcaccgaatactatgacgaggatctctccctctccgaaatcgccgaaaacttcggcatttcccgccagggcgtgcgcgatgccatcaaacatggcgagtccaccctgcgggagatggaggacaagctgggcaatgcccgccgccatcaggcgatgctggctgacctggaacgtctggagcagctggtcaaggagatccgctgctgcaattcgggattgtacacgccggtgccgcgcatcaagcaggacaccgacgagatgctgaccatactggaacggctcggcacgcaggaggaagcgccccatggcatttgaatcattgacagaacgcctgtccggcgtattcaaaaagctgcgcggcaagggtcgcctgagcgaggcggacatcaaggccgccatgcgggaagtccgtatggccctgctggaagccgacgtcaactacaaggtggccaaggacttctgcaatcaggtgtccgagcgcgccatgggccaggaagtcatggaaagcctgactcccgcccagcaggtcgtcaaaatcgtcaacgaggaactgacccgcctgatgggcggcgacgaacccacccagctccacatcaagaacaagggccagaccgtcctgatgatgtgcggcctgcagggcaacggtaaaaccacccatgcggccaaactgggcaaatactaccgcaaactgggccgccgccccatgctggtggcctgtgacatctaccgccccgccgctatcgatcagctgcgcattgtgggcgaacaggcgggcgtacccgtctttgaaatggggaccgaacgccccgaagtcatcgcccagaaggcgatggcctacgccagagaccacggcaatgacatcgtcatcctcgataccgccggccgcctgcagatcgacgacgatctgatggatgagctggtccgcatcaagcaggccgtggaagtggacgacaccctgctggtcgtcgacgccatggccggccaggaagccgtcaacgtggcccagaccttcaacgacaagatcggcatcgacggcgtcatcctgaccaagaccgacggcgatacccgcggcggcgcggccctctcggtactggccgtcaccggcaagcccatctacttccagggcatcggcgaaaagctggacgacctcgagccgttctatccctcccgcatggcggggcgcatccttggcatgggcgacgtgctctccctgatcgagaaagcccaggcggtgcaggacgacaaggtggccgaggaaaccgccaagcggatgatggccaacaagtttgacctcaacgatatgcttgcccagtttgcccagatcaaaaagatgggcggcgcctcggcactgctctccatgctgccgggcggcaatcagatcgaccccgacaccctggacgagaaagccctgccccacatcgaggcgatcatctattccatgaccccggaggaacgggccaagccttccatcatcaatcccaagcgcaagcgccgcattgcggcgggcagcggccagaccgttgaggcggtcaacaaactgctgcgccagtatgagatgatgcagaagctgatgaaacaggccaagcgcaaccccaaaggtttcatgcgccgcctgggcggactgcgcggcatgcgctgagcccaaagacaatcaaggtatctcccttacggctttacggcccaagggtgatgatagaaaccggcaccccaaaaagggccgtaaacagaaatttggaggaaaagtaacatggttaagattcgtctgcgccgcatgggcgccaagaaagctcccttctatcgcgttgttgtcgccgacagccgctacgctcgtgacggccgcttcatcgaggagatcggctactacgatcccaccaaggagccctctgttgtcagcatcgacgccgagaaggcgaagcagtggctggccaacggcgctcagcccaccgacaccgtccgcgttctgctgaagaagtccgcgatcctgtaacaagaacggaggcgcaccatgcaggagctgctgattgcagtcgcacgcggccttgttgaggacaaggacgctgtgcaggtcacggtcgaccctgtgcgcgaggatggtaccgtcgtctatcacctcaccgtggccgaggatgatatgggccgcgtgatcggcaaacagggccgtatcgcaaaggcgatccgcgtcgtgatgcgggccgccgccgtccgccagggcgaaaaagtcgtggtggagatcggctgatcccagacgtactggcaccttgccgctgtgcgaggtgccttttttgtatgcttttcccaaacgattcaaaaggagaccgctatgcaagaatatctgcccgcctgcaagatcgtcaccacccacggcgtccgcggcgagatgaaagccctgcccctgtgcgacggggcaaagttcctgtccgggttcaaaacgctcttcaccggggccgatggctcgggggagcgccggcttctgggcgttcgcgggcaggggaacatgctgctggtccggctggagggcgtcagcgacatggacgccgcccgtgccatggtggggcggaccctctacctgcgcaaaagcgacgccaaactgcccaaaggccgctatttcattgatgacctcatgggctgcgaggtgcgggacgccgccaccggccaggtgtacggcaaggtgacggatgtcagccatcctgctgcccaggatgtctatacggtcaccgaccccgacggcggggaacatatgatcccggtggtgccggagtttgtcaaaaccatcgacgtggaagcccgctgtgtgctggtcacgccgattcccggcatgttcgacatgccggtcaacggggacgaggaatgaaccatgcgcattgatattgttacgcttttcccggagctgtgcgacagcttcctccacgccagcatcttgggccgtgccgccgacaagggcctgtttgaggcgcactgccaccagatccgggactacaccaaaaacaagcagaaacaaaccgacgactacccctacggcggcggctgcggcatggtgctgtacgctcagcccattgccgactgtatccgcgcggtgcaggctcagtgcgcggaacagggcagaccccgcccccacgtggcctttctcacggcggcgggggcgccctacaatgaacagacggcccgccgcctggccacctacgacagcctgattttggtctgcggccattacgaggggatcgacgagcgcgtcatcgaggcgttcggcgacgaggagatctccatcggcgactatgtcctcaccggcggcgagctggccagcctggtggtggcggacagcgtgctgcggctgcagcccggtgtgctggccgaggaaaaaggctaccaggaggaaagctactgggacggcctcatcgagtacccccagtacacccgccctgaagtgtgggaaggccgcgcggtaccgccggtgctgctcaccggcgaccacgacaagatcgacgcctggcggggcaagcagagccgcgcccgcacccgggcccgccgccccgatctctatgaccgctggtgccgcacccaccccctgactcccggcagctggaagcgcaacgaacgcgcggctcttgtccgcaccgaggaacagctggaagccgccgcccgcgtttacagcgaaagctggcagcagtcccatgaggagatctgcaccccggattttgtggcggagcacaccccgctggccatgcgtcagcgcctggatgccgaccgcgccgcgggctgggccttttacctgcacagcacggcaggcaggccggacggcattgtgggcgtctgccacaagaccggggagatcggccggctgtatgtgctgcccgccgcccagggcaggggcatcggtgccaaattgctggaattcgcccgcaaaaaactgccggaacatgcccgaccctttgtgacggtgctggcatccaaccgcgccgccattgccctctacctgcgcatgggctaccgggaagagagcggttttacaaactttttacagcagactgaccaaaagttttcggatagagtgccggaagtgaaacttgtttatgcatcgcccaaaatcgacaaaacgggcgtttgaacgcaagttttttcggtatacctgaacaatattgttgaaaataaactggcaaatctgcacaaagaacgctctgtggctttggcaggattgcggaatcctgctaaatttgacaaaatctactgtacaaaaggcataaaataggttaaaatataatcaattcagggcggggaaccagtgcaataccgcctgagggagcccgcggtgaatgcttgggcatattattttttcgaaataggagagaataactatgtatgtgaaagaagttaccgttgagaatcaggttggtttgcacgcccgtccggctaccttcttcatccagaaggcgaacgagtacaaatcttccatctgggtcgagaaagaagagcgtcgtgtcaacgctaagagcctgctgggcgttctgagcctgggcatcgtcggcggcaccaccatccgcatcatcgcggacggcaccgatgagcaggcggcggtcgacggcctggtcaagctggttgattccggcttctccgagtaatcgcagcatcatattttctcttgaaccttttgcggcgggtgggtttccactcgccgttttttgggtgtatcccatccggcgggaaggagcgccgtttccatgaccaaagctgaactctaccgcaaggcatgtatgctgccgcttttgcccggcgtctatatcatccgggacaagtcggacaccatcatttatatcggcaaggccaagcgtctcaagacccgcgtctcccagtatttccgggagggcgtcccccacgacgccaaggtcacccagatgatcgcccatgccttcaacttcgatgtcattgtctgccagtcggagtttgaggcccttgtcctggaagccagccagatcaaggcccatacccccaaatacaacatcctgctcaaggacgacaaggggtacagctatgtcaaggtgacgaaaggggagtggccccgcctttccgccgtgctccagaaagaggaggacgacgccgaatatatcggtcccttcacctccgcctttgcggtgcgggagattgtggagaccgcccaggactgctttcttctgccccgctgcaacaaggagttcccccgggacatcggcaagggacgcccctgcctcaatgcccatatcggcaaatgtatggcggtgtgcagcggtaagatcagctgccaggcctataatgaggccgtccagaacgccatccgcatgatccgctacggcaagcgggacatcgtcaagcagctgcgggacaagatggaggccgccgccgagcgcctggactttgagtccgcggcgctgctgcgggaccagatcgccgccattgagcgagtctcggcggggcagaaggtggtcatggacaacgacgccgagatggacgtgctggcctttgcaggcaccacccacgcggtctgtgcggccattctgcgttaccgggacggccgcctgaccgacaagcgggaatttctgttccatgatacctccgacatcgcggccctgcgggaggagttcctgccccagtattatctggacggggagaacgtccccaaaaccattgcggtggatgctctgccggaggaccacgaagccctgaccgaggccttgtccgaggctcggggcagtgcggtcaatctgtatgttccccagcggggcgacgtggccaagctggtcactatggcctacaccaacgccgtggaacgccttgcccgggagagcggccgctatacccgggaggaaaaactgctggaggaagctgcccagatgctggggctcaagacgccgccccgggtcattgaaagctacgatatttccaactggggcgacggctccagcgtctgcggcatgatcgtgttccgggacggcaaacccctgcgggcgggctaccggcgcttccgcatgaaaacggtggccggtaccgatgactacgcctccatggcggaggctctctcccgccgcgccggggaatatgaggccgccaagcgcggggaaaagcccgacacccccacgaaccagttctcggttttgcccgacctgatcttgctggacggcggcaggggacaggtctcggcggtgcgtgcggccctgaaaggcacgcagctggccggtgtgccgctcttcggcatggtcaaggacgaccatcaccgcacccgtgccattgtggacgacaccggctccgagatcgccatcaaccgcaaccggggcatctttacctttgtgacctccatccaggatgaggtccaccgctatgccaacgactaccgcaaacgcctgatgaacaagcgttcctacgcggctaccctcaccgccctgcccggcgtgggggaaaagacctcggctgcgctgctcaagcatttcaagacggtggccaacgtgcgcggggcgtccatttccgacctggaacaggtgcccggcatcagccataagaaggcagaacagatctataacggcctgcacggctgagcctgcacggtgggaacaactattgacaaggcaggcaaaaacacgcataatgatagcactgaaaaagtacgcagaaagggaaaggaggcgcgcagtatgcgtgtgatcgcgggtacggcgcgcggcaaggtactcaaggcgctgcccgggcaggacgtcacccgtccgaccatcgaccgcgtcaaggaggccatgttctccagcgtgcagtttctggtgccgggagcacgggtccttgacttgtttgccggcagcggacagctgggcatcgaagccctttcccgcggtgcagcccgctgcgattttgtggatgcctcccgggaagccttcgccgtggtgcaggccaactgcaaagcggcgggcgtggcccccaaaagccggctccacaataccgatgcgttcacttttttggcgtcggtacgggaaccgttcgacctggttttgctcgatccgccctttgcccatgatacactgtcgaaggtgctgcccctgctggaacccaacgtggcgcccggcggcgtcgtcatctgtgaaagtgaacgggatgcccgcctgccggagacagtgggcggactgacccgggtcaaacaatacaactacggtaagatccttgtcactcgttaccagaaagaggtacaggcatgaatgttgatgaactgctcgatttgatggaagaaactctggaggaaggcactgccatgcctttctctgccggcaagcgcgtggtcgacgtggacaagatgcgcgatattatcgacgatgtgcgcgccaatctgcccgacgagatgcgccagagcaaaaagatcgtggatgaccgcgagcgcatcatccaggaggcccgccaggaagccgagggcatcatcaagcaggccgaggagcgcgccaaggccctggtgtcggagcaggagatcgtcaagcgtgcccagaagcgcgccgtggagatcctgaccaccacccagacccacgcccgcgagatcagcaagagcgccactacatactgcgagactatcctgaaaaactcggaagagacccttgcccgcagcattgcggacatcaaaaatacccgcatgaatctgcgcagcgccacctccaaaggtatgcgcggcggcaagtgaattccggcagggaaagggatttttccccacctgatttcagatgtgtttcaaatatgaaaatttatgacccgcagcggttttcgaccgctgcgggcttgttttttgcagggggatttggtattatagaactgcgattgtgggtaaaagtggttgatccggggtaaaagtggagagttgtcaacactttcaacgaggttttcaacacaagacagacaatcgtacgtgaaaaattgtcgaaagggggaaaacgccgtgctgatgggacagtatgattatgccgtcgatgccaaaggccggctgaatttccccgcaaaattccgcgaggagatgggtcagacgtttatcgtgacctgctggctcgaccattgcctggcggcttttcctgccgaacagtttgaaaaagtcgccgacaagatcgaggaaaaaggcctggtcaagggccgcaaggtcacccgtatgctgtacagctcggcagtggaggtcacccctgacaaacagggccgtatccagctgcccgccaagctgcgcgcctacgccggtctggaccatgacgtcaccatcatcggcaaccgtgagtttgcagagatctggaacaccgccgcatggaaccaaacccaggagggggcggacgacgactttaccgcggccatggaagatctggatttctgatccggccacctgccggatgaccgctgccgaaaggatgtaccaaagatggaatttcaccacgttcccgtattgcttcgcgagtgtctggaaggactggccattgacccggccgggacctatctggacggtacggccggcggcgccggtcactcgcgtgagattgccaagcgcctgaccacagggcggctgatcgcgctcgatcaggacccggatgcggtggcaaccgctaccgaaaggcttaagggcttacccgccctggtggtcagggccaacttccgcgaggctccgcgggtactgcgggaactggagatcgattccatccagggagcgctgttggacctgggtgtgtccagtcatcagctggatgatgccgcgcgcggcttttcctaccatgccgatgcgccgctggacatgcgcatgagccagaccggccccaccgccgcggatcttgtcaacagtctggatcgtgaagaactttgccgcattttgcgtgattacggcgaggaaccctacgcctggcagatcgccggcaagatcgtcgccgcccgtaccgagcatcccatcgagacaacgatggagctggccgggctggtggcctccgccgtgccgcctgccgagcgccgcaaaagcaaaaaccccgcgcgccggaccttccaggcggtgcgcattgcggtcaacggggaactggatgccctgaacgaaggcctggacggtatcttcgaggccctggcgccgggaggcagactttgtgtcatcaccttccacagcctggaggaccgtctggtcaaaaacaagttccgccgctgggcgcagaaatgcacctgcccgccggagttcccggtctgtgtgtgcggcggcaaagccaaagcaaaactgatcacccgtcatccgatcgaagccgaaccggatgaattgaacgaaaaccgccgcagccgctccgccaaactgcgggtgctggaaaaactgtaatgtctggtcccgcgcggccggcagggaagggagggcgtgcccatgacgcaggcagcctatgatttgaacacaaaaccgaagagctacggccagtaccgtgccccgcgcgtgcgcgtggtccgcggctgcagccggctggacaagctgcgccagaccgtcgctgcgctgcgtacggtgttggtcgccgcattgatcctgggcctggtggtgagccttctgtacagccaggccatcattaccgagctgtccggcgagatcgagtccgcccgtcaggaactgacgcaggagcaaagcacctacgactacctgtccggccggatggacaccatcaccagcagcaacaatattcaggagatcgccgagggccagctggggctggtcaaggcggacgccagccaggttacctacatcaccatggaggatgaaagcctgatcgtccgtaccgagtccgatctttccaaactgttgtccggcgtgcgcacggcggcactcagcttgatcggcaattttgacccctgaactccggccggggtatccggccaaagcaaaagcgtgcggccgtgtgcggggattgactccgaaaacgcaggcaggcgcgctttttgcatatcctgcacctgacgaaccattgcgcaaagggaacgttgaaccatgccaaacaagtatccgaacgatcattctcaaaagcccgggcctgaaaataccggcgcttccaacgcgatgcgcatccgcacgctgattctggtcgccgcctttttgattttcggcttcgggctgctggtttatcagctctacgtcctgcagatccgtgactacgagacctaccgcgtagacgcaacggaacagcagctttccgacaccaccatcccggccacccgcggttccatctacagctccaccggcaagctgcttgccaagagcagcgtggtctggaacatcattgccgacccttcccgctgcagtgccgattacatcacccaggccagcgagaagatcgcagaactttcgggcggggtggccacggcggaaagcattgccagcaacctgtccatgagcgacaaaaaataccgcgtgctggtccgcggagtggacatgcccacggccgagtccatcatcaactacgcctcggaactcaacgaccaggcgggggagacggtgctctatctgtacaccgaacagacctccacccgtgaatacccctacggcgccttcatgtcgtcggtgctgggctttaccgacagctccggcaacggcctgtacggcttggaaagctactataacgacattctgtccggcaccccgggacgcagcgtctcgctgcagagcgccggcggcattgacctgaccgactcggagtcggaataccatgcgcccatcgacggcttgaatctcaacctctgcattgacgataatatccagtccatcgttgaggaatacttgcagcaggccatcgccgactacaatgtcaagagccgtgcctgcgccattgtcatgaacgtcaacaccggcgagatcctggccatggcgtccatgaaccagttcgatcccaacgatcccaacaccatctacgacagtgagatgcaggcaatcttggacagcgataccctgacggcggaacagatcgatacactggtcagccgcctgggcgacaccagtgacctgcaggccatcattgaggatggcgtgatcggggatgacgaatattccaaactgcagggcatgatgcgcgaagcccagtggaagaataagaacattaccgagctgtattaccccggttctgttttcaagctggtcaccgctgcggcggcgctggactcgggcctgatggataccaaccagcagttctactgcggcacggaaggctggaccatcaacgccggcagcgaactgtacgagcatacctaccactgcgccaacaacgacgcccacggctggcaggacatggccaccgctctgaacaacagctgcaacatctacttcattcaggtaggcctgacgctgggcgcacaggtgttctacgattactttgatgccttcggctttaccgagcgcaccggcgtggatctgcccaacgagacccgctggatgatctaccatgacgccgacgaactggccctgaccgaggcaaacctggactccagctccttcggccaggcccagacctgcactccgctgcagatggctacggctgtggcagcggtggtcaacggcggctacctggtcacgccccatgtggtggacaccatcaccgaccagagcggcaacgtggtctccagcgtggataccaccatccgccgccaggtcatttcggaggaagtcagcgccgagatccgcaccatgatggagcaggtcgtcggcaagggcgaggacggcagcaccggccgcaacgcctatgtggcaggctacaacatcggcggcaagtcgggtacttcggaaaacctgggccgcgatgagcgcgaggacggcgattattacaagcagatcagctttgcggcggtcctgcccattgatgatcccgagatcgaggtctttgtcatgatggacgacccccgctggacgaatgactacgccagccagatcgttgcccctgtggtgggcaacatcatcagcgagatcgcgccctacctcggccttgagcgcgatcccgaatatgacaccagcgccaccgtggtggtgccggatgtggtcagcaaaaacaactcctgggtcaatgctcaggtggaaatgaacaagaagggcctgtcccacaaactggtgggcggtaccggtactgtggtccatcagtacccggcagcgggcaccgtggttccggtaggctccaccgtctacctctacacccagaccaccactgacaccatggtcaacgtacccaatgtcgtgggcaagagcggcagctttgcggtgcagatgctcagcgccgcgggcatcaatgccaaggtcgaaggcgacgagagcgccctggtcacctcccagagcgtggccgagggagaaagcgtacccatgggcaccgtcatcaccatccagacggcagccgaggaacaaagcgacacaaccaccgacgatacgacggaaccggccgcatcgtcagacgataccggggactcagatgcttccgcggatacttccggggaatgaccgacgtccccaatggaaccgtgccatgtgccaacgggaatgaaaaggagagatgaaagatgaaacccatccatgccaatcaactgctggccggccttgcgctggcagaagccgaacccatcaccgcggtcgtgacggacagccgcaaagtcgttccgggatgcgttttcgtctgcttcccgggggagcgggtggacggccatgactatgcggcggcagcataccgcgcgggagccgcctacatcgttgccaaccatcccgttgacggcgtgccggaaaaccgcaccgtcattgtggcttccagccaccacgccatggtgcgtatggcttccaactaccggatgctgttcagccctctgatgatcggcgtgacgggcagcgtgggcaagaccaccaccaaggaattctgctacgcggtgctgtccgcctttggcaacaccctcaagaccgagggcaaccagaataacgagatcggcctgcccaacaccctgttccgcctggacgacgccaccgagtacgccgtggtggagatgggcatgagcaacctgggcgaaattgagcgcctggcccgtgccgcccggccttcggcgggcattattaccctcatcggggtctcccatctggaaaacctgggcacgcgagagaatatactgaaagcaaagctggaactctgctacggtctgcctgacggtgcaccgctggccctcaatgccgacgacgacctgctgcccaccgccaaactgcccgagcgcctgcgcccggtgtggttcggcatcgacagcccggacgccgacgtgcgcgcggtcaagatcacggcaggggacaacggcaccgactttgtgctgtccgacaaagaatacggcgatttcccggtgcacatccccacggttggcctgcacaccgtcagcgatgcgctggccgcctacgcagctgccacccggctgggccttgacccggcgaaagcggctgcggctctgagcaactaccagaccacgggaatgcgccagaacatcgtgcacaaggcaggcgtcaccgtcatcgaggactgctataacgccagccctgacagcatgcgtgctgccctgggtgtgctgaaaaatcagccggcagagcgccgtgtggctcttttgggtgatatgctggagctgggctcggtcagcgaggaagcgcaccgccaggtaggtgagtgggccgccgaggcaggcgtcgacctgctgatcgcctatggtccgctcagtgcggccatggcgcaggccgcggccgagaaaggtgtaacaactttgcattgcgaaaccgagcaagacgtggtaggatatgtaaggcaaaatgtacacgcaggcgatgcattgctggcaaaggccagccatgccatgaagctggaccaggtactggaacagttttacgcgacgctggcgtgagcagctaaactgatagatttgggggagttctctcatggggatgatagtctcctggatgctggtcgcctcggcggtcgctgcattttcgattacggcgctgtcgggctgcgtggtgatccccgcgctgcaccggctgcactttggtcagacgatccgcgaaagtggtccgacctggcacaataaaaagcagggtacgcctaccatgggcggtctgtgcttcatccttggcatcgtactggcactggttctggtcctggtaggtttccgccgttatgcgccggaactgatgggcacacagcagatccaggcagtgctgcttgtcatgttcctggccctggggtccggcttcatcggattcctggacgacttcgtcaaggtggtccgccaccgtaatctgggccttgtggcatggcagaaactggtcatgcagtttgccgtcaccggcggcttcctgttcggcctcaacgcgctgggcctgctgactacggtcatcaccctgcccggcggcggagcgctggacctgggccttttgtactatcccatcgctttcttcggcatcatcttcctggtcaatgccgtcaacctgaccgacggtctggacggcctggattcctgcgtcacgttcgtctccatgctgggctatctggtgggcgccagcctgctgggcttttaccatgtgtccattctggccacggccacggcaggtgcctgcgcgggattcctggtctggaacttctatcccgccaaggtctttatgggcgataccggcagtatgtttttgggcggcatcgtcacggcgctggcttttgtcatgtgccgtcccgagctggtcctgttcttcggcatcgtctatatctgggacgccatgacggtggtcatccagcgcgtctatttcaagctgacccacggcaagcgcattttccgcatgacgcccatccatcatgcctttgagatgcgcggctggcgtgaggcccgcatcgacgccttcttcagcttcatcgccatgatgggcgtgctgctgggcgttttgtacatttacctgacctgagccggggcgcgccgccgtcccgccttgcccggccctttcgggggccggacggaaaggaaataggaaccccttttggatatgtctgtactcctcagaacccttttccgacccgcgtttttgatgtgcaaggatcttcctctgcgcaaaaaagaccgcgggccgctttcgtggtattttgttgtaacgcttctggttatcattgcctacggcctggtggtgcttttctccgccagctactcggtctcctaccaggaaagcggcgacagcttcagccagatccgccagcagctcggttttgccattgtgggcgttacggccatgtttgccatctccatgatcgactaccgggcgctgcgccacctgacctggtacctgtatttctttacgctgctgctgctggtagccgcgctgttcagcaataacccgacgaaccttaacgccaagtgctaccgctgggtagaaatcgcgggcgttaccttccagccctcggagctggccaagttctcgacgattttgggtacggccgcctttgtggatgccaatcaggagaaaaaaggctccttcctgtacggcatccttctgccgaccctgcccctgatccccacactgtttttgatctaccgccagccccactattcggccatcatcctgattctgatgatctacttcaccatgctgatctgcggtggctgcggcctgaaatggatgctgcccgttctgagcgtcggcgtccttggcatggtgtatatgttgtccagccaggacaactacgtccagacccgtctggacggctggacgctcttctccaatgacacctccaccatgaccgaccagaccgagcagagcatttttgctattgcatcgggcggcctgttcgggctgggcatcggcaacagccgtcagaaacaccagtggctgcccgaagtcaccaacgactttattttccccattctgtgcgaggaactgggctttatcggcgcgttggtctgcattctgctgtttgcggccctcatcattcagggcattctcatcgccatgcgtgcgccggatatgttcggcagcatgatgggcgtgggcatcatgggccagatcgcctggcaggtgttctgcaacattggcgttgtcaccaacaccatccccaacaccggtatcagcctgccgttcttctcttcgggcggcaccagtcttttgatgctgctgggccagatgggcgttatgctcagtatttcccgcgtgggcaatgcccgcatcgaggaacgccgccgacgcaagctggaggcctttgcacaaaaactggaccgcggtacccgcagcgtctaccgccggggtggcacggcccattccgtctgaacacagcgtcttgtttgttagtctgatttcatgggaggctttgtatgcgtgtgctgattgcagccggcggaactgccgggcatatcaatcctgcgctggcgattgctggtgccatcaaaaaaggggaccccacggcggagatccactttgccggccgccgggaggggatggagtacggacttgtcaccaaggcgggctatccctttcaccacattgaaatcaacgggttccagcgcaagctgacccccaaaaacatcggacgcaacgttatggcggtctggcatctggccatcagcggcccgcgctgtgcagccattctgcgggaagtcaaacccgacctggtcatcggctgcggcggctacgtcagcggccccattgtccgggctgccgcccgcaagggcatccacaccgccattcatgagcagaatgccttccccggcgtgaccaacaagctgctggcacgggaggtcgaccttgtcatggcggccagccaggccgcggtggaaaagctgggcgcaccggaaaagaccatcgtggtgggcaacccggtccgtccggaactgtttgagcaggaccgcgccgcggcccgtgcccgtctggaggcaggggacagaacggtgatcctcagcttcggcggcagcctgggagcccgccgtatcaatgaagttgtggctgatctttgcgcctgggaacagaaaacccagcagaagattttgcacctgcacgccactggcagccggggagtggaactgttccgcgatcttggcaaggaaaaaggctttgcaccgggtaagaacctggtggtgcgggagtatatcgacaacatgccggaactgcttgccgcagcggatctggtcatttcccgctcgggggcgctgaccctggccgagctggaagccatgggccgggccgccgttctggtccccagccccaacgtggcagaaaaccaccagtattacaacgccatggaactgcagcaggccggcgcggccgtcgtcattgaggaaaaggacctgacgggggaaaagctcattgagacggtcacacagctcatgtcccagcccggccgcctggccgagatgggccgcaatgccaaggcgctgggccgtcccgacagtttggatctgatctgggcggcgctgcagaaactgtgcgcctgatttcgcacagattttcattggtacagagagatactgtgaacatccccggcgcaggaaaagaagcgcccgggattccggccggactgcggacagcccggtatcacagtgcttggaaaacgccaaacctatgccggcaggcagggcttggcggtttcgtgtttgattgaatgttacggaaagagaggtgaatgcatggaccgcgacgtacaaagccgcaggcaaaaggcgggcgcggcatcccatgcatcctcccgtccccggcagcaggccccgcagcgtccgcgccaggcggtgccgcccaaacgcgggctgggcagccgtgtgggcctgcaaaagcgttctgccgcgcagacaccgccctccatggcgggaaatccgcgcagcaataccggacagactgccgcccggggtacggcacaaaaccagacgccgacccgccagttcgctccgcagcgccaggcaccgccccggcagacggggaacccgggccagccggcaaaccgtcgctaccgcagccgcacaaccaatccccagtcgcccggataccggcagggagcggcccgtccgcctcgccgtgtgacccaggtggagaaaatgcggatccgccggcgtcgcaagatcgtggggattctgtgcctgcttgccgtgctggcggtgggcgtggttctgtccattaatctgctgttcaaggtcaccggcttccgggtggagaatacggaccgcaccaccccggccaacaccggcatctataccgagcagcagatcattgaccttttgggcgtgcagacaggggataacctgttcggcttttccaccaaggccaaatcccaggaactgcagacacagctgccctatctggatgtggtggaggtggatatccagctccccggcacggtagtcatcaaggtgcagccggccaccgagcgctttgccatggagacttccaccggctggctggtgctgagcgacggcctcaaggtcctgcggggagaagcctcccagcccgacggcctgatcctgctggatgcggcggtgcaggccaattcccagctgaccgcaggctcctacctgaacctggtggaaaacggggagaacctgtccgccgccacgccggagactgccgagacggcagaggaggacacctcctccgcggcatcttccaccgatgaggaagaggaaacctccgcaaacgaggtcctttttgaaatggtcgaccgcatggaggagcaatcccttcttggcggtgtcaccatgatctccatgcgggacccggatgagatcagcttcctgtatcaggggcgggtctcggtgctgctgggcacctccaataacctggactacaagatgcgccttgccgccaacatcattctggacgtggacggcaaaggtctgacctccaccgacaggggcacgctggacgtttcctatcagcgtaccgacggggagatcgtggcttactttatgcccgccgaccccgcccctgaaccggagacgggggacgagaccggagatgccggggacaccggagacacggccggcgacggcagtgataccggagacagcactgccggagattccgattcctcacagtccgcagactcggatgccggctgacaccggcaacgttttgcatcgacacaaacagaaagagccgctctcgcaaagagagcggctctttttcgtgtagttgttttgcggcatatccggcgcgataagggcagcggcccgtcatgcagccgggaaccaccggaaacggtcagctctgaggagcctcgtcgccggaaggggcgtttttggtggcaatgggggtctcaaagtagacgctggtggaggggaaggcaaagtcgcagttgttgcgggccatggcgtccatgatctgccagttcagacggcttttcagagcacggaagtcgtcgccgcccagggcagtcacatagcagcgcacctcaatgtcgatgctggacgcgccaaagcccgacaacgtgacctgaatgctttccggaaggacctgcgagtcttttttcagcaggctgcgcagatcctcgcacagggcctccatgcgctccttgggcgtcgagtaggtcacgccgatggtaaagttcatcagacggtttttgcgggtggtggcgttgcagatgtactcggcgctgaccttggagttctccaccgtgatgacgctgttgtccagggtgcggatgcgggtggagcggaaggaaatgtcctccacggtgccctcaaagctgcccagggtgatgtaatcaccaatgccgaaaggccgctcaattaccatggatgcaccggcgatcaggttggacagcgtggactgcgcgccaagggaaatcgccaggccggcaatgcccgcgccggtgatcaggccgttcacctcgcagcccagcaggttcaatacctggatgccgccgaacagcaataccagtgcccggtagatcttttcaaaaaagctgttcatcgtcttgttggtttccagatcaagacgattctgtgcgctgcgcagcagcaggcggcacagcccggcggagttccacaagccctgcgtcagcaggcagacggcggcaatggccatgacggtgcctgcggtatcccagaccggggacgcatcatcaaaggaccaggggaacatcaaaaaggcgaagtaccacagcagacagcgcacaaacaggatggcaggctcggtcagtccgtcaaacaggatctgcagccagtcgggcattttggattccagcctgtcacgcagctggtggaacacccaacggaacagccgtgcgccgaacagccccaccgcgatcaggacgaccgtcagcaggatgcgcagcaggggagcgtactctccaaagccggcaagccatttcaaaaattcagttttggtagtcatagaaaaagcctttctgtcagaaataggatgcccgtgccgaacaggcagggaaacacgggttattggtattgtatcatgaacagttgcaattttcaaaacatctgctataatatggagcagaaagtctgtttcagggcggggtgaaattccccaccggcggtacagcccgcgaccgtctgccgtttggcaggcgctgacccggtgagattccggggccgacggtatagtccggatggaagaaacggaagctgtttgctatgcttgcagttcgccctgtcggtgtgtattcacctgacagggcgttttgttttgcaggctttgggtgcgcgcccctacaaacctcccggttcaaacttgttgccggctttccaaaaaaatattttgaaaggccggttggtttgatttgcctttccggccgggaggtattgttatgcaaacaaaaagtaaggtccgtcccctcgccgtcactgccatgctgtccgctgtaggctgcatcctgatgatgctggatttccccatccccatgctcatcccgtcctttgtcaagatggacttctctgagctgcccgcgctgctggcgtccttcagcctgggtccggtgtacggcatcgtcgtctgcctggtcaaaaacgtactgtccgccattttccatggctccaccctgggcatcggcgaagtctgcaactttgccatgggcgctatgtttgtgggcgttgcgggcctgatctacaagcataaaaaatcccgcaagactgcggtcattgcctcgctcatcggcgcggtggccatggcggcgttcagtgtgccggtcaacttcttcttcagctacccggtctatgcggcggcgtttggcggcatggacgccatcattgcggcctatcaggagatcaaccccaacgttaccggcctgctcagctgcctgatcctgttcaatatgccgttcaccctggtcaagggcctgctgacctccctgatctgctttttggtctacaagcccctgtctcccatgctccacggcagaaaataaaaacggctgtttgtacaaaaaagtcgaaatgtatcaatgcggaaggttgacatccacgcagtaaaatggtatgatttcctccagacatcagaatagcaacttatcaagagcggctgagggacaggccctgtgaagcccgacaacctgcgcgcaagcgtaaggtgccaaatcctgcggggaaccgaaagataagccctgggcgtacagctctgccgggctgtgcgccctttgtttttaccaccagattccggcgcggcttgcggggaaatcaagcgctatctgttccatggcagcaattctgccatgggcagggatgcaaacgctttgttttcccgtgctgcccgcgcttcccggcggttgcctttctgaccaatttgacgggaggttttataaaaaatgtccaaattcttgtttacgtccgaatccgttaccgaggggcatcccgataagatctgtgaccagatctccgatgctgtcctggatgccattctggaacaggaccccggcgcccgcgttgcctgcgagacggtctgctccaccggtctggtccacatcatgggtgagatcaccaccagctgctacgtggacattcagaccattgcgcgccaggtcatccgggacatcggctatgaccgtgccaagtatggctttgacgccgatacctgcggtgtgatcaccaacattgacggccagagccctgatattgcgctgggcaccaacgacgacgttgccggcgcgggcgaccagggcatgatgttcggctatgcctgcgacgagacgcccgaactgatgcccctgcccatcagtctggcccataagctggccaaacgcctgaccgaggtccgcaagaacggcaccctgccttacctgcgtcccgacggaaagagccaggtcacggtggagtaccaggacggccgcccggtccgcgtggatgcggtggtcatttccagccagcacagccccgaggtcaccatggatcagctgcgtgccgatatcaccgagcaggtcatccgtgccaccatcccggcggaactgctggatgagaatacccgctattatatcaatcccaccggccgttttgtggtcggcggcccgcagggcgacaccggtctgaccggccgtaagatcatcgtcgatacctacggcggcatggcccgccatggcggcggtgcgttctccggcaaggacccgtccaaggtggaccgttccgctgcttacgcagcccgctgggtggccaagaacgtggttgccgcgggcctggccaagcgctgcgaggtggagctggcctacgccatcggcgtggcacagccggtctccatcatggtggataccttcggcaccggcaccgcggaagatgctgtcatcgagcaggccgtcaaacaggtgtttgacctctgcccggcggctattatccgtgatctggacctgcgcaagcccatctaccgccccctggccgcttacggtcatatgggccgcgaggacctgggcgtcaagtgggagaataccgaccgtgttgacgctctgaaagccgctgttgcccagctgagcaaataaatcaaaataagataagccgcccgccgtgaacgcctcacgacgggcggtttttttgtttgcctgtggcaggagcgatatggtacaataaagccagaaagatagactcgacctgccgtatcggtggagaggagggcctcctgatgaacgaccatcccgaccgtgttttgcaaaaagaaacacaacagcctgcctctttgaccgttgcctggaagaaagcggtggcgcgcacacttgcggaggtgctcctgatcgcagtgatggcggcctgcctttggagcggccaaccccatgagggggcatgtgcggcgctgtttgccgccaacgcagcctttttcgctgaggattacgccgagaccacgaatgcgggctttttggttggtgcactcctgagttttgcagcagctctggcgtggctcttcctgcttctgacctgacgtaacacccggaaaacaacatataaaaacatataaaataaaatgccccggtcgccgtaaggaaaattcctgcggagaccggggcattgattcttggtattggggtagggaaaggctttagtccgccttgcggtgcttgacgatctcatccgccaggcgcatggccacggcgtccttgctctgcaggggcagggcttctgctccatctgcggagatcagcgtcaccacattggtgtccacgccaaagcccgcaccggggaccttgaggttgttggccacaataaggtcaaggtttttcttgtggagcttggcggtggagttttcaataaggtcgcgcgtttccatggagaaaccgcacaaatagagcttctcaggcttgtttgcgccgacccaggcaagaatatcgtcggtgcgttccaacgcaatggagagcgcgccatccgcctttttgaccttgtcctccgccacgacagcggggcggtaatcggccacggcagccgccatgaccagggcgtcggcgtctacgacattttccttgaccgcctcaaacaggtctttggctgttacaaagggaacggtgcggacaaaggggacggacagcccggcgtcgcgggcgcacagcagggtcacgtcggcgccgcgcagcatgcaggcacgggctacggcacaacccatcttgccggtggagtggttggtgatatagcgcaccgggtccatgggctcgcaggtggcccctgcggagacgacgaccttcatgccggtcatgtccttggggcaggccagttcccgcaccacgtagtccaccagcacgctttcctcgggcagacggccggagccggtatcaccgcatgccagcagcccggagccggaggaaatcacggtaaaaccgtagtgctccagtgttttcaggttgtcctgggtgatggggttctccagcatgtgggtattcatggcgggagcaaccagcttggggcaggtggctgccagtgtgacggtggtcagcatgtcgtctgccaggccgtgggccagcttggcgatgacgttggccgtggccggggcaatgagcatcaggtcagccttgttggccagcgagacgtgggcaacatcgtactggaagttgcggtcgaaggtgtccacgatgcagcggttgttggtcagcgtctcaaagacaaggggagtgatgaactcggtggcgttcttggtcatcaatacatgcacatcggcgcccagcttggccagcgcgtgcgcaacattgggaatcttgtaagcggcaatgccgccggtgacacccaaaacaacggttttaccctgcaaagaaatatccggcatacggcacacatcctttttctcaaagtaaaaaaccagaatactatcaaaaaagccccgggatcaaaatcccagggctttaggctggagctgttaggcagattcgaactgccgacctcatccttaccaaggatgcgctctaccgactgagctataacagcaaatggcgacccgaatcaggctcgaactgacgacctctagcgtgacaggctagcgttctaaccaactgaactaccgggccatttcccagctttgtaaccgccgtagcggctgcaacgttgattattatatccgccgaaaggggaaaagtcaaccctttttcaaaactttttttgaaattttttcaaaaaagttttgcttccggtcgaaaaacacgttttgccgtcatatgttgcctttgcgggtgccgaaaaaaagtttgccttgggacgctggtatcgcaggaatcagccctctgccggtacggcgtggcagcgctggccgtcccatttgcccagcgtaacttccacaatgtctcccgatacatggcccggagcgcacaccaccacgggcagatattgtttggtatatcccgtaaaggtgttggcggacaggggagtctccagcagtacgctggcgcggcagccttccatcccggcagctacctgggaacggacttcctccacagcctgggtcatgcggtggctgcgggcttccttttcatgttcggggatttgtcccgggaaatcaaaggcaggggtcccggcccggcgggagtaggggaatacatggaccttcaaaaagcgctgagactgcacaaaggccatgctgtccagaaaatcttcctccgtctcaccggggaaacccacaataacgtcggtggtcaggctggtgttttcctcgccgaaggccttgcgcagcttggcggcgacttcggcgtactgctcggcagtataggggcggcgcatggcccgcagagttttggaactgccgctttgcaggctcaggtggaactgggggcacagcttgggcagcgccgccatgcgggcaatatcttcatcagacagcatatccgggtccaggctgcccagccggatgcgctcgatgccttccacctgggaggcgtgctccagcagatcggccaatcccgtgccggtatcctggccgtagctgggcaggctgatgcccgacagaacgacctcccggtagcctgcgtcggccagatgccgcagctcctgcaaaatgctctcctcgctgcggctgcgcacaggcccgcgggcgcggggaatgacgcagtaggcacagcggcggttgcagccgtcctccacttttacaaaggcgcgggtgtgctcggcaaagcgctcaatgggcagttcctcaaaccgctcgcccttttcgtgggggcggatggccacaatacgctcctcctcaccgtccagcaccttgcgcaccagatcgggcagggcgcggcggctgccggatccggtcacgatgtcggcctcggctacttcggcggcttccttggggaacgcctggggatagcagccggtcagcaccgtcacggcgccggggttctcccgcttggcacggcgcagccatttgcggcttttctggtcgccgaaattggtcacggtgcagctgttgacgatatagacatcggcctcctcaccggagggaacaacggtgtagccgtttgcctcaaacagctgggccattgcgccggattcgttctgattcactttgcatcccagggtataaaaactgacgcgcatgcgcgggtacatcctctcttgtcatgactttgcacatattatatcggaacccggcccaaagcacaagcaccgggcggtgccatatttccgccgccgcccgcatacctttggataagtgccgcggggaccaggctttcctatgcggcgatttgaaaaacaacggtcagggaggcggcccgatatgaaaaaacggttcttgacattgattttgcttgcggcgtttgcgctgacgcccgccgcagcgctgcgcactgcggcactggaagtccagcctgccacacaggccgatttcgatgtgccctgtcaggcggcaatcctgatcgatcaggactccggcacggtgttgtatgagaaaaacgccgacgaacagcggcccattgcatccatcaccaaggtcatgacgctgcttttgaccttccgggcgctggaggagggccgcgtcacgctggacgacctggtcccggtgtcggaacacgcctacggtatgggcggcagccaaatctggctggaaccgggggaggagatgaccctgaatgatatgctcaaggccatctgcatttccagcgccaacgacgcagccgtggcggtggcggagtacatcggcggcagcgaggcggcatttgtggagcagatgaacaccgaggccgcccggctgggcatggccagcacccagttcaagaatgcctgcggcctggacgaagccggtcatctttccacggcgcgggatgtggcgaccatgagccgggaaatgctcctcaatcataccgaaatttcggattactgcaccgtctggatggattacctgcgggacggctccacccagctggtcaacaccaacaaacttctgaacggttatgacggcatcaccggcctgaaaaccggcaccactggcggggcgggggtctgtatctctgccagcgcggagcgcaatggtctgcggctgatcgcggtggtgctgggcgcccccagcagcaaggaccgctttgacgcggcaaggaccttgctggactacggctttgccaactatgaaaatgccgaggccgccctgcccgaggacgcgccgcagactcttgcagtgacccgcggcgcccaggagaacgtttctcttgtgtacgacgctcccggccgttacctgatgaagaagggggacgacaccgccctggaggtccgcctggatctgccggaatccttgcaggcgccggtcacggcagggcagcaggtgggcagcgtgagcatcctgcgggcaggggagacgctggagacctacccgatcaccgcaggggaggacgtggcggagcttgatttcggactgtgctttgcccgcctcgtggaagcgctgctgttcaatgcggcgtgaccgcacaggaaaaacgacagatggggcagtgccgcctgtaccggcccggcaaaagccggcggacagaggcgctgcctcttttgtatgggatttggcgatgctgcgcacttccctggaaagcattgcctttttatatcacttgtgccgggagagaggtgatttttttgtgcaaaacggttgaaaagcgaccgggttttgcttgacaatgaagtgtcaaaacggtatcattgaagttacaaaagataaaggaggattgtacagtgagtgtcaaatttaatggcaaacatctggcaaaatttatccgtcctgaagaatacgacgcaatctatcctcaggtagagctggcccaccgtcagctcaacgatcacagcggccccggcaacgatttcctgggctggatggaccttcccaagacctacgacaaggaagaattcgcacgcatcaagcaggcggcggaaaagatccgctccgactctgacgtgctcctggtcgcgggcatcggcggttcctatctgggcgcgcgcgctgtggttgaggcctgcaaaggcgtatatcataacgatatcgaagacggcgtcaagatctatttctgcggaaataccatctcgccgacttacctcaacgacatcatccgcatcaccaagggcaagcgcttctccatcaacgtcatttccaagtccggcaccaccaccgagactgctctggcgttccgtgtgctgcgcaagctgctggaggactctgtcggtcccgaggaggccaacaagcgcatttacgccaccaccgaccgcagcaagggtaccctcaagcagctggccgatgcacagggctggcccactttcgtggtccccgatgatgtcggcggccgttactcggtcctgaccgctgtgggccttctgcccatcgcctgcgcgggcatcgacattgatgctctcatgcagggcgcggcggatgcctgcgacgcctacggtgtctgcagccccgacaacgacgcttaccgttatgccatgacccgcaacatcctgtaccgcaagggcaagatggtggagaccctagcctgctttgagccggacttcgccatgatgaacgagtggtataagcagctgttcggcgagagcgagggcaaggaccagaagggcctgatgcccacttcctgcatcttctccaccgacctgcattccatgggtcagttcctgcaggacggcagccgttcgatgtttgagacctacgtggacatcaagaacacccgcgaggatttctatatcgaagagctggaaggcaactttgacggcctgaacttcctggccaaccagaacatgagcatcgtcaaccgcaaggcgatggaaggcaccattctggcccacaatgacggcggtgttcccatcggcgtcattgaggtggacagcctgagtgcctacgatctgggctacctgatctacttcttctggaaagcctgcgcagtgtccgggtatctgctgtcggtcaacccctttgaccagcccggcgtcgaaagctataagaagaatatgttcgccctgctgggcaaacccggctatgaggaccgcaaagcggagctcgaagccaagctgaacggataaagtccatgtccgccaagaacgggcgggctctgtaaaattgaaggaggtaccccctatgattaagctgatcgttggccccaagggcgccggcaagaccaaaaccatgatcgatatgatcgataacgccaccaaaaccacttccggcaacattgttgttatcgagaagtcgatgaagctgaccaccagcatcaatcaccaggcccgtctgctggacgtcgatgagtacggcatccagggcggcgatatgctctatggttttgtggcgggcgttctggccggcaactacgatatcaccgagctgttcattgacggtatcctgcgcatcgtcgatcacgacatggacgttgccgctacggttctggacaagatcgacgccatcacccgtgacagcgtcgaggtcgtcatcaccgtttccgcgaccgaggacgctctgccggaaggcatcaagaagtatatgaatgcctgattccgggtgtagccttgtgccggtaaagatgcctcccgttataaagggacggcatcaaatcacctgaactgaaaagcgggcggagagcctttgactctccgcccgctttttgtatgccaaaaagatttgacaaagtttttgaaaaaggctgtaatatttgcagcgccccgcgcacatatgggtgaacgtcatccacgacaaagttccgggcagcggccgccccggaacttgccgtcatgacgcgggcggtgatgcgcccgcaggaacatcgtacagaaaggagggagcacatgggaaaatccggcattgaacagctttacctggcctacaaacaggatgtctaccgttatctgtgctccctgacgcacaacccggcggatgccgaggatctgttgagcgagacctttctgcgggcgttcaggcggctgccctttttccggggagactgtgccgcaaagacctggctgttcggcatagcgcgcaacgtctggctggaaagcctgcgcaagcggcggccgtcgctggacctggacgatctgctggactggtatctggaggaccgcctttccgcagacagcgatgcccgggcggccctgtgccgggtgcgtgagctgcttgcccaaaaggacgaacgcagcagccgcatcatcttcctgcgggcggagggctatacctacgccgagatctccgcacagctgggcatcagcgagaacagtgcccgcgtgatcgaacaccgtacccgaacctggctcaaagccaccctgcaaaaggagggatattgggatgaatccaaataaagtagaaaccaccgctccgcagaccccgcaagccctgccctgcggcgtggtacaggacctgatgccgctggtgcgcgacggcgtcgccagccccgaaagtgaggctatggtccgggctcacctggacgaatgcgaggattgccgcacgctctgggaagcgctgagcacacaaggtcccgcccctgcggcccagcccgatgacagcgccgtgctgcacaaggttaaggcccgtgtttcgctgtggctgctgatcgttgtagtgatcggcctgctgctgggcatggccatcatgggcagcggccgcgccatcggcctggtctttgtcatctttccactgacctgcggcattgcccgctggtttgacgacggcatctggaagctggtgcccattctggcagcggccattgtgcccatccagagcctgcccagcctgtttaccatgatggactacaccacaccggccagtgctctgttcagctattttcagggcgtctggatgcccgcctcactgctggcggtcatctgcctggcgggtgcattgaccgcgtcgctgctgcgctacgctgtgaaaggaaaggggaaagaacgatgaaaacacataccaaacgcattgcggccggaatcgtggccgtgctgctgattcttgctatgcttctggcggcggacgccatctacggcgatcccgtcagccgcgcctgggccaactcccgcgccatcgcctatgcggagaaactctatcccggccagacctttacggtggaaagtgaggacagcggttcgttctggacctacggcacctgggtgcagtcggaacagagccaggatacccgctttgacgtgaccaccaaattctggcttttcaccagcgatgaaggcggtatggaaggcctgtcccgccacgagcagatggtggagcgccgctggaacaccgcataccgcatgggcgaggaagctgccgccgctgtggaggaagtgctgcaaaaggagctgccccagtaccagtttgcggggaactacggcgcagaacagcgcagctgctatatccagctgggatataccgaggacagtagcgtaataccccaggaatacgccgagctgcttcccctggatgcaccctttgacaaatccctgctgcaagaaatccccacgaaattgagcgttacaggcgtctggcccaccacccctacccaggcggatgtggataccgtgctggccgacctcaagcgggtgctgaccggcgcaggctatgactttgcctattacagcctcaccctcaccgacgctactgcccccagctatgaggagggcctggatcgtctggccgaatccggcgtggtggccgccgacagtatcgcagtgtcctgaaaatgcaaggcaggggagggaacaccacgccttgctccggcaagaaaagtctccgccaaggcagtttctcacccggaaagctgccttggcttttttgcgcgaaaaaacgtgcagccgtccacttgttcccggtaccgccgtatgctacactgtaactgaaaggaatgcctttctgcgtggctccgatcaaaggagccgcagatttttggaatattctggaggtgaacgggatgaaatctcggatggtaggtctggtctcgctggcagtgctggcgggggcgtttctggtagtgcggtttccgctgctctttctccatggcatgaaggagtggccgctggacctgtttgctgccggcgcggtgatcattgccctgtccgggatcatcctgggggcaaagcgtctgcccgctctgacggcggcagggtatatccttggttttgtggcaggcagcgttttccggtgggattccacccttggttacgataacctgtggatcatctggaccggtgtctttctggcgctgatccttgccggtgttgttgccgagttcctggcatacaaacgccgcaaaacaccgccgccccaataaatcgcaaaatagaaagcctcccggcaggtcaacgcggacccttgccgggaggctttttgtatggcgatttgcggggaaaacgactcagccctgtgcggtaaatacgatctgcggcaggctgcgcagagtgagcgttacctgccgggaagctgcctccgggggggccgcatttccgtcaacgtccgccgtaagcacaagggaaaaggtgttcccggtggaggtaaaggcggcgtcagcaccaaaaacggcgctgtatccgtcaggttcaacgctcacgtctgcggtgagaaggctgccgtcctcaccggggacggcccctgataccaggcaggctttgccgtcgctgccggaaccgccggatgcggtaaagtgcagggtgcagctgccttccgtcacgtcggtcacctctgccaggacgatgctgccgtagctgccttcatagacggtctgccccacgccgaaatccggatcgcccaggtcaatggtcatggtaaaaccgtctcccgtagaggacgctttggcggtgcaggaagcatcggcggacagggcggcaaagtcggcgggctggaccggctcgcggccgggctgcatcagcagcaccagaaccaccgccaccagcaccacaatgcccagcatggtggcaagggaagaaggacgtctttgcagcatggaagaaacctccggttttgatagatacgatgacggcgtccacagggacgacggcatacaaaagcggcgcatggacgacgcctggcccggctatcagaaatgccggcaggacgcccgcagccatgcgccgcctgaaattattggatggacggccgcagtgcgttcaaacgctgcggcgggaacacgggagcaatcagacgctcagttccgccttctggcccacatcctcgggattggcgtccagcagaggctggatcacatcacgcaggtattcctccacctgctcgggagcgcggccggtgaatgcctcgggggacagctctgcctcgatctcctcgcgggttagaccgaacgcggggtcagcctccacacgggcgatcatgtcgttgggcttaccctcctgcttgaccacggcggcagcggccacggcgtgctcacgcagacgctcgtgcagttcctgacggtcgccgcccttcttgacggccttcatcatgatgttctcgctggccatgaaaggcagctctgccataacgcggctgcggaccaccttggggtagaccaccaggccgtcggagacgttcagcaggatgttcaggatggcatcggcagccaggaagccctcggccatggcgatgcgcttgttggcgctgtcgtccagggtgcgctcaaaccactgggtgccggcggtgatggcggggttcagcacgtccaccatcagatagcgggccagggcgcagatgcgctcgcagcgcatgggattgcgcttgtagggcatggcggaggaaccaatctggttcttttcaaagggctcctccatctccttgaagttggccagcagacggatgtcggtggccatcttcatggcgctctgcgcaaggcctgccagggcggacagcacgttgtagtccaccttgcggctgtaagtctggccgcagacggggactaccttgtcaaagcccatctgggcgcagacgtcggcctccacagccttgaccttggcggaatccccgccgaacagctccataaagctggcctgggtaccggtggtgcccttgacgccgcgcagggccaggctggagatctggtgatcgatctcgcagacgtccatgtacagctcgttcatccacagagtggcacgcttgcccacggtggtcagctgcgcaggctggcagtgggtgtaggccaggcagggcatgtccttgtattccttggcaaagacagccaggttggccagcacgccgatgagctttttgcgcaccagctgcagcgcatcgcgcatgatgatgacgtcggtgttgtcacccacgtagcaactggtggcgcccaggtggatgatgcccttggcgttcgggcactgcaggccgtaagcgtagacgtggctcatgacatcgtgacggaccagcttttcacgggcggcagcttcctcatagttgacgtcgtcctggtgggcttccagctcggcgatctgctcgtcggtgatggccagaccctgacgctgttccgccttggccagtgcgatccacagcttgcgccaggtgcggaactttttgtcgtcggagaacaaaaactgcatctcgtccgaagcgtagcgggtagagaagggggaaatataacgatcgtgcggcataactagtaacctctttctgtgtggcgggatggcgcgcgctcaaaagcgcggcttatatggaactcaatttcggcggccggacagatatttgaccatgcacgcgatgcccagaatataaaaggcaaaccgtaccacgccgtaaagaatattccaggcggcaagcaaagtgccgaccccaaatccgatatccatgccgatccctcactttctttgcaacgagcgggcaattacagcttgaagtagttgacgccgccctcaaacagcggctgatacttgtcgccgcccacattcttgtacagattgtcggcgctgcgttcgctgtggcccatcttgcccaggacgcggccgtccgggctggagatgccctcgatggccagcacgctgccgttggggttgtagcgctggtccatggtgggcacgcagttcagatcaacatactgggtggcgacctgaccgttgtcgatgagctgcttgagcagggtgtcgttgcagacaaagcggccttcgccgtggctgatggcgatgaggtgctcgtcgttgacgctgcactcggacagccaggggctcttggtggaagccacgcgggtgcgcaccagcatactctggtgacggcccacagtgttgaaggtcaaggtcggatcatcctcggtgatgggacgaatctcgccgtaggggacaaggcccagcttgatgagagcctggaagccgttgcagatgcccagggcaaggccctcgcgctcgttgagcaggcggttgacggcgtcggccacagcgggagcgcggaagaaagcggtgatgaacttggcgctgccgtcgggctcgtcgccgccggagaagccgcccggcagcataaggatctgggattcatccagagccttgaccagggcctcgcagctctcggcgacgtcggcgggggttaggttcttcaggaccaggatgcgcgggtcaccaccggcacggcggaaggcacgggcggtatcgtactcgcagttggtgccggggaagacaggaatgaccaccttgggcgttgccagacggacggcaggggccacctgatgcttgcagtcaaattccagagcatccacttccttgccgggcttgcggtaggggaagacgggctccagcttggcctcccacacttcctgcagggcggccagatcggtggcttcgccgccggcgatcagctcataatccacggtggtgaagcccaggaactgaccggcggaagcatccagcagttccaggatgactgcgccgtagcagggcttgaagaggtcggccacgttgacgttgtcgctcaggcgcaggcccacatggttgcccacgcacatcttgaacagggcctcggcaatgccgccgtaacccggggtggcggccgacaggaccttgccctcgtcgatcatctgctccaccgtcttgtagatggacagcaggctgccgatctcgggcagaccgtccttgtactggggcttgaggatgacaacggcgctgttggctttcttgaactcggggctcagcacgctgcgggtgttgccgatggcggtggcaaagctgaccagggtgggcgggacatccaggccctcaaagctgccggacatgctgtccttgccgccgatggaggcgatgcccaggcccatctgggcgtccagagcgcccagcagagcggccagcggcttgccccagcgctcaggctgggaacccatatgctcaaagtattcctggaaggtcaggtaagcgtcctcatggcggaaaccggcgcagaccagcttggtcacgctctccaccacggccatgtaagcgccgcggtagggatcagcctcggtcaggtaggggttgaagccccaggccataccggagcaggtggtggtctcgccgtccacgggcagcttggcagccatggccatggcgggggtcagctgatacttgccgccgtagggcatgagcacggtggccgcgccgatggtggagtcgaaccgctcgcccaggcccttctggctgcagacgttcaggtcgctgaccagggaacgcatcttctcggtgaaggttttgccctcccacttgggctgccaggtgcggccgggcaggatgtgggcgctggcgtgacgctcggcgccgttggaggacaggaactcgcgggacaggtcgacgatggcctgaccgttccagaattccttcatccggggctcctcggtgacggtggcgacgatgttggcttccaggttctcctgggaggccagagcgatgaaggcgtcggcgtcgtcggcagagacagccacggccatgcgctcctggctctcggagatggccagctcggtgccgtccagaccctcgtacttcttggtgaccttgttcaggtcgatggacagaccgtcggccagctcgccgatggcaacggacacgccgcccgcgccgaagtcgttgcagcgcttgatcatgcggcaggcgtcctcccggcggaacagacgctgcagtttgcgttcgatgggggcgttgcccttctggacctcggcaccgcaggtctccaggctggacagcttgtgcgccttggaggaaccggtagcgccgccgatgccgtcacggccggtgcggccgcccagcaggatgatgacgtcgcccggggcaggggtctcgcggcggacatggctggccggggtggcgcccacaacggcgccgatctccatgcgcttggccacgtagccgggatggtacagctcactgacctgaccggtggccagaccgatctggttgccgtagctggaatagcccgcggcggcggtggtgaccagcttgcgctggggcagcttgccctccatggtctcggagacaggctgcagcgggttgcccgcgccggtcacgcgcatggcctgatagacgtagctgcggccggacaggggatcgcggatggcacctccgatgcaggtggccgcgccgccgaaaggctcgatctcggtgggatggttgtgggtctcattcttgaagaggaacagccaatcctgcagttcaccgtccacgtcgcacttgatcttgacggtgcaggcgttgatctcctcgctctcgtccaggttcttcaggatgccgcgctctttcagggccttggcgccgatggtggccgcatccatgagggtgcggggcttcttgtcgcggccggtctcggcgcgcagagccatgtagcggtcaaaggcggcctggaccacggcgtcgtcgatctggacgtcatccaggatggtgccgaaggtggtgtggcggcagtggtcggaccagtaggtgtcgatgacgcggatctcggtgatggtgggatcccggtgctcgctcttgaagtagtcctggcagaagacgatgtcggcatggtccatggccaggcccttctccacgcggaaagcctccagggcatcgtcgtccatctcaatgaagccggtcagcgtctccacggcgctgggaacggcaaactccatcttgagggtggtgcgctcctccaggctggcctcgcgggcttccaccgggttaatgacatacttcttgatggcggccagatcgtcggcggagagctcgccctccagcaggtagaccttggcactgcgcacgtcggggcgctcgccctgactgagcagctggatgcactgggaagcggagtcggcgcgctggtcgaactggccgggcaggtactccactgcaaagacggtctgggcctcgggcagggtgctgtaggtcacgtccaccggcggctcgctgaacacggtggggatggcacggtcgaacagttccttgtcgatgccctccacgtcgtagcggttgatgaggcgcaggcctttcaggctggtgatgccgaccagttcggtcagttcatgcagcagggactgggcttcgccgtcgaagccgggctttttctcaacgtaaatacggtaaaccataggttaatccctctctttctgcagtgcggcaagggcgcgcgcgccgatgtcggagcgcttgtgcagtttttcaaagtggatgccgtccgccgccgcgtaggctttcttcaaagcctcgggcagggtgggggcggtggcggtcacacccaggacgcggccgcctgccgtgaccagcacgccgtccttgatggcagtgccggcgtggtagacggtggcctccccgccgggcagctggccgttctccagtccggtgatgggcttgcccttctcgtaggagaggggatagccgccggaagccagcaccacgcaggccgcggccccgtcggaaaagaccacttcggtctggtccagggtgccgttggtggtggccagcatgatcttcagaaggtcactctgcagcaggggcagcaccacctgggtctcggggtcgccgaaacggcagttgtactcaatgaccttggggccgtcgggggtgagcatcaggccaaagtacaggcagcccttgaaggggcaaccctccgcctgcatggcagccacggtgggcaggaagatctccttcatgcagcggtcggccatctcgggggtgtagtaggggttgggggcgacggtgcccatgccgccggtgttcaggccctggtcgccgtccagggcgcgcttgtggtccatgctggacaccatgggtttcagggtcttgccgtcgcagaaggacagcacgctcacctcgggaccggtgaggaactcctccaccaccacgcggctgccggaagcgccgaactttttgtccagcatgatctccttgacggcggcctcggcttcggcttcgtcctggcagatcaggacgcccttgcccagtgccagaccgtcggccttgatgaccacagggtacttgccctgggcgcggacgtagtccatgaccttggcaggatcgtcaaacacttcatacccggcggtgggaatgccgtactttttcatcaggtccttgctgaagaccttgctggcctcaatgcgggcggcagccttgtcggggccaaaggcgggaatgcccacggccgccagagcgtccaccatgcccagtgccaggggatcgtcctgggccacgaccacgtagtcgaaggcttcctccttggcaaaggccaccatggcgtccacatcggtggcggggatggccttgcaggtggcgtcgtagctgatgccgccgttgccgggggcgcaccagatctcggtgcaatcggggctttgcttgagggcgcggatgatggcgtgttcacgtccaccgccgccgacgacgagaatcttcatattgaaaactcctttatgacggtacaccgtctgaatttttcatacaggaaaggctgtgacaaaaaccccgaaaaggaagcccgacgccgtataaggtttcaggcttccttttcgtgtaatggctcaaatcaatggtggaacagccggatgccgcagaaggccatggcaatgccgtacttgtcgcaggtctcgatgacctggctgtcacggatgctgccgccgggctgaacgatggcggtcacgccgctgcggcgggcgcgctcgatgttgtccccgaaggggaagaaggcgtcgctgcccagggaaacaccggtcaccttgtccagccaggcccgcttttcctcagcggtcagcggctcgggctgggtggtgaaggtctcggcccacacgtcgtcaccgatgacgtcctcgggggtgtcgccaatatagacgtcgatggcgttgtcgcggttgggcttgctcacatcgtcgcggaagggcagatccagcactttgggcatatggcgcagctgccagttgtcggctttctggcctgccagacgggtgcagtggatgcggctctgctggccggcgcccacgccgatggtctgaccgccctgcacgtagcacaccgagttggactgggtgtacttgaggacgatcaggctcatgaccaggtcgcgcttctgatcctcggtgagggtcttgttcttggtgacgaggttggtcagcatggtgtcggcggtgatggccagatcctgacggccctgctcaaaggttacgccgaaaacggtgcgagtctccaggggagcgggcgcatagtcgggatcgatggtaacgatgttgtagttgccctttttcttggatttcagcacttccagggcatcggcgtcgtagccgggggcaatgatgccgtcggacacttcgtgctggatcagcttggcggtagccaggtcgcagacatcggacagggcgatccagtcgccgaagctggacatgcggtcagcgccgcgggcgcgggcgtaagcgcaggccaggggagacagctccacgtcggcaccgatgtggtacatgcggcgcagcgtctcatccaggggcaggcccagggccgcgccggcgggggagacatgcttgaagctggcagcggcgggcaggcccagggctgctttcaggtcacggaccagctggtagctgttgaaggcatccagaaagttgatgtagccgggacggccgttcatgatctggatgggcagctcgctgccgtccgccatgtagatgcgggcaggcttctggttggggttggtgccgtatttcagttcaaattccttcatggatctcagccctccacagcagtgtatttgttcaggataacatcctcgtagtcgccggtggccagagtgatggcgcggacgaacaggctgaccttgttgtcctcgttgagcgctgcccacagcttgccggcaaactcgttgggatcgttctggtcgatggccacgcgcatgggctcgcctgcgtagctggggatgggggagccgttcttctggtaggtgctgatgaagtgaccctcaccggccagaggctgcgggtagtcgaaggtctggcgctgcaggctggagggatcgccctcgcaggttttgaggatgttcagcttgtagccgccgcggcgcatattgacaacgccggaaatgcgcggggtaaagttgggggcgtcgtcctcgaacaggcgggtggacagggcagcctcaaagctgtaacccgggaagaggttgtcacggatgaagtggtagatggtgtcggtctggtcgccgttggtgacgatggtggtctcgtgcagggtcagcacgggattgtagatgatgaggtgcgggtcctccatcttggcggggtcggccgccacggtgcggataccgccgggaatggcctcaaacacacggttgcggctgttggagctgcggcccatgatccagtaggccaccatggccttggtgccgtcgggggacaggcccaggcagatgccgcggccgggatactcgttgccggaaagatatctgtacaggttctttttcatagctgttacacctcaccgttgcagaccatggcgatggcacggggcagcagcttccactctgcctccaccatcacgcgtttttgtaagacttcgggggtatcgccgggctggatctccaccgccttctgcagcaggatgggaccgccgtcgcatacctcgttgacaaagtggaccgtcgcacccgtcaccttgacgccccgggccagagcggcctcatgcacccgcaggccgtagaaaccgggaccgcagaagctggggatcaggctgggatggacgttgagaatgcggttgggataggccgcgatgacgctggggcccagcacgctgaggaatccggccagtaccaccagctcgatgccgttttcctgaaggacgttcagcagggcggcgtcaaattcttccgaggtggcatagtccttgcggctgaccactgccgtgggcaccccgaaggacgccgcgcgctccagggcgtagaccccgggcttgctggccaccaccagggtgaccttgccgttcgggttttcgccgcggcgctcgctctccagaatggcctggaggttggtgccgccgccggataccaaaaccgcgatcttcatcataccagttccactccttcgccctcggcaatgacaccgagacggtaggcatcctcgccgttggccttgaggatctcgagggccttgtcggcatcctcgtcggcaacggtcagcaccatgccaacgcccatgttgaaggtgttgaacatgtcgcgctcgggaatgttgccttccttggccagcacgtcgaagagggcggggatgcgcacatcctccttgcggatgcgggcgcagcagccggctttcaggctgcggggaatgttctcatagaagccgccgccggtgatgtgggacacgcccttgacggtgacttcctccatcagagccagcaccggcttgacgtagatgcgggtgggagccagcagagcctcgcccagggtgcagcccagggcagggtaacgcttctccagcacttcgggctggttttccagatcaaagatcttgcgcaccagcgagaagccgttggagtgcacgccggaggagggcagagcgatcatgacgtcgccggggaccatggtggagttgtccaggatcttgctcttgtccacggcgcccacggtaaagccggccaggtcgtactcgtcctcggggtagaagccgggcatctcggcggtctcgccgcctaccagcgcacagccagcctgaacgcagccctcggccacgcccttgaccagctcggcaatgcgctcgggaacgttcttgccgcaggcgatgtagtccaggaataccagaggcttggcgcctgcgcagatgacgtcgttgacgcacatggcaacgcagtcgatgcccacggtgtcatgcttgtccatgaaatgggcgatgcgcagcttggtgcccacgccgtcggtgccggagatcagcacagggtggggcatattggtgcagtccagttcaaacagaccgccaaagccgcccagcccgccgatgcagtggcggttcatggtgcggtcgacgtactgcttcatcagttcaacggccttgtagcccgcggtgatatccacaccggcagcggcatagctctcggaatgactcttttgcatatcgatcctccttgggtgcttgcggcggtgcgccgcgcagggtcacagctttttctggggattggaaacgctcagcggcttgtcgtagacgatgtccatggtctcggtgggcggagtcacaggatactgtccggtaaagcagccggtgcagaaatcacagtggctgtggatggcaagctgtttgacgtgctccacgctcagatagcccagcgtgtcggaaccgaccagacggttgatctcctccacggtgtggccggtggcgatcaggtccttctcgtcgggaatgtcggtgccgaaatagcagggatggatgaagggcggcgcgctgatgcggtagtgtacttctttggcgccggcctcgcgcaacaggcggatggtgcgggcgctggtggtgccgcggacgatggagtcgtccaccagcacaacgcgcttgcccttgacggtggactcaatggcgttgagcttgatgcggacgctgttttcgcgctgcttctggttgccctgaatgaaggtgcggcccacatacttgttcttgatgaagccgatgccgtaggggatgccgctctcctgggcgtaacccagagcggcatccaggccggaatccggcgcgccgatgaccacgtcggcctccacgggatgctcctgcgccaggaaacgccctgcctgcaggcgggcctcgtgaacgcaggtaccctcgatgatggagtcgggacgggcaaagtagatgtactcaaacacgcagatggtgtggggcgcggtgttgcagtgggtctcaatactgcgcaggcccgcatggtcggcaatgacgatctcgccggggcggacgtcgcgcacaaacttggcgcccacggcgtccagcgcgcaggactcggaagcaaaggcgtagcctgcaccgtcgggcagttcgccgatgcacagaggacggaagccgttggggtcccgggcggcgatgagcttggtgtgggtcatgatgaccaggctgtacgcgccctcaatgtcgtccatggtacggctgacggccatttcaatgttgggggtcagcagacggttctgggtcagcagataaccgatgacctcagtgtccgaggtgccgtggaagatggaaccgctcatctccagcttgcggcgcagcttgggagcgttgaccaggttgccgttgtggcagatggccatggcacccttgcagtggtgcaggaccatgggctgggcgttggagcggctgcgctggcctgcagtggcataacgcacatggccggtggccatcttggcgtcatggggcagatcttccagcacgcgcttggtaaagacctcgctcacaagacccaggtcgcggtagccggacagcacgccgtccacattcagggcgatgccgcagctttcctggccgcggtgctgcagagcgtacagggcgctgtacaccgcgctgaccatatcggtctcgccggtcttgtcataaataccgaatacgccgcattcttcgtgcagggcttcggtaagggcagattcacacatgtagatacctcacaaaagatcagcaagaaaacggagccggatcagcccagcaggcgcttcatgacctcctggtaggcgtcggcctcgccgcccagatcgcggcggaacagatccttgtccaggtgtgcgccggtggtggcgtcccagaaacggcaggtgtcggggctgatctcgtcggccaggatgatggtgccgtcggacaggcggccgaactccagcttgaagtcgatgaggcggatgttgacgtccagcaggatcttcttcagcacttcgttgaccttgaaggcgtacttggtgatggtatcgatctcctcctgggtagccaggtcgagagccagggcgtagtagtggttgatgaacggatcatgcagatcgtcgttcttgtagctgaactccagaatgggggtcttgaagggagtgccctcggcaacgcccatgcgcagggagaagtgaccggcagccacgttgcggatgatgacctccaggggaacgatctccaccttcttgaccagggtgtcgcggtcgttgagctcctccacataatgggtggggatgccttccttttccagcttctgcatcagagcgttggacagcttgttgttgacgatgcccttgtcgcggatggtgcccttcttctcaccgtcgccggcggtggcgtcgtccttgtagtggaccatgacgatctcgggatcgctggtagcgaaaacctgctttgccttgccttcgtacatctgctctttcacggtaacattcatggtgatacgctccttttcaataatacaaaaatccggttgtctattataaaaatatcataccataacacggggaaaatgcacacccgtcaaaatgccaaaaagcacgttttggcgggaaaagccggggttacagcgcggcagcctcggcgcggatggcagcatcctttttggcgatggcggcggcggtgtcggcgcggaactgttccagcttggcagccaggtcatcgtccgccacagccaggatggacacggccagataggcggcgttcttggcgccgttcagagccacggtggccacgggatagccggaaggcatctgcacggtggccagcagagcgtccatgccgtccatggcgccgcccttcatgggaatgccgatgaccggcagggtggtgttggcggcgaaggcaccggccagatgcgcagccatgccggcggcgcacaggatgacgccgaaaccgtcggcacgggcgttcttggcgaactcggccgcagcggcgggggtgcggtgggcggacaggatgcgggcctcatacggcacgccgaagtccttcaggacactgcaggcgcccttgactaccggccagtcgctgtcggagcccatgacaatggcaacttttttctgttcgttcattttacttgccctcctgaaaaaagtaacagcgcagtgcggttatggtgcactgcgcttgcgggttacggacatatggatacacggcgagagggagaaaagataccgcccgctgcctttgagcgggactgcgccaaaataccggacacagcaaatcccccttgcatcaaattggcagcccggaacaccatagtgccgggctggaatcgccctgtacgttcagtgtaaatccccggcgggcaaaatgcaagcgacggggaatcatttcggctaagtggccagtgaggctttgccaaaaaacgacattttagcaattttaccagaaagaaatgcggtaaagtatgactttttgaagcctctgcccagcggtttgcgcggcatgtcccggcaggacagggaaaatttacattcccggcagggttttgcgctcccaaacgccacacaggccgccggttctgtgttataatgtgtccatcaagcggcggggcaaacataccccgcagggaaaggacaggcattgccatggcagaggaaaagaacgtactgatcctgggacgcggtggcttcggcaccgaactggcggagcttttgaccggcacgggactgtatcagaaggtatattttctcgacgacggcgcacccgactgtgcggggcgtctggatgatctggaacggcccgacctgcgcgccctttgccccgacgcctttgcggcggtgggcaataacgccctgcggctggacctgctccgccgcctgcgtgaggcagggtacaacctgccggtatttgtgcatccccgggctttcgtctgcccgtcggcgcagttgggggaggggaccgtggtcctgccgctgtgctgggtgggcgcccgcaccgtggcggggatgggctgcatcctcaatgcgggggccagcatcgaccatgacgtggtgctgggagacggggtccatgccgcgcccggtgccatcatcaaggcgggggccaagctggaatcctgtgcgaaagccgacagcggacaggtgatccgctccccgtgggagctcaagacgggtggtccgcgctgacacgccccggacagaaaggagacaatgtatgttgaacgcgcaaaacgcccctgctgcatcgggcagacgggtctacgtggatgcgatgaaaggcctgggcatcattttggtggtgtggggccattttgaggaatactaccgcggtacttcgcccattttcaacggtacctttgagtgcttttaccttttccatatggccctgttctgcctgtgcagcgggctggtggcaaagttcaactggaaaaagctgattttgcagcaggtctggctgtatctgctctgccaggcggcgctggtggtgttccggcagcaagtcctgaccgagaacctggcagcctccgggggcctgctgatggcgctgctggtgccgtggcagcatatgtggtatctctattccctgattttctgggaactgacggtgccgctgctgtccctgctgcgggataagttccgactgcccggaaaactgacgggcctggcagccgcggtggctatcggcctggctgcgggcacggtggaatggccctacgccttcaaccgtgtgttctgctttttgccgttctatgccgcgggtgttctcttccgggaggagatcgatgtctggttccgggcatcccggaaacttttgtccctgcgggtgctgccggggatcgcgtttctggcggtgtacggcttctggttttccagcatcctccgtgcaccggagccggtgtatgagggcgcgcgcatctttaatgacgtagcctataacgacggctataccatgggcgaccgcgccatgtactacctgatcggcatggcgaccgccctggctcttattgcggtgctgggcaatgtaaagtccttggcttcgctgggcaaacggacgctgcccatttacatcatgcacatgccggtgtatgccttcctggtggagctgggaacctacgagatcgccggcgaaaaaggtgttcctgccgtggcgggctgggtgttcctggcggcgggcggctgcatctgcctgttcggcacaaaagtgtttgcggggatttttaatgtcgtggcaaacctctggtataagaccctgcccggacttttcgccgggaaggctgacaaagcgcaatccgcataaacacaagggcggcagccgctgcccggtaaagaattccgctgaaagtacagcgtcaaacaaaaaggcacgagccaaccggcccgtgcctttttatattgggtaagtaacctgccgaacaggggagagaaccgctttactcgatgcccttctcggcggcgtattcctcaatgagttcccgctccagaaacggtgtcttgacgccttcccggtcgcggtaagcctcgtggcccttgccgatgaccgcaatcatgtcgccgtcctcggcgtggtcgatggcatagtgcagggcatccagacggtcggggatctccacgtacttggcatcgggattgcccttgttcatgccaaccttgatgtcggcgatgatgtcctccaccttttcaaagcggttgttgtcctcggtcaggatgcagaagtcagccagcttggcgcagacctcacccataccgtagcggcgcagcttgctgcggttgccgccgcagccaaagaccaccaccagacgggtgggcttgtaggcgcgcagcgtctccatcaggctctcggtggcggcttcgttgtgggcatagtccagcaggatggtgaatcggtggctcaccgggaccagctccacacggcccttgaccacggcagtggccaggccctggtggatggcctcgtcgggcagacccagttcttttgccacgccgatggtggccagggcattgtagatgctgaacaggcccggcatattgacctgaacgtccatctcctcccggccggaaacatggaaggccacgcccagcatattcttggtacgcagcagtttgtactcatgcccggcacggaaatcggcgtcagcagcgtcgatgccgtaggtggtcacccggcaggtgtgaccttccagcaggggagcggtgttctcgtcgtcggcattgaccacgccgatctcgcaccggcggaagagctggcctttccaggcacggtactcttcaaaactctggtgttccccggggccgatgtggtcggggtacaggttggtgaacacaccaatcttgtaccgcacacccgccacgcggtccatcatgatgccctggctggaaacctccatgacacagcagtcacacccggcgtcggccagctggcgcaggatgcgctgcaggtcgtagctttcgggggtggtgttgttcaggtcatagtgatggttggggtagtagacgccgttggtgccgatcatgcccacccggtgcccggcggcttccagcactgccttgatcatgtgggtggtggtggtcttgcccttggtgccggtcacgccgatcatggtcatctccccggcggggtggccgaaataggccgccgccagcatggccatggcgtaacgggtgttgtcggttttcaggatggtcacctggggcatggcggcgaccatctcggcgggcaggtcgtgctggatgaccagcgtcgccgcgcccttggccaccacgtcggccgcaaactcatggctgtcgcgctgggtgcccacgatgcagacaaaaagtccgccgggggtcattttgcgcgagtcatagtaaatgtcggatacctcggtattcagactgccctgcaccagcgtgtaggaaaagtccttgaccagttgtttcagaagcatgacctttacctcaccgtttcacaaaatattcgtcgtaccagacgaggaaaataaagacgcaccagatctgccgccagttgtcccgcttgcccgagagatgctggtccagcatccggttcagttccgttacattgaaaaactccgccgcggcaggcgcgttgaatgcctcccgcacgataccggcgtatttttcatcccgcagccaggcccgcaccggaaccgggaagcccagctttttcttgtcggcggtgcgggcgggaatggtcttttccgccgcgccgcgcatggcgatcttggtctgcccggcgttgaccttgcactcggtgggaatgcgccgggccagctcaaacacctttttgtccaggaaaggcacccgcagctccagactgttggccatgctcatcttgtcggccttcagcaggatatcgcccaccatccacaggttcaggtcacagaactccatccgtgtgaccgggtcctggcccttggtcttgtcaaacagcttgcgggacaggtcggtgggcttgacgctgccgtggtagtttttgagcagatgctttttccggcgttcgcccatcaggttggtgttgccgatatagcgctcctccagaggacgggagcggcgcaccaggaagttgatgccgtgcaccgggggcagacattccgccaccgagcccacagcccggcgcagccacaaaggcagatgatcgtaccagctgacggtaaagggctctttgtaaatgttgtagccgccgaaaaattcgtcggcaccctcgccggacagacagaccttgacctgcttggacgcctcccggttgacgaagtagagcgccaccgaggccgcgtcggccagaggttcatccatgtggtactggatgttgcccagattggcccagtactcttccggggtgatgcggtaggcaaagttcttgacgccgatgtgctgggagaactcccgggcaaagtcggtctcgtcgtactgcttgtcggcaaagcccaccgtgaaagtcttatccacgttggcaagggctgccatatagctggagtccacaccggaggaaaggaagctgcccacctccacgtcggcgatcttgtgggcggaaacgctctccttcatggcggcgctgatctcctcctcccactgttccagcgtgagggaatggtcaggggtaaaggaaggctcccagtaccgctgcacggtcacgctgccgtcattccattccagccagtgggcgggcagcaatttcttgacgcccttgaaaaaggtgttctctcccggggaatactgataggagagataaagctccagctggtcggcattgagctctttctggaactcggggtgggccaggaaactcttgatctcggagccgaacatcagggttccggtctcggggttctggtagtagtacagcggcttgatgccgaagtggtcccgggccagcagcagcgtctttgcccgggaatcccacaaggcaaaggtgaacatgccccgcagccggtccagcatttccttgccccactcctcatagccgtggagcagcacctcggtgtcgctgcgggtggcaaaggtgtgcccggcggccagaagctgctcccgcagttcctggaagttgtacacctcgccgttaaagaccaccaccagggagccgtcctcgttgaacatgggctgcttgccgccctccaggtcgatgatggacagacggcggtgacccagggcgacctgcccatccacaaagcggccttcgccgtcgggaccgcggtgaacgatgcggtccatcatggcctgtaaaatttcatccatatcggcgcgcgcgccgacaaatcctacgattccacacatattgcgattcctctatccttatgcgttcaatatcgctattatacacgcttgccccgcgcttgaaaagcggtcctattgtaaattctgcccttttgggacggggaaaatgtgatattttatcctcccgccatttcaaaggcggcggcgcagcgtggtattgtcccggcgtaaagcccgcccggccagaattgacacacggggcgattggaagtaaaatatcccatatactataagtatgtacagggatgccggggtttggccgggccggactgcaaaaaatgccgcagcccgctgcggggcttggcccgggctttttggcgccggggcaaggcggctgtccctgtttgatacaaaaagaggttatttggttatgatggattttcttccggtgcttttgggcagtgacgccaacgtctacggcatggcgcgcagcttttatcagcagtacggtgtgaccagtgtggcggtctgcaagggggcgctgatcgccacggcaaacagccgcctggtcaagatcgccgtgctggaaccccgcctggaggaggacgacgtctttgtctcgacgctcatctcctttgcccggcgcaacaccggccgccagctggtgctggtctcctgcgcggacggctacaccattcttatggcccgccaccgtgaggaactggcggcatactatcattttgcctgcccggatctgcaaaccgtgctggatcttgacataaaagacaatttttaccgcgcctgcgagcgtcacggactttcttatcccaaaaccgccacctgcagcgcgcaaacctatcaaaccgtggaacttccctttgattttccctgcatcatcaaagccagtaactcggcggaatactggaactgctccttcccccacaagaaaaaggtgtttcttgcccagaaccgggaggaatacgacgccatcacggcggccatttacggcagcagctaccaggatgacctgattttgcaggaatacatccccggcgacgacaactgtatgcgggtgctcaatgcctactgcggcctggaccgcaaagtgcacctgatggccctggggcgtcctcttctggaggagcagacccccgagggcatcggcaactatgcagccatcctgtcggtgcatgacggggaactgctggcccggatgcgcgccttcctggaggacgtgggctgggtaggttttgccaactttgacatgaagtacgacgcccgtaccggggaatataagctgttcgagatgaacccccgccaggggcgttccagctactttgtcacggccagtggctacaacctggccaagtggctggtggaggacgttcttctgcacaaggacctgggctacaccgaggccgacaccgagagcctgtggatgatcgcgccctacggcgtcatccgcaagtacctcaaggacccggaactcctggccgaggccgcccgcctgaaaaaggagggcaagtgtgcccaccagctgttctgcaaggaggacttcaacctcaagcggtatttgtggtatctgcgcagccaggccaactactaccgcaagacggcgcgctattacggcaacaagagcctgcgcgactgagttatttgtatcgaccaaataggggaggaaactgctatgtgcggtattacggggtttgcccgggcccgtcacgacgccgacgaagcgcggcgcatcatcaaggccatggccgatctgatcacctaccgcggcccggatggtgagggctactatgtggatgagcaggtggccctgggccaccgccgcctgtccatcatcgacctggagggcggcaaacagcccatgttcaacgaggacggcaccttggtcgtcatcttcaacggggaaatctacaacttccaggaactgcgtcaggaactgctggccgcaggccatacctttgctacccgcagcgatacggaggtcctgctccacggctacgagcagtggggcgacggcctgcccgcccgcctgcggggcatgttcacctttgtgctgtgggacaaaaagaaccacactatgttcggcgcccgggacatcttcggcatcaagcctttttactattataatgaggacggcctgctgctcttcggttccgagatcaagagtttcctggcccatcccgatttcaaaaaggaactcaacgaggaacgcctgcccgagtatctgagcatcgagtatatccccaatgaggagacgatgttcaaaaacgtctacaagttgccgggcgcacacatgttcacctggaaggatggccgcatggacatccgccggtactacgacatccgctaccacattgacgagaccccgtctctggaggagtgggaacagcgcatcaccgacacctttgccgagagcgtcgccgcccaccagatcgccgatgtggaggtgggctgcttcctgtcctccggcgtggattccagctttgtggtcaacgaggtggccaaaggcacgccccacgtcaagagcttctcggtagggtacgaggaggaaaaatactccgagctgccctacgcccaggaattctccaaggagatcggggtgccaaacctctccaataaggtcagtgccgatgaattttttgaggcaaaccgggtgatccagtggtatctggatgaacccatgcccaacccggcggaggtccccctctacttcctggcacagaacgcccgcaagtatgtcaaggtggtgctttccggcgagggcgccgacgaactgttcggcggttaccccatgtactgccaggccgtccacttcatggactacgagaaaaaggtccccaaggccatccgcaaggcggcgggggcagtggcgtcccgcatgcccgagttcaagggcaagcatttcctggtgcgcggggcgcagcagccctggcagcggtatatgcgcgccaactatgtctttgcgtccccggcggaccgggatcagtacctgaaaaaggactaccgcagcaagcgcccggaggaatatttcaagccctatttcgataaggtggccgggctggatgaacccacccagctacaatgggtggatatgcacacctggatgctctacgacatcctgctcaaggccgaccgcatgagcatggccaacagcctggagctgcgggtgccgttcctggaccgcaaggtgttggaactggccctgagcatcccccagaaataccgcagcgggaaggaagaaaccaagatcgccctgcgcggcgctgccctcaaacagctgcccgacagcgtggcaaagcgcaagaagctgggcttcccggtgccgctcaacgactggctgcgccaggataagtacgccgccatggtccgggaaaagttcaccggcgaggtggcggaaaagttctttgacaccgccgccctctgccgcctgctggacgaccatgtggcaggccgtgccaagaacatgaccaagatctggagcttctactccttcattctgtggtatgaactgtattttgtgcaggccgccccgcccgccgaggtctacgcccgctgaaccatccggccttatggaatacaaaaggagaatcctgatatgaaaatcgcagtcacctatgaaaacggcaatatctttggtcatttcggccatacccagcagttcaagctgtacgacgtgcaggacggcaaggtggttgcctccctggtcgtcgataccatgggcagcggtcacggcgctctggccggtttcctggcagcccacggcgtggacaccctgatctgcggcggcattggcggcggcgctcagatggcgctggccaatgccggcatccgcctgtacggtggcgtgaccggcagtgcggacgctgcggtgcaggcgttgctggatggccgccttgcctttgaccccgatgtccactgtgaccatcacgaccaccacggcgaaggccactcctgcggcagccatgaaggcggctgccacagccacgagggatgccacggccatgacggcagctgcggctgaaccggctggcaagcaacctcttaaaaacacataataacggcaccgccgcagcaaaacaatcatgctgcggcggtgccgtttgctgtatgaacaggatgacagacaggaagctctgcgcccgaataaccccacgcacggcacctgtgtcagtataaaatcagaaaaggaaaagcccggcccttcccatcagcggaagtgccgggcttttttgtattgtccgaaagaaaagggggagaccttgtgcagcaatctccggttactggctgccggaggaactgctgctggaggaggaaccgctcacctgggcggtgtcgtcccgctctccggcgatccacacgtcgataatgaccgacgggtctaccggcattcccgcttccacgcgggcgccgttgacgccggtgcacatcaccacgcagccggtggcaaactcggtgttgttctcaacgatgcgcatggtgtactgagcgatgccggcttcctccagcttttcctcggcctttttctgggtaaagccgataatgtccggcatgatgggatagcccttgcttaccacgatctcaatggtgggggggtcaccctccacaggagtcccggcttccggttcctgggaaagaatgatcccagcctcatggtcggcggagtattcttcggtggggacaatgcggaaagaggtgtataaatcggaatcctccacatcttccagcttctgccccaccagattgggatacgtcagcgcctccggtgtggcggtgggagcaggggaggagatcgtggtctggtccgatgcggaactgttgtcgccgcttccgctgcccggcgggttcagaaggctccacaggagcagcgccgccagaacaaagatgaccacaagggctgcgcccagaatctttttggtggagatctggttttcgccggtctcaaacatggcgtttgccacgttggggttggccagagcgctcatcagctcgggaacggtctgcatccgcttggccgggtcaaggcgcatggcacaggacaaaacctgggaaaagtaggtggggacagcagcttccagactgtgagccgactccagactgtcgcgcaccctgcgctggggggccgatacgggggtctgcccggtgaccagccggtaggtcaccgctgccagggcgtacacgtcggtgtaccgcccggaaaactccgctgccgaatactgctccggcgctgcgtacccggcatagagctggcttttcagctcgctcccgccggtgcgcagggccagcgtgccgtaaccggtcagcatggcagtcccgtcaatgggcaaaaggatgttgtccgggcagatgccccgatggatcagccccgacttgtgcaaaagcgctacgccctccatgacaggctggagcagcgtccgggcctcggcgggggtcagcggccgggatttgagggagagataatgggtcagggtcatgcccttttcgctctcctccacgccgtagacggtattgttttcctcaataacatccagaatgcgggataagcccgtggcgggggtcaggcggcgcagatcgtcgtacagatccttgaaatccatgcggctggtcttgaacagtacctcgcgcccggctttgggcatcaaagcgccttccgggctgcggccgttgcacagcgtgacgggaaagtactctttgatccgcacaaaacggacctgttcgttgtccacgccgcggtagcacagaccgtcaccgtcggcgctcaggtacttgcctacggtgtatttgccggccagctgggtgccgaaaggcagagcgccttcggggtttgcgttgtcaaggcttttgccgcagtgggggcaatccccgtgaaaatccggatcgatgggctccaggcaatgggggcagggaacttgatgggacattctaccatttcctctcttgtggaaggtgccggcggcaaagaaaggcccgcggcacggggaatgcagaaaaaagcagctgcgctgcgttggacggagaacatacaacactccgggcaataaggcgcggaggcatatgtacttcgcgttcggatctgacgcggcgcagctgtttcaaatgtgtgcggtgatggaaaacggagaggctcagcggtcgaggtcgtcctcgttctccaggttgtgccaggcgttctggacatcgtcatcgtcgtccagcgcgttgagcagcttggccatgttggccatctgatcgggatcggtcagggtagaagtggtggtcgggaccatggcaacgtcggcggagatgaaggtgtagcccttcttctccagcgcgtcgcagacggcggcgaagttgtcgggatcggtggtgacctcggcggcgtcctcgctggcgtcaaagtcttcggcaccggcatccagagcgtccatcatggcctcgtcggcatccttgtcctccaggtccaggacgatgacgcccttctggttgaagaggaagcccacacaacccatgttgcccaggttgccgccgaacttgtcaaagtaatggcgcatgttggcagcggtacggttgcggttgtcggtcagggtctcgaccatgaccgcgatgccgccggggccgtaaccctcgtaggtcatggcttcgtactcggtacggtcgccgccctcggcgcgcttgatggtgcgctggatgttgtcgttgggaacgttgttggccttggccttgctgatgagcgcagccagcttgctgttggaagcaggatcgctgccgccctcacggacggcgacgctgatctcgcggccgatcttggtaaagatcttggcgcgggcgccgtcggtcttttctttcttgcgcttgatgttgttccatttgctgtgtccggacatggatgatccccctaaactagttcgatgatcgggccggaaaccggctccgtgcgttctatcgcccgcaaaacgcgggcaagatccgcgcagcgggaacccccggcgcacagatccacatattacaataggatagtatagcacatatgggcgttactttcaattcacaaatccaaaaggttttgggttttgcaaaattttttgcagggaaccttcaattttttgccggtatccccttgacaaacggaacaaaattcgctattctaatatagcatcctctgccagggcgcaaacagataggggcatagctcagttggtagagcagcggtctccaaaaccgcgtgccgagggttcgaatccttctacccctgccaaaccggacggtttctgccgtccggtttttcttttatctccatgcggcacttcgctgtgcttacaaaaaggagggggcttccatgccatatttcatgacccggtatgattctccggtgggactgctgagccttgtcagcgacggccaggggctggcaggcctttggatcgagggccagaaatattttgccgcgaccctctcccggctgcctgaaatgcgggaggacgcccccggcctgcccgaggcccgcgcctggctggaccggtattttgccgggcagcgtcccgcaatcggggacctgcccctgcatccggcggggagtccattccgccaggcggtgtgggcctgcctgcgggaaatcccttatggaaaggtcaccacctacggctgcattgcccggcaggcggcggcccggctgggcagggaacggctctcggcccaggcggtgggcggcgcggtagggcataaccccatttccatcattgtcccgtgccatcgggtcgtcggctgggacggctccctcaccggctatgcgggagggctggacaaaaagcaatggctcctccgccatgagggggtcgaccctgaccccgcggccctgcgtgaacttttgtccgcaagccgctgactacatctttatagagagagcatatagagatatatagcaaaaggacgcagcctgtacgggccgcgtccttttgtttgcgggggagaacggtttatttcaaaatgccgttggccatgtcctgaaaaattcccggggtgttccgcagctgggcaaaggtgccccgctggacgatctgccccttgtccatgacgatgatctcgtcacagttctgcaaagtggtcagccggtgggcgatggagatgaccgtggtgccgcattcctgcttcatccgctcgatctctccctgaatgtgcttttcggaagtgttgtccagcgcgctggtggcttcgtccaagatcaggatgcggggctttttcaaaaagatgcgggccagggcaatgcgctgacgctgcccgccggacagattggccccgccctccgacagctgaaaatcatagccgccgggcagctgttcaatgtccgccgcaatgcgggctttgcgtgcggcatcgcggacctcctcaagggagacttcccgcttcatgccgtaacagatgttgtgatagacgctgtccgcaattagaaagggtgtctgggggaccagggcgatgttgtcggccagttcagcgcgggacagcccgtccagcccggcaccgcccagaagaatgcatccggaagccggttccagcttgtcgatgaccttgataagggtcgatttgccgcagccgctggggcctgcaatgccgatgaacttcccggcaggaatctccaggtcgatgcctttcaaaatttctgcgtccggcttttccgggtaggcaaaccggacatggtccaggcggatgtcattgccggcgatgggggagtgcagttcctcctccgggcggtaagaaaagtccaggggcagctccagaatacggaaataatccaccgccagtacggtgcattcggaaaactcgtccagaatgcggtgcagctcccgcagggggccggtgagctgggtaaagcagagataggcggtcagcacggtgccgatggtgatgatcccccgggaggccagcaataccgagacaccgatgaccagcacgctgaacaccgcctcgttgacgaacttgaggcagtcgtaaaaagccatggcggtgtggtggcgcatttcctttttgcgcagttcctcggcgcgggtctggatgcgcccgccctcggcctcggcactgtccagagcgcggatggtctcgatgccgcccagaagctccaccatggtgccgtccatctcggcctttgtctccatcagctccacgcggatgcccttctgggtgctgatctgacggaacacgatgaaagtacccaccggaatgaccagtaccaccagcagggccaccggcacgggcagcttgtaaaagatggtcacaatggccgccgcgccggtggtgacggcgggggcaaagtccatgaacagcagcttgataagcttgacagtgccttccagactgcggttgagccggccatggatgttgccggtcatgtggctgcggaaatagtccagcggggccagcaacagggcgtcggtggccttgcggcgggcgattttttccgcctgggtggcggtgtcctccacaatcaggcgacggatgaccttgatgacctcgttgatcacattgaccgccaggatgcccagcaaaatgggaatcaccgaggcaaaggcaatgttctgctcggccaggacatgatcggtcagatacccgatggccagtggtgtgatctggctcagcgccgcggatacggccagaatgagcaggatgatgaaaaatcccagcttctgccgctggggcagaagcacaaaaatctttttccagagctgtctggattcggcggtggtgttcataggacgtccctcccgggatgtttcggcggttttgcggtcacagcacaagatcggtcacaagcagcagcgcaagcagcgccacgttgcagacggtgaaccacaaaaagtatttctgccgctgggcggggtactcccgcgccacctgtttataggagatcaggctggccatggaagcgatcagcgtgccaaggccgcccagattgcagcccacgatcagggcgttccagtcggaggtgaacccggccagcagcagggcggcgggaacgttgctgatgacctggctggccagcaccgcaacgccctccacgtgcccggtgatgagggaggcaagcagatcccggaaagcggggatgttgcccacattgccgatgaagatgaagaaggcgataaaggtccccagcagggaatagtccacctcggccaggacctgccggtcggtgaacagcaggaacaccaggacgatggccgcgatccaaacaggggagagcagcttgaaaatgcccagaaggcaaagcacaagcccggcagtgcaaaagcccagataccgggcgctgcccagactggcagggaccgagacggacgggatgttgtccgaccggcaggcgacggcaataacggcaaggcagatgccggacagagcgacgtaaggcagcatcaaaagacacaggtctccgaaactcatgcctgactgggtataaaggtaaaggttctgcgggttgcccatgggggtgagcatgctgcccaggttggcagcggcagtctgcaagaccaccatggggatcagcaggcgttcctgcccggccatgtgcagaacggtaatgccgaagggcacaaaggtgatgagggaaacgtcattggtgatgagcatgctgaaaaagaagggcagaaacaccagcaccagcaacagctggcgggaggtgtgggtccggcgcagcaggccgttgcccagatagagaaagacgccgcctttctgaaagcccttaactacggccatcaggctgaacaaaagcgtcagggtatgccagtcgatgtaggaaagatatccggcgctggggggaacaaaaaaggcggacaccacagccagtgcggccgcaatggacaaaacagcttcccgctgcacaaaatcgcggcagcgtgcaagggtctttgacataacagatcgatctcccatccgcaaaatgtaaaaacagatacccgcaggcaaaacggcgcaaaaaaatcctgaacgcgtaagcgttcaggattttggtgggagctggtggattcgaaccaccgaagcattacgcagcagatttacagtctgtccccattggccactcgggaaagctcccatattcttttcgcactcaccagcgccgctcgctgagtgcttgattattatagcaaaggaattttcaaaatgcaagcccttttttcaaatttttttgattttttttgacggcccgttttccggctctttcaggacgcctgtgctgtacttgtttcggggcggctgttataatgtaagggacagccggcacagcccggcggggaaagggaatacgtccatggacatcaacaagatccactattttttccgcgcggcggagcagcagaattttacccgtgcggcggaactgtgccatattgcccagacgaccatgagcaagtacatctcggttctggaggcggaactgggctgtgagctgtttgtccgcacgggcaggaccgcccgtctgacgccggagggccagcgcttttacgacggcatgaaaggcatcatgcggcagtataaggatctctgccgggaagtgggccgggaaaacgcccacgagctgcacatcggcatgatcaccaccgactacgaggatttccccatcctgcgcacctttgaactggcgaacccgggcatctcggcctacttttcctttggcgacgagtccaggcttctggcggatctgcgccatcaccgcatcgacggggtgatctgccccaatatcctgaccttcaaggaaaaccgggtggaggacatgacccggctggaccttctgcgcattgaggaatccctggtctgttcccgggaactgctggaccggtgcggatcggtggccagggtggtggcggaacagcccctcatcaccaaaacagccgaaagcgagtaccgggaattctgccgggccaacctgcgccgtctgtatggggtggaattccccgatgttctggtggtcagcagttatgcccagcagcttctgatgctcaatttgtcccgcgggtttgccatcattccggctaaggcaaagaacgaatatgaaaatttgtgctttatcaaaaccgacgatgccttgtcggaaaccgtgcagcttctgtatcatccgtcctttgtgacgccggaattacaggcgcttctcgaccacatccatgaaaataagtgctgaatcaaccaaaaagattcgtttgtcatctgccgccggatttgctagcataatatggtatcaatttttcaaaaaggcggtggggtatcaatgcagcgggatctgaccaagggcagtgtgctgcacaacctgctcctgttttccgtgccgtatctgctttcctgctttctgcaaagcttttacgggctggcggatctgtttattacaggacggttcaacggggctgcggccatctcggcggtttctatcggcagccaggtcacgcacatgctcacggtggtggtggtcggcctgaccatgggtaccacggtcatgatcggccgtgcggtggggtcgggggacaagtccctggcagcccgggccatcggtggtacagtggtgctgtttgccgcggtggcggccatcagcacggcggtgcttttgtttgcggcggacggcatcattacggtgctgtccaccccagcggaggccgtggaccagacccgcagctatctcatgatctgcttcctcggctgcccgttcatcgttgcttataatgtgatcagcagtattttccgcgggatgggagattcccaaagccccatgtacttcatcgcggtggcgggcgtcgtcaatatcgcgctggacttcctgttcatcggcccgtttgggatgggcgctgcgggcgcggccctgggcaccgtagtgtcccaggcggtcagcgtggtgatctcgctgatcatgcttcgcaaaaggggactgggcattccgctctcccgggcggatttccgtttccggccccgggtcatgtccggactgctcaaggtcgggcttcccatcgcggtgcaggacggttttatccagatctcctttattgttattactatcattgcgaaccgccgcggcctggtcacggctaccggcgtgggcattgtggaaaaggtcatcagctttctgtttctggtcccgtcggccatgctgtcctcggtgtccgccctcacggcgcagaacatcggtgcgggccgccatgaccagggcctcaaggtgctgcgctacggcatgaccatctgtgtgggcttcggccttgtcgcggtcgcggtctgccagatcgttcccgagcagatcgtcgccctgttcgccaacggcgacaccgaggtcatccgcatgggcgcacagtatctgcgcacctatgtgaccgattgcgtttttgcgggcgtcaatttctgcttctgcggctatttctgcgcctacggcagatccttcgtcacgttcttgtggaacttcaccgccacgctgtgcatccgcattcccggggcgtatcttgcttcggtgtgcttcccggattccctctatgccatgggcctggcatcgccggcagggtcgctgttcgcttccattgtggcgggcgcgctgtttgcccatatgatgcgcaagcggggcagggaaggcgcctttgccgcggtgtaaagagcggcgcccggggattgctcccatgccgccggtatgatatactatataaagtatcgaccccggaacccccaaacagcatctgcgggcaagcggtatccgggcaatgtcctgtttgtacaaactttttttgatttttttgttgacaagccccccttgcttgtgtatactagataagcaacctttgaggtgtactatgcgatttcatctgcaaaagttcctggagacagcgaaaactccttatacagcgtcgttttcgtttgacttctctcaggcagatttccccggctatcaggtgacggaacctgttgccggtactttttcggccgaacgtattccggaaggggtacacattagcttacaggccgtggcaaaagcagatgccgaatgtgcccgctgccttgcgccggtgcacgaaacttacaccatcgcacaggagtacaccgttcgcccccgggatctcaccgatgtggattttgagctccctctggatgaaaacgggttgctggacgtagaggaactggtgtatcaggaagtgatctttgcagttccgcgggtgctgctgtgcagtcccgactgtcttggcctatgccccatctgtggtaaaaggaaggcggcaggatgtacctgccaaccggcagacgaagctgcccctgcagatgcaaggcttagcatattaaaacaactgcttagttgaatttcaccaaggaggtgcttagaaatggcagtacccaagagaaaacaatcccaagcccgtcgcgacaagcgtcgttccaatgtttggaagctggaggctcctacgctggtgaaatgtcctcagtgtggcgaactgaaagtgccccatcaggtgtgtggcaaatgcggctactacaagggccaggaagtcgtcaaggtcaacaaggaggcgtaacagcctcttgcaaggggaggggcagtgccctcccctttttctttgcccatttggcatttgttcaaagtttgcggcagcagatgtgaaaaggagggtcaggcgatggctttgcgggtgcagagcgtggacgaaggctcgcccgcgcaggcgctgggcatcacgcccggttgcgtcctgctttctgcggacggcaatgagcttgccgatatgctcgactaccaatactataccgtggcatcgcagtttcgccttgccctttgcagggacggcaagctggaatacctggacgtcaaaaaagaggaatacgagcctctgggctgcagcttcaagacctatctgggagatgaaaagcacagctgtgacaaccactgcatgttctgcttcatcgaccagctgcctcccggcatgcgggaaagcctgtatttcaaggacgacgacgagcgcctgtccttcctcttcggcaactatatcaccatgaccaacctgtccgagcgggaggtcgaccgcatcatcaagatgcacatcagcccgatcttcatctcggtgcacaccaccaacccccagctgcgggtgcgcatgatggccaacaaacgtgcggcggaaacgctggattatctcgaccgctttgccaagggcggcatcgagatgaactgccagctcgttttgtgccgcggcatcaacgacggtgacgaactgcgccgcacactggacgacctgctggccctgcgtccccaggtgggcagcatcgcggcagtccccgcgggggtgacttcctaccgcaagggcctttaccgcctgacgccctacgatgcccagtccgccgcggaaacgttggacattctggaagagtacagcaaaaagtgccgggaagaatatggccgcaccatcgtctatcccagcgacgagtggtacctgactgctggccgtcctctgccccaggcggagttttacgatgactacgcccagctggaggacggcgtgggcatgtggcggctctaccacgataccttcctggaggaactgtcccggcgccggggctttgtgtggccccgcaagatggatgtggtcaccggcaccctggctgcgccgctgattcgccagatggcggataccctgcacggacagtacccccaggtcaaggtggaagtccacgccatccagaacgactattttggcggcaatgtgagcgtggcgggtcttgtcaccggcaccgacatcatccgtcagtgcaagggaaaactgaaaagccgcctgctgggcgtgccggaggtcatgctccgggacgagggcgaccgttttctcgacgacatcacggtgacgcagcttggcaaggaactgggctgccgtgtcaccatactgcccgtggacggcgcaggctgctgccgtgcgctgctgggcgaacgcaacaaaaagggaggggagtgacccatgccgaaacccattgtggctatcgtcggccgtcccaatgtgggcaaatcgacgatcttcaataagctgaccggtcagcgcctggccatcgtggaggatacccccggcgtcacccgcgaccgcattttctgcgactgcgagtggaacggccaccagttcttgctggtggataccggcggtatcgagcccaacattgacgatggtctgctcatgcacatgcgccgtcaggcacagatcgccattgactcggcggactgcgtcgtcatggtgaccgagctgaccgcaggcgtaacgccccaggacatcgacattgccggtatgctcatgcgcagcggcaagccggtggtgctggcggtcaacaagtgcgactcggtaggcgagccgccgctggaactgtacgatttctattctctcggcatcggggagatcatccccgtgtcgggtgtgcacggccacggcaccggcgacctgctggacgccgtgctggcccacctggatttctccaacgaggagcccgaggatgccgaccgtatcccggttgcggtcatcggccgtcccaacgtgggcaaatccagcctggtcaaccgtatcctgggcgaggaccgtctgatcgtcgccaatgaggccggcaccacccgcgacgccatcgacactgcggtggacaataaatacggcaagtttatctttaccgataccgccggcctgcgcaaaaagggcaaggtggaaaacggcatcgagcggtacagcgttctgcgcagcctggcagccgtggagcgcagccgcgtctgcgtcatcatgatcgacgccaccgagggctttaccgagcaggattccaaagtggctggctatgcccacgaacagggcaaggcctgcgtcattgcggtgaacaagtgggatatcgtggagaaagacacctataccatggacaccatgcgcaagcagctggcagaggacttcagcttcatgtcctacgcgcccatcgtctttatcagcgccaagacgggtcagcggctggataagctgttcgagaccatccgctatgtggatgagcagaacggcacccgcattcccaccggcgccctcaatgagatgctggcccgggccactgccagggtccagccgccttccgacaagggcaagcgcctgaaaatgttctatatcacccagagttccacccgtccgccgacgttcgtctcctttgtgaaccagaaagcgctgttccatttctcgtatcagcgctatatcgagaatcagatccgggagacgttcggcctgaccggtacgcccatccgtatgctcgtgcgggagcatggcgacggaaccactcgctgacatcctgagggaggagtcatcatgatattgaagttgatcgcggcctgtgtgcttgctgcgctggaaggttatcttctgggcagcatcgtgttcggaattatgatctccaagctgttctgccacgacgatgtgcggactcacggcagcggcagcgcgggcatgaccaatatgctgcgcacctacggtgcggctgcaggcgcggccacggccatcggcgacgtggcaaaaggcgcggtggcggtgtttatcggccagtggctgtttgaaatgctggtcccccagtttgagcctgcctgcggcgcctacctggccgccatctttgcggccatcggccacatgaagcccgcctggttcggtttccatggcggcaagggcgttctggtgtgtggcggtgccatcttggcgctgcagccgctggtgttcctggcactggtcatcatcttcctcatcgagtttgccatcacccgcatcgtgtctctgggcagcatcatcattgcggcgctgtatccggtgctcacgctctgctactgggcatggcagggggctgccccctctacgctggtctttatcggcatctgcagcgtcatcatggccgccatggtcatttacatgcatcgctccaatatccagcgcctgcgcgagggaaccgagtatcgcttcggtgagaaaaagaagtgatcctcgccgcgtaacttcgcagcagaaatcaaaaaagcatcaccgtacccgaaaggtcggtgatgctttttttgtttgcggcagtgtttccgcttcgctcaaaatatggaaagactcagacttgggccaggtacagacggaagccctcggcgtaaaatgcgccgcccgttgcgatctgggacagatccagcgttaggccgtcgtcgttttggcggaagggaacggcctgaccggtgcgcatgcactcgatgtgggcaacgggagcgccgggatgcagggtcagccgggcaggcaggaccgggacctcgtcgtaggcgtaaaacgcaaacgcctgtgcctccttgccggtgtagaacacactggactcctgatacggcgcaaagatgcgggtgccgtagatgccttccccgaacaggcggagccaggcccccatgtcacgcagggagcgcacggcaggggcgggcagcatgccgtcgggctggggagccaggttgagggccagattgccgcccttgctcaccacatccagcagcaggtgtaccagctgccggccgctcttgaaatgatcggtataatggaaagaaaatttgtctccgacggtggtgcaggtttcccacggcaccgtcaatgcggtgtcgggaaccgttttttccggggtgatgaagttctcgtattcaccgccgcaggtccgctcgcagacgatcatctggggctgggtggtggcccgcatttcctctacgatctctcccagacggatgtcctggcccaggttgtcgggacggacccagccgccgtccagccacagcacgtcgatctggccgtagttggtgcacagctcccggatctgctcgtgggtaaagcggacatactgctcccacagttcgggatgctcgtcaatgtcgtagttgacgttgcgggtgggagcggtgccgaactggggtgcccaatagtaggggctgtgccagtccggcttggaaaagtaggtggagatggccagcccctggcggcggaattcccggtacaacgctcccacaatgtcggcattgggattggtgtggaagggacagtcgggggcggtgatcttgtaatcggtggttttggtatcgtacatgcagaacccgtcatggtgcttggtggtgaacagcagatatttgaatccgcattccttcgccagacgtgcccacgcggcggggtcaaatttgaccgggttgaaggttttgttggcatcccagtattgctgtttgcaggtgtcgcggtcagcccaggtaaagtcctcctggctccaggcgctgtccccgtcgctcaaaggccagctttcgtaggtgccgagctgacagccgggggcccagtgcatcatgaagcccagcttgagccccataaaccagtccaggtgcttctgcacggcggcagagcgcggcggcagatattcttccggcggggtatagttgtggatgccgtttgcaacgatctgtttcttcatggcggaggatcctttcaaaagaatgtttccggtcccggagaacacccgccgaaggcgcggtgcggacaggaccgttctcactttctttcatattaggagaaatccatcgcgggggaaaggggcaattctttttctggtgtggacttttttcaggtgccgcacctgaccggccaggcgatacaccgaaacggcgggacaaagcaaagaccgggcgctgccaatgggcagacccggtcttttggtttacggaaataggggctcattgcccgtcggaaaggggagccgtcccggcgggcagggtcaggcgggccagcagtttttgcccgtcgtaattggagtagcgcagcccggccccgtcgccgaaacgcagcttcaagcgctcgttgacattgcggatgccgaacccgtgagtgactttgagcggcacatcgcggtagtccaggtaatcgttgagcagtgccgcgtcggccccgaccccggtgtcggtcacttccacgtacagaaaaccgttttcctcccgggcacggatccgtatggtgataccggggtcctgccgggtgatgccgtggcggatggagttctcaaccagcggctgcagcgtgaatttgggaatgaccacctggtcggcagacagtccgggctgcagttccagccgcacatcctgccggaaccgcagcacatacacggcgatgtactcctcgatgttttccagctcggtgctgatggtgaccaggctgttgggctcggtgatgctgtaccgcatcaggttggcgatggagttcactgtggcggcgatgtcatcctctccgcggcccagcgccatataattgacggtattcatggcgttgagcatgaaatggggattgatctgcgcctgcaatgcctgcagctcgctttcccggcgcattttttccttgacggtcacttcctggatcagggcattgatgcggtcgatcaggctgccgaaactccggttgagctgctggatctcccgcggtccatggatggcggtgctgtcccagtgaaggctccgggtatcctggatcgcttcgatctttttggtgaactgcaccaccggccgcgaaatgccggcggcaagaagcagcgacagcaggatgccggccagcagaaagacggccgaacagatcaggtaaggggacatcatctgccatacctggtcggtgatgtcccggtagggcgtcataaagaccagctgaagcccccagcgcagttcctgggaggtacacagataccattgtccgccgatctgctggcgggtactgaccgaatcgggaatgaacagctcgtcggtgagaggcagctcatccagatgagaagagcggtatacctgcgcgccctcttcgttcaaaagcaggaacccgctgttcttggtgacgggcaccagagagagcagatgggggatctgggtcaggggcaggctgccccgcaggacgcccaatccctctttgagatagggcccggtaaaagcgctgttctgaagtttgcaggcaaagcacaggcgggtctggtcctcgctcaaaaagatgtactgaccgctgcgctgggccaaagctgcctgataccattcttcgccctggaccgtcgcgccgttaaagacccggctgacgttctcaatggtattggaaggctggaacagctggctgacttccagctcgggattgatgtacagctccatgacgaagccgttgttcagcagcagtgactcggcattcagctggtaagccatctgactgttgagcgcatacttggtattcaggtcctgcagttcatcctgaccgatctcccggctcagcagctggcccagctgttcgtcgctggtgtactgatagaccagctgttccacggtctgggtaaagataccgctcagccggacgtttgcctcgatgaccgcctcctgcgaggtgatgagctgttccgaaatggaataccggaacaacaggtaggtggtcacgttcagcgtcagcaagatggcggaaatgatcagacatacgatcaggaaggttcgctttcgtatactcatggaagttcttcctcgccgggcatggcctcaagcgcgccgcccgcatacaggttgcggaactcgctgggcgtcatgccggtatgctttttgaaaaccttggcgaaatagcgggggtcatcgtaaccggaagcggagcagacatcccggatggggatggaagggtcgcgcagcagttcccgggcccggctctgacgctgggaggaaagataactgctgatgttctggccggtgacattcttgaacacggtgctcagataggacagcgacagatgcagggtgtctgccagattggaaatgttgaagttggagtcgtggtaattctcccggatggcccgcaggcagtaggagacgatagggttggaatattcgcccttgcaggtctcggcgtactccatcaggtcgtaatactgggcggccagataggcaaggcgttcctgctgggtggtgagcttccagtattcgaccatagccttctggcgcatggcgtccagggaagtccggtccttgcccagttcgtcctgatataagaacagataattcagtagctggatgcccagcacatcccggcggtcggaaagggaacggaagacttccttgctgatgagcaattcacccatggcggccatgtcgccgcggtgcagcgcttcgctgacacgggtgcgcagttcctcgtcgcaggcgtaccagggcggcacgtcggcggaaagttctttctggatggcgcacagacggtcttccaggctgttgagcttggcgcgggtgatgggcttgaggatgtaatcggtgacctgatactgcagtgcacgctgtgcgtactcaaactcaccatggccgctgatcaggatcatgcgggtgtcggggcaatgctcgtacagatactgggcaaggtccagaccgtccatatcaggcatacggatgtcggatatgacaacgtcgggatgctgggtattcagcagggcaatcgcctcggtgccgtttgtggcacagccggccaactcaccatcaaagcgctcccaatgcagcatgtgggagatcgcctccagggcaaaacggtcgtcgtccaccaggatgattttcataaaaacaagttgctcctttcataacgggcaacggaggaggaatccgtcaacgcacacaagtatatcacacttttttggattttactgtaaatagtgcgaaaaaatttgcttaaaatgtatttttttgggagtgcgggcgtttgctaaaaaaaatacacatcatgtgaaattagtgtcgttgttggcgggcttccggccgtttataattattggcagaaaccgaaaacgacgcaacaccacgaggaggaaccgccatgaaacctacggcacagaacgccggcatcgtacataaaaaagccggttttctgaaaacattcaaaaaaaatctgcccctgacactgatggcgctgccggccttgatcatcatgttcctgttccggtatctgcccatggcgggcctgctgctggccttcaagcggttcagcgttcgcaaggggatattcggcagtgactgggtctggttcgacaactttgagtttttgttcaagacctcggacgcctggatcatcacccgcaacaccatctgctacaacgccctgttcatcctgatggacctggtctttgcggttgccatggcaatcggcctcaacgaactgcttcgcaaacgccgggccaaagtttatcagaccatctttatggcaccgtatttcctgtcctgggtcgttgtctccttcatggcattctcgctgttcagcgtggatgacggcctgttcaatcacctgcttgcctacttcggctttgaaggggtagactggtattcggagccgggcaagtggcctttcatcctcacgatcttccagctctggaaaacggtaggctactccacggtcatgtacatcagcagcctgaccggcatctccaatgactactacgaggccgccatcattgacggcgccaccaagtggcagcagatcaagcgcatcacgctgccctgcctgcgccccatgatgatcgtcctgaccatccttgccatcggacgtatcttctacgccgacttcggtcttttcttccagcttccccgggactccggcccgctgtacccggtcacgcaggtcattgatacctatgtttaccgtgcactgaaagagacgggcaacgtcggcatggcggcagccgccagcttgtaccagtcgcttgtcggctttgtcctggtcgtaggcgccaacctggtcgtccgccgcattgagccggacagcgccttgttctgaggggaggagaccatccatggaaatgatccgcaagaaaaacaagaaaaagcaccaattttccgttaaccagatttcccgtaaagccgataccattctcaacatcgtctttttcctgtgggcgctggcctgtgtgctgccgctgatcctggtggtgatcgtctccttcagcagcgagcagagcattttccagaacggctacagcttcttcccgtcggagtggagcctggatgcgtatcgcttcttcttccgcctgggcgaccagctgatccggtcctacggcatcaccatctttgtcacggtggtcggcacgctgttcagcctgtccatcacggcgctgtttgcctacgtgctcagccgcaaggactatgcctacaaccggctgttcaccctgctgatgctctttaccatgctgttcaacggcggcattgtggcgacctacatggtcaacacgcagatgcttggtctgggcgacagcgtctgggcgctgattttccccatgtcgctcaacgcgttctatgtcatcatcctgcgcaccttctacaagagcatccccatggagatcattgaggcagcccgcatcgacggagcaggggagttcaaaacctttttcagcatcgtgctgccgctgtccaagcccggccttgccaccatcggcatgttcaccaccattgcctactggaacgactggttcctgggcatgctgtacatcatcgatcagaaaaagtatccggtccagacacttttgtggagtatgcagaacagcctggagttcatgaagcaatcctcggccaatgcgctggaatacgccgagatggcgaccaacgctcccaccgacagcggccgcatggcgctgaccgtgctggtggttttgcccatcctgctggcttatcccttcttccagaagtactttgtcaagggcctgaccgtgggcggcgtcaaaggctgacccaaacaacggatcaatcgcgtccggttcgaggccggatgtgttgcgacgatagaattttaaggaggacaaaaatgaaattgatttccaagcgtgcggcagcgctggccatggcggctgccatggcggcaggcctgatggccggctgcaacggcaaaggcagcggcagcgccgcaacgggggacaccgcgtctgacggcaaagaaatcaccaccctgacctggtacatgtccatcaacccggtggcggccgatacccagcaggtcatcgacaagctcaacgagtacacccgcgagaagatcggcgtggagatcgactacaaggtcatcgcgaaccccgactacaaggagaagatgcccaacctgatcaatgcaggcgagtattttgacatctgcttcacctccaactggaccaccgactatctgcagtttgtgggcaaggatgccttcatggacatcactgagctgctgcctcagtacgccaaggagacctatgacttcatccccgaggccatgtggaacgcagtcaaggtcaacggctccatctacggcgtgccctcctataaggagatgggctggcagggtggtatcgtctacaacagcgatatggccgaggcctacggcatcgatatgagcaccgtcaagaccatcgaggactataccgcggtgctgcagactgtctccgaaaaatccaaggccgaaggcaaggatgtggtgggagtttccggcctgaccaatgcctggcccatggctgctccctatgagtctctgaccggcaacccggtcctgcccgctgccggtgccgttcccgagttcggcaactttaccgacatggccggacaggctgtctttaaccagtacgccagcgaggagtacatgaactactgccagacggtccgtgcctggaacaaggccggctatctgggcggcgaccccgtcaactatgacagcgataccgccaaccgtgacaacgacttcaataacggcgcgctgttctcttacttcatccagtacgctcccggcacctccgaatccctgagcgcttccagcggccatggcgtgggctttgtcgccctgatggaccccctgttcgagacccgcagcgccatgggcggcctgctggccatctcttccgccagcgagcatcccgacaaggctctggaattcatcaacctgctcaacaccgatgagtacgtcggtaccctgatccgccacggcatcgagggcgtccactataccgcggtgggcgaaaaccaggtggacaagaccatgggcggcaccctgaccgacaacggctatgactacacctacggctggcagttcggcactcccttcaaccagaagtgggacatcagctaccccgacaacatcgaggaactgttccagcagtataacgattccgcggtcatttctcccaacaacggcttcaccttcgactctgtccccgtcgagacccaggtcgctgcgctgaccaacgtcatcgcagagtacgcaccttctctcgagaccggctccgtcgatcccgccgagtacatccccaaattcctggatgcgctcaacgccaacggcgtcgatgcacttctggccgaggtggatgctcagctgaccgagtacaacgcctccaagtaatccatacaaacaggaccagggccggcgagtgacggccgggccgacaggccggcagttcccactacgggcgctgccggccttcttttgcaaaaaaggggcatatgaccatgaaaaaacaacccaatctgctgtttatcctcaccgacgaccagggtgcctgggcaatgcactgtgcgggcaacggggatatccggacccccaacctggaccgcctggcccggcagggaacgcgttttgaaaacttcttctgtgcttcaccggtgtgcagcccggcccgcgcctccatcctgacggggcgcattccgtctcagcacggcgtgcatgactggatccgcagcggcagcctggataaaaaggctctgggcgaacacgccggacatccctactttgccagcgaggatgtccccattcagtatctgcaagggctcaccacttaccccgaccttctggcggcccggggttatacctgtgcgctggcaggcaagtggcacctgggggacagcatgcatccccagcacggattctcccactggtacaccatcggccggggcggctgcctgtacaatcaggccgacgtcatcgaggacggtgcgctccactttgagacccgctacatcacagacctcatcaccgagcacgccctgggctatctggacgagttcgcagggcaggaaaatcccttctacatcagcgtgcactacaccgccccccacgatccctgggacgaggatcagcaccccgccgaattctacgacctttaccgcgactgtgccttcaccgccactcccgacgaacctttgcaccccaaccgcattcccacggcgcccggcggcaccggggaggagcgcaagcgcctgctgcgcggctactatgccgccgtctccgccatggacgcgggggtgggccgcttgctggacaagctggaggaactgggccttgccgaggacaccctggtggtgttcacggcggacaacggcatgaacatgggccatcacggcatctggggcaagggcaacgggaccttcccgttcaacctgttcgatacggcggtcaaggtgcccttcattgcccgctggccgggacacatccccggcggccgggtggcatccagcatgtgcagccactacgacatcatccagaccttcaacgatctgtttgagctgggggccgatctgcctgacgatctgcccggacacagctttgccgatgtgctgctgggcggggcggataccgacaaccatgtggtcattctggatgaatacggcaacagccgtatgatccgcaaccgggagtggaagtacattcaccgctatccctacggcccccatgaactttaccaccttaccgccgaccccggcgaaaaggaaaacctcatcgaccgtcccgagtatgcggcggtacggcaggaactcctggatgctttgcaaaagtggtattacacctacgcatccccggcggtggacggcagccgggaggcagtgaccggtttcggccagatgcgccgcccgggcatttactccgagggcaagccggtctatgccgacagtcctaaataccagaagtgattttgaacagaaaagagggaacctcatggatttacagaatctcaaagaacagatctgcgacgtctgccacaagatgtggcagctgggctgggtggccgccaacgacggcaatgtctcggcaaaactggaggacggcacctttttgtgtacgcccaccggcatgagcaagagcttcatcacgccggaaaagctgctgcgcatcaacgccaaaggcgaggtgctggagggcgccgagggcctgcgcccttccagcgagatcaaaatgcacctgcgctgctatgacaagcgtcccgatgtctggagcgtcattcatgcccatccccccggagccaccggctttgcggtggcgcataaggccatggacatgtacaacatgatcgaggatgtggcggtcatcggcagtgttccgctgacgccctacggcacccccagcacctccgaggtgcccgatgccatcgagccctacctcgaggagcacgacgtcatgctgctggaaaaccacggcgcccttgcagtgggcagcgacgtcatcaccgctttctaccggatggaaagcctggaactgtgggccaagatcaccatcaacgcggtgatcctgggcggcagccacgacatcagccgggagaatatccagaaactcatcgacctgcgcggcttctaccgcgtgaccggccgccatcccggctacaaaaagtacgacaacggcctgcgctgaccgaaaggaagaaaacgccatgaaacgagttctggcctttgacttcggcggttccagcggccgggccatcctgggggaataccgggacggcaggctggactgccgggaggtccaccgcttcgataacaacccccgcccggcggacggacatttccgctgggcctttgcggacctgatggctaacgtccataccggcattgaaaaagcggggaccgtggacagtatctccttcgacacctggggggtggatttcggcctgctggacggggacggcaatctgctggaagaccccgtccattaccgggacgaccgcaccgccggcatggtggcgcaggcgctgcaaaccctgtccgcggatgaactttacgcagctaccggcagccagatcatgcccatcaacacgctgttccagctccttgccctccggcgtcagcagccggaactatgggcaaaggcgtcccggctgctcttcatgcccgatctgttcgcccacgccctctgcggggcggacgcctgtgagacgaccattgcatccaccagccagctgctggacgtgagtaccggcggatggagtaaacccgtcctgcaggcctttgacatcccggaaacgctgtttgccccgctggccgccagcggtacggcggtgggggagtaccgcggcgcaaaggtcattgccggtgcgggccacgacacccagtgcgcagtggcggcactgccggagccggaggcaaacgccgccttcctgtcctgcgggacctggagcctgctgggctgtgagctggacgcccccatcctgaccgcacagagccgccggatggaactttccaacgagcggggcgccaacggcaaagtcaactacctcaaaaacatcatcggcctgtggctgatccaggaaagccgccgccagtggggcagggaggggacaagctactcctacgccgagctggaacggctggccctggccgccgagcccctgcgcagcttcattgaccccgacgcccccgagttcaccccacccggggacattcccgggcgtgtgcgggagttctgccgccgcaccggtcagccggtgccggagacggtgggccaggtcatgcgctgcatttatgagagcctggccctcaaataccggttcgccctgtcccaactgtcggccaataccggcagacggttcacagccctgcatgtgctggggggcggtgctaaggacggtctgctctgccgcatgaccgccgactgtgcgggtatccccgtcattgcgggccccgtggaggccaccgctttgggcaatatcctgattcaattgatggcccttggtgaactgggcgacctgaacgaaggccgccgactgatggccgccacgcaggacttgcgccggtttgatccgcagctcggcggagactgggacaaagctgctgcatactacgaaaaactgttacagacaacagggaggtaattcaaatgttatatcccaaaatcggcattcgtccgaccattgacggccgttggggcggcgtgcgggaaagcctggaagaacagaccatgaccatggcccgcaaggcaaagaaactcattgagcagacgctgcgctatcccgacggcacgcccgtccagtgcgtgatcgccgattccaccatcggcggcggcgccgaggcggctgcctgccaggacaagttctccaccgagaatgtggtggcgaccctcaccgtcaccccctgctggtgctacgggaccgagacctttgacatggacccccacaccatcaaggcagtctggggcttcaacggcaccgagcgccccggcgcggtgtacctggccgcggtgctggccgcctacactcagaaaggcctgcccgccttctccatctacggccatgatgtgcaggacgccgacgacagcgagatccccgccgacgtgcaggaaaagatcctgcgcttcgcccggtgtgccgtggcggtgggctggatgaagaacaaggcctacgtcaacctgggcggcgttgccatgggcatcatgggcagctactgcgacacccagatgttccagaaatacttcggcatccgggcggagtggtgcgacctgaccgagatcatccgccgcatcaccctggagatctacgaccacgaggagtacgacaaggccctggcctggattcgcaccaactgccgggaaggctttgattgcaacgccggcaaacagctgcccgaggtcatcacccgttccaaggtggtccctgccgacaaggactgggagttcatcgccaagatgaccatcatcgtgcgggacattctctacggcaaccccaagctggacgagctgggctggcacgaggaggctctgggcaaaaacgccattgcaggcggattccagggccagcgcaactggaccgactggctgcccaacggcgacttcaccgaggccatccttgcctccacctttgactggaacggccccaaagcgcccacgccatttgctaccgagaacgacaccctcaacggcgtggccatgatgctgggcacccttgtcaccgacacggcgccctgcttccacgacgtgcgcacctactggagtcccgaagcctatgagcgggtcaccggcaaaaagccggagggccgtgccgcgggcggattcatccacctcatcaactcgggcgctacggcactggactgcaccggcgccgccaaaaacgctgccggagagggctgcatgaagcctttctggcagatgagccaggcggatatggacgcctgcctggccgccaccgactggtgccgtgccaactatgagtacttccgcggcggcggattctccagccacttcaagacccaggccgagatgccggtcacgctgctgcgcgtcagcattgccgagggtgtcggccccatgctgcagatcgccgagggctacaccgccactctgcccgaggccgagcaccgcatcctggacgagcgcaccgaccgcacctggcccacaacctggtttgtgcccaacctgaccggagagggcgccttccgggatgtgtacagcgtcatggcaaactggagcgccaaccacggtgtgacggtctacggccacgtgggcgccgacctcatcaccctggcatccatgctgcgcatccctgtcagcatgcacaacgtccccgccgagcgcatctaccgcccccacacctgggcggccttcggcaccaaggataccgaggcagcggacttcgccgcctgcaaacattacggccctctgtacggctgagccgtctggccgggacagcccttgtactgccccggcttttcggcatataatacgcccggccggaaccaaacaggccgataagccgataaaaggagcaatcaccatgcagcaccgctatgaatttgaggactggacccgtccccatgcggggaccgagccggaccgtgcctattttatcccctttgcggcggggcaggaccccgtccatgcccggcgggaaagttcctgccgttttgtcctgctcagcggcacctggcagatgaaactgtatccccgcatcaccgccgtgccggacggattcttcctgcccggctttgacgccgcggactttggccccatgccggtgccgtcctgctggcagatgcagggactggatcagaatcagtacacgaatgtccgctatcccatcccctttgacccgccccatgtgccccaccagaacccctgcggcgcctatctgacccgcttctccgcggatgatgccatgctcgcccagagtgtctaccttaattttgagggcgtggacagctttttctatgtctgggttaacggcagggcggtagggtacagccaggtatctcactccaccagtgagtttgacatcaccccctatcttcagaaaggggaaaatcttcttgccgtgctggtgctcaagtggagcgtcggcacttatctggaatgccaggacaagttccgcatgtcgggcattttccgggacgtctacctgctggtacggccgaaacagcatatccgggatttcggggtgcgtacctggggctgtgaggactacaccgccgcagtcattcaggccggggtggagtggaccggcggagaggggaccctggactggaccctctatgcccccgacggcagcaaagtctgcaccggaaccgcagccacggaaatcgccatccatctggataacccgcagttctggacggcggaaacaccttctctctaccagctggtcctgcaaacaggggaggagaccatctgccagccggtgggcgttcgggacattgcggtgaaaggacggcaggtgctgctcaacggcaggccgctgcgcctcaagggtgtcaaccgccacgactccgacccggtgaccggctttgccatctcgccggagcaggccctgcgggacctggtactcatgaaacagcacaacatcaatgccatccgcagcagccactatcccaacgcaccctggtttgtgcagatgtgcgagcgctacggcttctacctgatcgatgaagcggacattgagtgccacggcgtgaccactgtattcggcggcggggacgaaacgacctttggcctgatcgcccagagcaaggactttgagccgctcatcctcgaccgtgtccgccgctgcatcatccgggacaaaaacagtccggcggtcatcatctggtcgctgggcaatgagtccggctacggccccggctttgaaaaggcgggacgttggggtaaggactatgaccccacccgcctgatgcactacgagggttcctggcaccagaccggcggccatgtcaatgataccagtatgctggatatttacagccgtatgtataacgaaccggactttgtccgcggctggctggccgacccggccaacaccaagcctttcctgctggtggagtactgccatgccatgggcaacggccccggcgacctggaggactatgagcagctgtttttgcaagaacccggtgttctgggcggctttgtgtgggagtggtgcgaccacgccatcgatgcaggcccggcaccgaacggcggacgccgctatctgtacggcggcgacagcggggaatacccccatgacatcaatttctgtgtggatggcctggtgtcccccgaccgcaagccccacaccggcctggcggaactgaaaaacgtctggcgcccgctgcgtgcaggactggagggggaaaacctggttctgcgcagtaccctggactttgcggatgcgggacgccttgcaaactgccggtgggaacttgccctggacggcgttgtggtccgggaaggaacgctcccgctgccttccatcccgccccgcagccgggtgacgcttccggccccgtggcggcttccccgggaaccgggccgtgtggatgcccggctgatttacaccgctgccggcgataacgactttgtcaaagtgggcgatgaactgggcttcgaccagctgcccctccgccaggcggtccccacactgcccgccctgcggcccgggactgtgacctgccgggaaacacaggaagagatctttgtggaaggcagcggcttctcctatgcctttgaccggtttaccggctgctttgacagtatggcccggcaagggcaggagcagctctctcgtcccatggactataatatctggcgggcccccaccgacaacgaccgcaagatccgtcgtgtctgggaggaagcaggctatgaccgcgtccagacgcgggtggagaactgccgcgtcgaggacggagagacggttcgcatctcttgcgatgttacgctggcttccgtcatccggcagccgtttttgcgctgccgtgtgatgtgggagatcgacgccgggggcaccctgcgcctgaccgtggacggcaggcgtgatatggtgttcccgttcctgccgcgtttcggtgtgcgtctcttcctgaatcctggatttgaacagattgactataccggttacggacccttggagagctacctggacaagcattgggcttgctggtatggccggttcaaaagcaccgttgccggtgagtatgtggactatatcaaaccgcaggaacacggcagtcatatgggctgtgatgccatgcagctgcaaaacgagaacacggcattttgggcaaaaagtgaaacaccgttcagtttccgcgcatcccattacccgcaggaagatctcaccgcggctgcccatgactttgagctgacgcctgccgatgatgtggaggtctgcctggactataaaaacagcgggatcggctccaacagctgcggccccgtgcttgatccccgctatgcgctgaacgaggaaacgttccactttacgatcatgatgggctttgccgctttgcggtgagccgtgctctaagtaaggcagacccggacatagaacaggcggaccgccagatcttcctttgcaggaaggcccggcggcccgctttattattgatatgtgaacaggaaacattcccgggcagcataaactgccgctcattccgcaggcaaaagttcggctaggatgctgttttgtacgatcagtccttccggtgtcaggcgcaggagccgaccgtcaaactcggcatacccggcggaaacgcagtggcggacaaaggcaagctgggcactggtaagctgcccgccgaaccgctccgcatactgcgctagatcaagcccgtcgcgcaggcgcagacgcagcatcaggtagtcctcggcattgcagacgccttccacttcttcggtcagcgtccccgcgataaatgcgtccaccgcgccggggccggccggccagaagcgccgcacgccctccatgcagctgtgggcagcagggccgatgccaagataatcctgacagtcccagtacagcagattgtgccgcccgcggtgctcgggcctggcaaagttgctgatctcgtactggggataaccttcctcctccagacggcgcacggcgtacaaataaaagtctgcggcggcatcggcgtccggcagatcggcgggcggatttttataaaaggcggtgccgggctcgattttcagtaagtaggcggagatatgggtgcacccgccgtttttgagcagggaaagggtgcggtcaaactctccggtggtgtagccgggcagggccagcataatgtcgccgcagatctcctcaaacccggcacggacagcccattccagtgcctgtgcggctgcggctgcggtgtgcagccgacccaaccggcgcagctgttcgtcgtcggcactctgcacgccgaaactgatgcgggtcaccccggcggcgcggaaccctttcagcaattcggcattcaccgtatcgggattggcctccagggtgatctctgcccccgacagaggattggcggcctcgatcagtgccgagacctgggcaggggagagcagcgcaggagtaccgccgccaaagtagagggtatctggacggcggggcaggccgcgcagctcccgcagcaaagcgtcgcagtattcctggggaacgctgcggctaccaggccgggaaaagaaatcacagtaccggcatttggacgggcagtaggggatgtgcagataaataccgaggggcgaatggttgtttgacatggtgatctccggataagtgacgataaataatgaagaaaagggaaaaactattcacacatattttacacatgagacagagtaaaaggtatataataaggatacccaaaaggaaaggggatttcaactatggctccgaattatgattatcgggatcaaaaccagtccaattctcaagaccgctacgatcaggcttatcagcagtaccagcagtcccgcagctatacccagtctcaggacgctgcctacgtggaaagcccgttcgtttctctcagccaatatatgtccagaacgttcggctggatgttcgccggcctgcttgtgaccttcggcgtgtctctggccaccgtcatgtccggagcgttcattccgctgtacaccagcggcctggtgttcatgctctccatcgcggaacttgttctggtggcagtgctgtccatgagcatcggtaagatccgtcccggcacggccacggctatgttctttgcctatgcggtgctgaccggtctgaacctcagcgtttactttgttgtgtatgacctggccacgctgatccttgccttcctggtcggtgcgctgtacttcggcattatggctgtttacggcatgcgcacccagcgtgacctgaccggctggggccccaagctcttcggcggtttgatcgctctgctggtggtttctctgttcggcatgctgtttgtcggcaactttggtgtgtttgacatcgtcctgtgcggtgtcggcctgctgatcttcatgggcttcactgcctacgatacccagaaactccgcgccatgtacgcctactacggcggcgacgccgagatgctgcacaagagctccatcatcggtgctctgcagctgtacctggattatatcaacatcttcctgtacgttctgcgcctgctgggccgcagccgccgcaactgatcgcacagtcaaacaaacgaccggccgtgtcccgtgcccgtcccgttgccttgcaaaaggcttggacggagccgggacacggctttttgtttgggaaaaaccaggcagggaacagcggagcccgttgagcagccgtgcaattttgcaaaaaccacttgacgaaatgcgcgggctgtcctaaaataaataacagtctatggagaaacaccgtgacggagagagtaggtccagcggcccggccgcaagagaggggattcaccggctgaaaggtcccccgaaaggcgctgtaccgaagttcgctcccgagtggcccgtgcgaacggctttcaggccttgtaacgcgggacggcgctgcaccgttacaggcaggcataagcgccgccgcgcactgcggcggaatacgggtggtaccgcggagtttggatacaaggcttcgtcccaatgccggaaacggcaggggacggagcctttttacttgcttcgatgacgaaaatgaggtgtagtatggaagaaaaaatcaatgccctgaaacagcagctggaggccgaagcggcccaggtccgcagcaatgaggaactgtccgcattctggcagaaatatctgggcaaaaacggcagcattcccgcgctgatgaaaggcctgcgcgacgttcccaaggaggagcgtcccgccgccggcaagaccatcaacgagttcaaagtctgggcggagtcccgctatcagcagctcagcgccgagatcgagcgcatcgagctggaggcccgcaacaagagcgagcaggtggacatcaccatgcccggcaccgtgcgtcccatggggtctctgcatcccatcacgctggtcaagaaccagatcatcgacgtgttctccggcatgggctttgaaatctatgaaggccccgagatcgaggacgacgaccacaactttacccgcctgaacgtgcccaaaaatcatccggcacgggatatgcaggatactttctatgtggcggaggacatcgtcctgcgcactcagaccagcggcggccagatccgtgtcatggaccgggaaaagccccccatcaaggtgctggttcccggccgtgttttccgctctgactccgacgccacccattctcccatgttccatcagatggagggcctggtcgttgacaagggcatcactctgtgcgacctgcaaggcatgctggacaagtttgtccaggctctgttcggttccgaggtcaagacccgcctgcgtccgtcctacttcccgttcaccgagcccagcgtcgaggtggatgtcagctgctttgaatgcggcggcaagggctgcccgctgtgcaagcataccggctggatcgaggtcctgggcgccggtgtagtgcaccacagcgtgctggaaaactgcggcatcgacccgaaggagtattccggttttgcctttggcatcggcatcgagcgtatcgccatgctgaaatacggcatcaacaacattggcctgatgtttgagaacgatctgcgtttcctcaaacagttcaatgactgaggaggaaaacaacaatgaaagtaccattcagttggctgaaagaatatgtggacatcgatgtgtccgcccaggagctggaggaacgcctgttttcctgcggttttgaggtggaggaactcatcgacctgggcgccgagatcgaccgcgtggtcgtcggtgtggtgaccgaggcggtccctcaggaaggcacccatctgcacgtctgcaaggtggactgcggcgagtacggccacgacattcagatcagcaccggcgcccccaatgtctatgtcggcatgcacacccccgcggccctggacggcgccacgctgcccggcggcatccacatcaaggcaaagcccctgatgggcattgagtccaacggcatgctctgctccggcgaggaactgggcctcaacgacgacctgttccctggttccgaggtctacggcctgctggatctgcccaaggataccgtccccggcaccgatattcgttccgttgtcggcctggacgaggtgatttttgatatctccatcaccgccaaccgtgccgactgccagtcggttctgggcatcgcccgggaagttgccgccgtgctgggcaagcctctcaagatgcccgccatcgactacaccgtctccgattacaccgacccccgcctgtctattgcggtggaagcgccggacctctgcccgcgctacctgggccactatgtgcgcaacatcacgccgggcgaatctccccgctggatgaagcgtaatctggccctgtgcggcctgcgcagcatctccaacgtggtggatatcaccaattatgtcatgctggagatcggccagcccatgcacgcctttgatatgtccaccctggaaagctgccagatcatcgtccgccgcgcccgccccggtgagaagatcgtcaccctggacggcaaggaatttgatctgagcgagaataacctggtcatctgcgacggctccaagccggtggctctggccggcgttatgggcggcctgaacagcgagatcaccgagaacaccacccagctgctctttgagtctgccaagtttgcccgtgacaacatccgcaagacctcccgcagcctgggccagtccaccgatgcctccagccattatgagaagggcatctccgagtacaccaccgagctgggcatggcccgcgccctgcacctgatccaggagctgggctgcggcgaagtcaccgccagtgctttcgatgtcagcgcaggagctccccgtgagggcaagcactttacggcgtcggtcagcggcatcaacgcgatcctgggcatcgaagtccctgcggacaccatcgtggatatcctcacccgccttgacttccagatcacccgtgacggtgacaagctggatgttatcgcgccccgctaccgcgaggacatcgaggttggcgagcccgacctggcggaggaagtcatccgcgagtacggctacgagcatatcgtgcccaccttcctgcaggcggcggaggtcaccagcggcggcctgacgccggaccagaagaaccaggccaaggtcaagcgcaccatgtgcgcccagggcttctacgaggccgagacgctggccttctatgccgatgccgacctggatgacctgcacattgccgccgatgccccggagcgcaatgtcatccgcatcctcaaccctatcagctccaacctgaccatcatgcgtccgctgctggcaccctccctgctcaatgtggcggtagagaacctcaagcgcggcaaccacgagggccgtctgttcgagctgtccaacatttatattccccgtcagatccctgttactgagctgccggaagagcgtccccatctgggctttacggccttcggcgatggcgaggacttcttcagcatcaagggtgccatggaggtgctgggccatgcctttggcctgaccttcgattatgagcgcgccaccgatgtgtcctggctgcaccccggcatctcggcccacatcctgtgcaatggcaagcgtatcggctgcttcggcaagctggccaacgacgtgactgccgagctcaagctgcccaaggacagcaagaacaaccagaagatcttcctgggcgagatcgactacctgtccatgatggagcaggtcaacccccacttccgctaccagcccatccccgagttcgacaccgtccagcgcgacctggctctcgtggccaacgaggaggtcacctgcggcgatatcgtcaaggaaatgcgcaaggcctgcccgcgggtaggggagatcgaactcttcgacgtctaccgcggcgaccagctgggcgagggcaaaaagagcatggccttcactctgcactttgtcccggaggataagcctctctctgcggaggaagtggaccgcttcgtcaagaagatcctcggcaacctcaaataccgtctggctgtggagatccgctgaacctgactcacacccacaatatcaataaaatccccgcccgaaagcctgtctggctcccgggcggggatttttgcataattgacctgtaggaaaaatcagcctttgggcagcagctgcttcaatttaagggccttgtcgatgttgccctccaccttcagcttgcccagcatgacggcggggacgggatcggtcttgcccgccgcaattttgaacagcgtatccgcggaacaggtaaacagcacatcacggtcgtagtattcgtaaggttccacgtttacatggccgtccttgacttccagataaaacgcacctgccgcatcgccggtcacgttgaactgataggtcaggtgttcctggatgccgctggcgtccgccttcttcagcaattcctttacctgggcaaacatttctgcgtaggtcatgacaaaaactcctttcggcagggcgatttgtttttctttattataccccgtacagggaagcagaacaagatatcagtatcagaaggggaggggaatgccggcaacgcaaaccgggcctttcggatgcctgcgttatagtgcgggagcgcatcccggcagccggaaaaacgccgtctgaaccgtcctgtttgctgcccggctcagtggataaaatggccaataaaaactctttgtagcgtcaaaaatgggtttgacggcagagctttggtctgttatgatgaagataacgagaaaacgctctcaaaggaggcaaaaacaaagaaaaatgtcggttctgcacaaaatcaatagtgcggaattgacggaaatgcgaggtaaaaggatatggcaatcacggcaaaagacatcatccggcgtattcaggaggaaggcatccagatggtcgactttaagatggtcgacatcaacggacagttccgccacgtgaccatccccgcacagcattttaccgagtccaccatgaccgagggcatcggctttgatgcctccaactatggttatgccgtggtggaaaagagcgatatggtctttatccctgatccggagaccgctcagatcgacccgttctgcagcgtgccgaccctttccatgaccggcaacgccatgatcatcgactatccccataaccggcccttggcccagtacccccgcaatattgtccgcgcggcggaggagtatatgcgcagcaccggcgtggcggataccatgatgatcttgccggagtttgaattttatctctttgacagcgtgacctggcaggtggaacccaacgccatcggcatgacgctggacgcccagcaggcgcactggaacagcgccgtcaacggcagcggcaacgtggtgcccaaacaggggcattaccatattgccaagccgctggactatacctacgactgccgcagcgagatgtgcatgcagatcgaagccgcgggcattccggtcaaatatcaccacccggaggtgggcggtgcaggccagtttgagatcgagcccatgctgggggagatgtccaaaatggccgacgccaccatgaccatcaagtatatcatccataacgttgcggaaaaatacggtctgagcgccaccctcatgcccaagcccgtctgcggggaagccggcaacggtatgcatgtgcatatgctgctgctcaaagatggccagccggtcttttcggacgacgccgggtacgcccatctcagcagggaagcccactattttatgggtggtctgctcaagcatatccggtcgctgtgcgccatcaccaaccccagcaccaactcattcaagcgcctggtccccggttttgaagcgccggtcacggtgggctacgccaccagcaaccgcagtgcggtcatccgtatcccggcctatgccaaaacaccggccatgcgccgctttgagctgcgcaatcccgatgccacctgcaacccctatttctgctatgcggccatgctgatggccggactggacggcattgaaaacaagatcgacccccacgagaacggctggggaccctacgacgtcaacctgtatcatctctccgatgaggagaaggccaagctgcaaagcctgcccacctcgctggaacaagccttggacgcactggaacaggatcatgactacttgaccaaggccggcgtgttcccggaggagcttctgcgcaacttcattgcagccaagcgccgggaatgtgccgagatcgcccagatcccgcacccggcagagttcgcccggtattataatctgtaacatcaataaaaatagcggcgttcccggcaggggagcgccgctgtttttattgccattcctggctgaggatccgcatcatgataaaatcgctgtattcgttgttgtaataataggcttcttccagaatgccctcctgtttgaatccgattttcttgtagaactccagggcatcggtattcagcccgacaactccgatggaaacccggtgcattttatatgtatggaaagccagatccagcatgatgcggatggcttcggtgccgtaacctttatgctgcatctctggatcaggaatgatgatggtcaggtcggtctgatgccatgcgggaaacatccggagcagaccggtctcacctataatattgccgtccagatctgtaatggtaaaccagaccgagtctttcgatttgtgattgacggtgatgcaggtttttacctcttcttcgttggtgggcttctcaaagccgcactgaaacataactttcggctgattgaaccagtaggcaaaaaacggtgcgtcatcttcccgctgctcgcgcaggatgatcctgcttcctttgatttcttgattcatacgctttcgtaggcctttctgttaacggggaacatcgcgttctttttcgtctgactgaaacagtatagcacagatgggggagggcggcgaccattttgacccgagaatgtggccggagcacaaaaaaggaccgtaacctttcggttacggtcctttggtccgagtggcgagagtcgaactcacggcctcttgaaccccattcaagcgcgctaccaaactgcgctacacccggatacgctgcgctctcgcggtcagcaagatatattatagcggcaggttgggcagttgtcaagagaattttgacaaaaaatatggatttttttcattgtcccaaaggggaaacagccaatggcgtatcttcgttattttttgggccttgaagagatacagcggggaagcaaacaggggaatttaacataaaataaacacaatacacaaaaaaacgaaacaaaatgatcgaaacacacaaaaattgatacaaaatgttaatcttgtttgacaaatgtctaaaagatgttacactgtattaggccgaaatacactgcttgccgggcaggggattccggcttcaaaatgcacgcaaggagaaggcaatcatggatgaaacaagagagaagaaaagacaactcaagcgcgcttacaaaaaggcaaaacgcaaggcactgggtccctggaaagtgctgtgcatcctctgtctggtagtatcgcttgtggcaacgccgctgtatgcggttttgcatgtattcgacaacacggtcgcggcctttgtgggcggcaccttctggcagctggagaacgaggaccccggcgcccagtattttacctcggactttgatacggcagaggaaatggtcgactacggcctggaactctgcgagcaggtggaggccgaaggtgcggccctgctgctgaacaataacaacgctctgcctttggccaagggcgctgcagtcagctgcttttccacctcctccgtcaacctggtctacggcggcaccggttccggcaacatcgatgcatccagcgccgacaccctgaaagacgcgctggaaaaggctggattctcggtcaatgagacgctttggaacttctataccgaaggccccggcagcgagtacctgcgcgtgggcggcaccggcgtcctgtccaccggtgcggagatcaacgaagctccctggagcgtctacaccgaggatgtgatctcttccgtttctgagtacggcgatgcagccatcgtggtcctgtcccgcgtcggcggcgagggcgcggacctgagctatcagggcaccaactacctggctctcagtgacgtggaaaaggaaatgatgcagaacgtcatgtccctcaaggaacagggcgctgtggataagatcatcgttctcatcaactcggccaaccccctgcaggtcgatttcctcaagaacaatgattataatgtagacgcctgcctgtggatcggcgacgtgggcatttccggcatcaatgccgtggccaagatcctttccggcgacgtcaacccgtccggcagcctggtggatacctactgctacgacaactattcttcgcccgccatgcagaacttcacccccatcacctacgagggctacacggagggcatcgtccccgcaaatgccagcacctatatgatctatcaggaaggcatttacgtcggatacaagtattatgagacccgctacgaagatgtggtcatgggcaccggcaacgccggcgactatgcctatgccgacactgtggcgttcccctttggctacggcctgagctacaccgactttgcttacagcaacatgcaggtgacttatgatgcagtggccgaccagttccacgtggcagtcaccgtcaccaacaccggcgatacctacgcgggcaaggaaacggtgcagatctacgcccagagcccctacaccgactacgacaaggaaaacggcgttgagaaagcctccgtcaccctggtaggcttcggcaagaccgcggaactggctcccggtgcatcggagacgctggacattgtggtcgagcgccgtgacattgcttcctttgatacttacggcatcggcacctatatcatcgaggcaggggactactacctgactgccgcaacggatgcccacaacgcggtcaacaacattctggcggccaagggctataccgtcgccaacggcatgaccgaggacggcgaccccgccctgacctacacctggaacgaggccgttctggatgcggcttcctacgccaccagcgagaacggcactcccatcaccaatcagctgtccgatgcagaccccaacctgtacgcgggtctcgatacccaggtcacctggctgagccgcagcgactggaccggcaccttccccagccagccggtgcagcttgccctgacggagcagctgaccgcagacctgcaggacgtccagtatgatcctgccgactacgaaactgccaccatgccccgtatgggcgcggacaacggcctgcgtctgtatgacatgatcggcctggaatacgacgatccccagtgggagaccctgctggatcagctgacctttgacgaaatggtctccctgatcggcgactccttccactggagaatgcccgccaagtccatcgaggctcccggcacccgcgatgagaacggcccccagggcctgacggcttcgctgctgggctccggcgcgacgcagctcaccgcaaccgctttcacttccgaggacgtcatggcggcgaccttcaacaccgacctgatgtaccagatcggcaacgtcatcggcaacaactgcctgcaggcggacattgtctgcctgtatggccccggcaacaacatccaccgcacgccctacggcggccgtaactttgagtactactcggaggatggcttcctgtccggcaagatgtcggcctacgaggtcaagggcatccaggataagggcgtcgatgtggtcatgaagcacttcgccctcaacgacagcgagcaggaccgtatcggtctgggcgtctggctcaacgagcaggccgcccgtgaggtctacctgaaagccttccaggctccctttgaggagggcaacgccaacggcgtcatgaccgcctacacccgctggggcgccacctggtccggcggcaacaagggcctgatgaccaacatcatgcgcggagaatggggcagcgacggcatgtccatcaccgacaacgtcctgaccacctatgtcaacggcgtggatggcctcatggccggcggcgttaccacctttgacgccatgctgccttatgtcaccgaccagcttcccaagtacaaggatgacgcggtcatcgtcaacgccatgcgtgaggcctgccaccgcaacctgtatgcgctggccaattcttccggcatgaacggcgtcggacccaacaccaccgtcaaactgacccgtcccaccgtggttaccatggcacagatcatttcctgcgcagcgatcttcttcatgctgctctccgcggtgctgtgggtgctgggcgtccgcaaattccgcaagacagaagagtataaagcgttcaaggctttcaaggcacagcgcaaggcttccaaaggctgagcgttccgcttttgaagagaaaacacagcgtcgtcagacggaaatgaactcataaaccagagtccggcaaccgcccggcaggtcaaaagcctgccgggcggttgcctttttgcttggaataagacaaaatatcgattttgaaaaatgccgggataaaggattttatccaatacaggtgacaaataaagcggggaagaggggaaagctacatcggaaaccggaaatccgtggtttgttgtgctcctattataataggtagggaagaatccaaaaaattgacgatgcaccggaccggtgtctaaagatcgcgaaagacactgtctattgttataaaaagagtgtggcaatcttgtgaaaaactaccaaagtgctgaaaatggaaacgatatgcaatttttccataaaagtatgacttttactattgatttcctaccgtttttatagtaaaatgcctgtgcactcaatgaggaaataatcttaaaaaagcagccccgatcttagccaggagtgatgccgctttgacacggcagcttttggggcggatacagaaaggatgaaatccaagtgaaaagagccatcgccacattgctgagcttttgcatgatgctttccatcatggcacaggtctcggttgcgcgcgcggaggaaatgcccgtgtccgatctcgcggtacagcagacggaagtttccgaacaggaagcagggcagagcgaggatgcggtgtcggaagacaccgagccccgtgcggctacttcggagactgctgctgaagaagaacttgcagaagcgaccccctcccaggaggatgaactttccgtcagtctgatggcggaagaggaaccggaggaggaacccgccgcggaggagctgggggatatctccggtgtcgaagtttccctcctgtcggccctgaccctctaccgggatgtcgacttcaacgtcgccatctaccgcggaaaggaactggtcgatgaaaaaacggcgaccctttccgccaacacccaggggagcgcccctgcttctcagtcggtccgcttttccgacctggccaacggcacctacaccctggccgtcagcggaagcgggttcgagacctataaacaggagctgaccgttcaggataacgtcgcttcggtccaggtatacacttccttcctggccggttttacatacagcgacgatcagctccaccccggtgctctcatcatcggtgacgccaccgataacggctctgtggatcaggaggacgtcgacgccattgtcgatcagatccaggcgggcaaaaatgaggccggcgacctgaacggcgacggcgtcgtcgatctggtggacctgcagctgcttgctgcggtctatcaggatggccgagacaatctttcctcggtaactacccgcgtttccgagaagatggcccagaccggcactgccgaaggcacctcggtgaccggcggcagcctggaagaggtcatcgccggtaccggtaccgtctcgctgcagaacagcagcagcgaggcgatctccgaagcaaaccccgtcgaggtcagcttcgacttcacctccaagcaggagaccgtccagatgggcggcatggtcatccagaccccggctgacagcggcaacgccatcagcagcgcagaggtgacggtggaatatgtggacctggaaaccggcgagaccgcgaccctgcccctgaccatcggcggtgtggcagtggcccgcgcacggggcgccagcgctcagatgggcgccgacggttccatcgtgctggacttcggcggacagatcgccgtcaagaaagttaccatcaaggtgacggccacggcggacaacaccaaccttgccgagatcagcaaggtggagttcgtcaacaatatggaaaaccacatcccggcccccgagatgaacattccctccgacctctcggcagagaccggcaacaagtcctttactctgacttggagcaaggagaccaacgtcaccggctacgaagtcaagatcgcccagggcggtaaggaagaggtcatccgtacctcggtcaacagcttgtcggtcactaccttcggcggtgccaagctggaaaacggtacgcagtacactgtcagcgtccagtccgtcaacggcgagtggcgcagcggttacagtgagtccatcaccgtcacccccaaggcggacaagatccccgcggctccggacggcctgaccctgaccggccgcttccagcgcatcgatgcttcctggctctcttccaaggatgccgacagctataatgtctactaccgcaagcagggggacgaggcttttgccagcaccacgggtgttaccggcaccagcctgaccatccgcaacctggaaaacaacgccaagtatgaagtttatgttacggccgtcaatgaactgggtgagagcccggcttcgctgacttccgttgtcagcaccgccaatgtcaccccggtgaacatgccttcctataagctcatcaacactccggagtctgccggtgttcccagcagccgtgttgtcaaggcgacccattcggccggttacatgaaggacagcccgctggattccggcaacagcgcctggggcattgtggacggtgactttacttcctggtacgccctggacgactgggatgacggtgcgatgtaccccgacgagggcggtgtccgtgtgaccttcgaccagaagtatcacatcggcagcatttccctgacccagatcgaagactacggctattatcagaacgtccgggtatttgcccataacgccgacggaaaagaatatcaggttcccggcgtcagcattaccaagcatggtgacggcaacggccgctactactacaccatcaaaatcgcaggcggtgttgagaccgattacctccgcgtctgcgtgggccaccagtataactaccggagcatcaccatttccgagatgcgcttctatgcctacgactctctggaggcggacattctggcgctgtacggcgacgacctccatgtcactctggcggaaggcgtcgacgaggaaaccatcaatgcactggaagagcgcctgaacacccgtgacaatggcgaactccatcccgactacaacaagctcaagaccgagctggacaatgcccgcggcctgctgctggagtctctcaatgatgtggtttccatccacacctccatcaccgcacagagcgacggtcacctgggcatcaacggcctgaacgcatggcagcccctgggcgtgaccgcccatgcaggggaggagctggtcatctacgtgggcagcagcaccggcaccaccggcagcaacgcggctctgcagctgatcgcttcccagtacaatgccgagtacggccaggtcgtttccaagcccatccagctcaagatcggccgcaacgagatcatggtccccgacctggtcagctttgacgcggagcacggcggtgcgctgtatgtgcagtacaccggcgccagcaacgcggcacagtattccgtccgtgtcagcggcggcgtcaagatccccactctggacctgtacggcatcgacgatgctggccagcgcctggaactggtcaccgcctacatggaggaactggagacctacaccgcacagctggaggaacagcacaacagcacccataaggattccggcattgccgcggtggatcacgattacaatgcacaggagtgcatcctgaacaccaccgacatcgttctggatcagatgatgctttccgtcccggcatctcagatcctggccggcctcagcagcgacaacaccgcggcccgtgcccaggaactgctgaactctctggatgccatggatcagatgatgatcctcttctaccagcacaagggcctgaccaatctggtggacgctggcgccaagaatcgtctgcccgcccagcatctgaacatccgctacatgcgtatgtttgcaggcgccttcatgtatgccgccggcaaccacatcggcatcggctgggattcggtcaccggtctgtcccagggcaatcccgttgtcctcaacgaggacggcacctacgccagcggcaacttctttggctggggcattgcccacgagatcggccacaacatcaacaacaacaagtacacggtggtcgaggttaccaacaacttcttctcccagatctcccagatttcggaaggcgtgcgcttcagctacgatgacgtctacaagaaggtcaccagcggcaccaagggccattccgacaacgtctttacccagctggctctctactggcagcttcaccttgcctacgacaccagctacgagtacgagatctacgacaactacaacgatctgttcaacggacgcttctttgcccgtgtggacacctatgcccgcaacccggcggctgcgcccaacaacggcacggccctgaccctgggcggagatgcggaccagaacctgatgcgccttgcctgcgcggcggcggagaaggatctgaccgatttcttccagcgctggggcatgactcccgaccagaccacggctgcttatgccgcacagtttgagaaggagacccgcgccatctactacgtcaacgacgatgcccgagactatgccttcacccatgacgcctccgcaagcattgccggtcagtccgtcatgagcggggagaccacggcagtcgtggatgaaaagacccccaaccaggtcaacctgaccctcaagagcacggtggacagcgacctgctgctgggttacgagatttcccgcgtcacctatgaaaacggcaaggctcagaccgaggtcgtcggctttaccactggtgacagctacaccgacaccatcaccacggtgaacaaccgcaccgtgacctatgtggtcactgcggtggacaagttcctcagccgttccgagagcctgaccctgcccaccgtcaagatcagccatgacggcagccatgacaagtccctgtggaccgctgccaccaacatggtttcggagcaggatcacacccacgacgccaccgagagcgacccctgcgagccggagacggaatccgccatcggctatgtcatcgacaacagcaagtccactacctttgtgggcaaggccgaatccggccaggccatcgtcacgctggacttccacaagagcctggctgtgaccggcttcaagtacaccgttacctccggcacgcccatcgaaaactacgagattcagatcaccaccaacggcagtcagtggaccacggttgccagcggcaccttcaccgacgattccgtcaacgtggtctacttccgcaaccagaacaacgatccgtgggtcgccacttacgatgcaacgcagattcgcctgatcgtcaagacccccgccaacactgagatctccatcagcgagctggatgttctgggtcccaccggcgacaacgtcgagctgctggccaatggtatcggctacctggagagcgaataccgctttgccgacggtgacggcaacgtcatccccgcaggttcgctgatctttaccggcgagtacaagggcaacccggcctataacgtggtgcttctctatgaccaggacggcaaccttgtgggcggtgtggacagcgacggcgacctgcgtgcccagcagatcatcctggcgcctgatccgggcaacggggaactgggtgaggtcagcgacggcatctgggtctactggatcgaacccagtgacctggaaggcttcacgctgcccgactcggtgcgcgccgagctgtaccgcgtggacaacgccatcaccaacgaaggccagcgtctgaccgcggacacgcttctggtggaactgccggaagaacttcccaccattaccattgcgtctgacaatgcagactgattgaaaaaggagaacgacatgaaaaaaatgtttgccaccctgctgtttggcagtgtgcttgcggctgcggctcttgccgtgccggcacagggcagcggcgaggtgacgctcagcgccagctccggcggcgcacaggtcagcctggaaatgcctgcggacacggtgcaggatgttaccaccatgcacatgagctttgtgatcagttccgacgcagacatcagtgcaaactttgatttcaacgatgcgctgaagagcagcgtgcaggaatctcgttatgaaaacggccgcctggacgtttacatctcgggcagccagaatatcttcaccgacggcagcctcaatctgggggagattcttctcaccaccgccgacggtacggcggcgcaggcaacggtcagcgtggagggggattccatcgagcttctcaacgcggcgtacggcagccctgagctgccggagatcgcccctgtggaggcagaagtgagtgtcagcggaacgaactccggttccggcggcgacaacgggaacaactccggcaacggcggctcggggaatcaatccggctccggaaacagctccaattcgggcaacggttccaacgactcccagagcaccaccgcccagagcgaaacctccggcgttacgggcggcacttcggtgaccacgcctacgacccagaacggcggttcttcttccagccagagcggcagctccaataagggcaactccgccacggccacgcccgacccggaaagcactccctctcccgaggaagagacttcccggccggacagtacggagaacaccaagccggaaggccagactgaggcaacttccaccccggagcaggccacggacgaacagcagcagagcagcggcttcccgctgatgctcatcgttgcggtgatcgctgtacttgccatcgcggcaggagtcatcatcttcatccgccgccgcagctaacctgcaaaagcccgcgctcgtaagtgcggcagcccaataaaaaagcaacaccggtcagacgaaaccgtccgaccggtgttgctttttttattttggtttatgcccgggacatattgtggcgtacaaaaccgcccagttcgctttcatcgctgtagccataggcaagggccttggtgcgcagcgcggcgtaaagctcggcataggtggcctccagataagcgaccaggaagatctgaccgaaaccgaaggtgaccagacagagaagctcccagcccaggaaggaaagatccagcaggaacgaatggaatttttcgccgtccatcatctgacggctgagttccatggcgcgggtggtggtaaggtaggggttttccgccagaagatagggaaccatgcgataggtgaaggaccagtagatccccggcacgatgagcaggctgcccagggcaattttcaggttggtcagaaacaggaccttcaccacattgagatacggggaacggaagatgccgaacatcgtcccgaacggcgcgccgccctgacggctttccatcatgtagcggcaaaggccgacagaaaggggtcccgagacaaaagcgccgtaaacggttccgatgatcagcccgatgatcagcccgacgaaaacggcaaatacaatgccgctttgcaccagaaattcccagatcccgtacagggaatagccgtcattgtttccggtccacacatccggcgtcataaaatcctgtacgagggactgcgtatactggaactgaccggataggtcggagaaaacgctgcttgcgccgaacaatccggcgatcagacagacggcggtacacatccagtaccgtccggaaagcgcctgtttggcgttgtgttttaacagaccgcatgtccacataattcataacctcctgcggaccggcgtttaagttgccggattgtttgatggccgttccattatatcatgaacggcataaaatgaaaaccgtggaaacgcacgacccggcaataaaaaaacacaggctccgcagccgcggagcctgtatttttatgatgggaaataatggagaaggtaaggaaatgtcagattacagatcggtacgccacagaccgtgcaggttgcagtaggcgtagaccgcgacgggatgctcgccctcggccagcaggaagtctgcctcgggagcgtcgccggccttgagccacttgacgctgacaccgcggtcggtctcaacggcgatccactcgatatagtgctcctcgaccatgggatggaccacggagccgacctggacatggacgctgttgccgttgagggtaacagcgggaacgtgcttttcggtagcggcatcaacggagccggcctgcagcaggaccatcttttcgccgcagcagaaaacagggacacccgcatcgtggaggtggaagataatgttgccgcaatgggcgcagcgatagattttcataagatttatctcctttcaaaagtctgacagcaaatcagaatttcggttacatagcatatcacagcattggctgtgagcatagaatagcatataacggatacggatggatgttgctatggcaacgaacggaaaattaaagcagcatggcagcaaaagcccatgccagatggagcaaagtgacccggtcctccaggctgggatcggcgtccgcagcgcgctgcagctccagcatgacacgggggatctttcgtgcgggaatgcccatacgggcaagctccagccgggaaacaggaagttttcgcacaggtttggaagggtcctttaaggcggacatcccaaacccggcaattacttttttcatgattcgcatcctttctccaagaaaaatgctgaagtgaacaggtctttttctgtaattataccaaaattttagaaaaagtgtttattttgcaaccaaaaaaatatataatgcatattagactagttttttcggctgctattgcggcgctggccctgtgtggccaatacgtttttgaggtgacgatgcatggcgtactataacagttacaatcccaaactgctggaaggggtgacccacatccattttattggctgcggcggttccggtatgtatccgctcatccagatcctgcacgcaaagggttataccatgtccggcagtgatgtggaagagaccaagatcacccaggcggagcgtgccatggggatgaaggtcacgctgggccacgatgcggccaacgttctcggcgcacagctgatcgtgtacagcgccgctatccatgaggacaatcccgaactgcaggaagctcacgcccgcggcattgccacggtggaacgcagtgtgctgctgggatatgtcagccgcctgtatccgcacagcattggtgtggcaggcacccacggcaagaccacgacgaccagcatgatcgtcaccatgctggaactggccggcaaggaccccgcagcggtcatcggcggcaagctgcccctgatcgatggctacggcaaggcgggcgagggcaacagcatcgtcatcgaagcctgtgagtacagcgagaccttcctgcacctgaccccgtacatcggcgtgatcctcaacatcgataacgatcatctggaatattacggcaccatgggccgcctcaagatggcgttccagaagtttgcactgctgtcccgtaccgtggtattcaacctggatgaccccaacaccctggcggtggtcaactccatcgaccgtccggtcctctccttcggtatcgagcaggaagcccgcttccgtgccgtgaatatcaaggagtaccgtcccggcttctacgagtttgacgttgaggaactggaagcccactttgcccatctgaagctgaatgtgcccggttaccataacatttataatgctctggccatgtgctgctgcgtccgtcctctgggcctccagccggaggatgccgagcgtgcggcagaaagctataagggttccggccgccggtttgagatcaagggcgagtgcaacggcgccgtcattgtagacgattacgcccaccatcccacggaactggctgcgaccctcaagacggctcacgagatgggctaccagcgtgtcatcgcggtacatcagccctttacctattcccgcaccaaggctttgatgcaggactttgccgatgtcctcaagaccaccgaccaggtggtcctcctgcccatcatgggcagccgtgaggtggacgacggcagcgtccgcagtgaggaccttgccgcccgtatcccgggcagcgtagtggtcggcggcctggaagaagccgccgactgggtcaaggccaacgccaaacagggcgacctggtggtctgcatgagctgcggcgacctgtacaaggctgcggacatgatggtggagaaataaacagattctgcttgctgacaggcggacagtctaaatggctgcccgcctgttttttgctgtaaaatgccggacgccgcgccgggaaagaatcgggaatatatcatcgcgctggctggatgtttgtactgccgcagggaaaaataactgccgctatgcaaccaaatccgccgctgccgacacataccgggtgaaagaggtgaatctgttgaacgttcaggatgtgacccctttttttgaaaaactgtacgatgcgacctatgactcgacgctgctgtatctcacccggcgctgtgctgacccgacccagatccccgacctgctgcaggaagtctatgccgaggtgtactcggtcctgctgcaaaaggggccgcagtatgtcaaccgccccgaagcctttgtccggcatgtggcaaagtccaagctgtgcagatattattccctgcgcaaacgcctttcctgcctgatcccgctggaacattttggagcggatgaagccgacggtgatgaaggaaggattcgggaaattccggtgcacgagctgcccgaacaactggcagaggataagctccttgccgcggagctttctgcaaagatcaagaccctgcccgcggatgttcagcggattctgatctgtcatttctggctggatctgtcacttgcaaagacggcaaaggtgctgggcatgaaagaggctacggtcaagtcaaagatgtatcgtacgctggctaagttgcgagaactgtatgaaaaggacggtgccgaagaatgaacgaatatgacctgatgcgcaatgcactttcccggtatggccttgaccgcggggccgtgtaccgtgcggcgcggcaggcgggcgccgtggccgcgacgaaaggagcaccaacaatgaaaaaaagcagagtgaccggttttgcagccgttcttgcggcggtctgcctgggagcaggcgtctgtgccgcagggtattaccttactgccgggcaggcggcgagagagatgggggagagcgccgtggcgcagcttctggaaagccccgacgctgtcaccatcaacgagacacagactgacgcaggctatgatgtgacccttttgggcatggtcacgggggagcatctgaccgatgcctggagcagctactggaacggagatgcgccccaaaacggcaccacctatgccgtgctttcggtcggccgcagcgacggtcagcccatgcccgcccgggatgaggatgagactttcggactgatgaacagctttgcgcaggcgcggctggccagaccggagctttccccggcagagtactggctggacccggaacgccaggacgtggttgtggacggtgtccgttacctgcttgtggcgtgtgacaatgtggaggttttcgcagaccagagcgttgtgctgtgcgtctccaccggaagccccttctattccaccgaagcgttctcctatgacccggccaccggtgccatcacagccaacgaggaatatgaaggcgtcaatcttgtctttacgctgccgctggatgcgtcgaaagccgatcctcaggctgcgcaggaatttttgaacgcctggaaaaccggtgaggtggagagcaccctgccggaggatgacgcggccggtgacgccgccggactggcggatgccgtcgcggacatggcgaccatggcatcggattatcccacgccggaatccgtccgtgcggagggagaacttctgacgacggagacggttccctttgtgcaggacgtccgcatggaggatggcactcccatgggtgacggctggcggatcggggacggctttgcaccgcagcagggaacatgcagcgtgcttgctgtcagcgatgtggacggacagacacttgcctacctgggaaccctcaacgccgataacactatgacggtggagacctggaaaataggctgatcgcttcccggtacaggaatcaaaacacagggatctgccgccaataaacagagcccccgcaacgcagtacaaacctgcggtgcgggggcattgtaattgtcaggattttgttttgtcatcggagggcggaatgtctttccttcggcgggagatcagccattcgtaaatcagctgaacgataaagaagcaggcaaaataaatcagaaaatttctggccagctgcaaccataccggcggaaaaaccgtttcgtcggtagaatagagaacgccgccgttaaagaaggaaatagaggacaaaacaagagaaaatacagtggcttttgcggcgatagacccaaaggggagattcatggccggttccctcccaagtactgcttttgggaaaatcagtccgatcagtacgtcaggatcaatccctggtcctgggcatagaaactgcaaagtccggcgcagggcgtcacaacgatcctggcgtccggccatttggcatggatgccgtgttccagcagggcagtggccttttcgttgtcgcaatggctgatgcgcacggtgtggctgcaatcaaagccgtcctggtccatctgttccagaatgcgggccagaacacgggtctcgccccgggtcttgtagaagaagtcaatcttaccgtcctgcgtgcggcggcccagcacccgcatgttgagagcaccggcaataaatccgaccacccggctcacacgtccggccttggccagattgtcaaagctggccagcgcaaacaggatgtgcccggaatcgttgtgctcggtcagggcacggcagacttcctcaaagctcttgccctcgccgatcagacggttggccaggtatgcagcctccgccagagcaccggcgcagctcagggtgtccaggataaagatgtttttgtcggggtactcgtccagcaccatctcccgggcgctctgggcggcgttgtagctgccggaaagattgtggctgatggtcagggcgatcacgttgtccgcctgcaaaaacagctctgcccattcttccgggctggggcaggcggtggaactgccgccgttgtaatcggtcatggcctgaagcatctgcggtacgttcagggtgggcagatccacgaattcccgttcgcccacacggatcttaaaggggacaagcccaaactgtacccccggagcaaggtcctccatgtgacggatctcacaggaagtgtcggatacgatcatccaggacatagcatatgcctccattctgtgcggtggggtcaaggcgagtaccggtcccggaaatacgctgatttttccaaagatacgcgatgtaaagttgaaaaaatctgccccgggcggtttggctttcctcgaaatatccctcttcgaggagagaaccggcagcctgccgcacacatatctattttaatcattatattcccggcagggtactccgtcaagccggagcacttgccaaaaagacggccccggcaactataattcatagaataaaatgcggttttttatgatattttatgacttctcttgcaatcgggcggggcagcgactacaataaaactatatgcctgccatttttgcagcctgccctcgcggcaacgctgcggcagtgcaacaacatagaagggaagtaccgaatcatggcaaatcaaccgatgtctctcggcaccgcctgcgtgcagggcggctatacccccgccaacggcgaaccgcgccagatccccattatccaaagcactacgttcaaatatgacagctccgacgatatgggcaagctgtttgacctggaagcttccggctatttctattcccgcctgcagaaccccacctgcgaccatgtggcggccaagctggcccagctggaaggcggcaccgcggccatgctgacctccagcggccaggcggcgaatttcttcgcgctgttcaatatctgcaatgcgggcgaccacattgtctcatccagctccatctatggcggcaccttcaacctgatcgcggtcactatggccaagatgggcattactgctacctttgtctctcccgacgccaccgacgaggaactggatgcggctttccagcccaacaccaaggcagtgttcggcgagaccatcgccaacccggccctgacggttctggacattgagcgctttgccgcggctgcccaccgccacggtgttcccctcattgtggacaacacctttgcaacgccgatcaactgccgtcccatcgagtggggcgccgacatcgtgacccactccaccaccaaatacatggacggccacggcggcactgtgggcggtgccatcattgacggcggtaagttcgactggatggcccatgcggacaaattccccggcctgaccacgcccgacgagagctaccacggcatcacctacgccgagcgcttcggcaaggaaggcgccttcatcactaaggcaaccgcacagctcatgcgtgacttcggctgcacccagagccccatcaatgcctacatgatcaacctcggcctggagagcctccacgtccgcatggcccgccactgcgagaacggtcaggcggtcgccgagttcctggcctcccatcccaagatcgcttacgtggattactgcggcctgcccggtaacgcttaccacgccctggcccagaagtacctgcccaacggcagctgcggtgtggtcagctttggcgtcaagggcggccgcgatgccgccaaggcgttcatgggctacctcaagacggcggccatcgagacccacgtggccgatgcccgtacctgctgcctgcatcccgccagctccacccatcgccagatgaacgacgaacagctggcagccgccggtgtcaagcccgatctcgtccgtatgagctgcggcctggaggacaaggctgacctgatcgccgacatcgcccaggctctggacaagatctgaacaataccgcccggcgcggttgccgcgccgaaaggagaaccgtatgccgctcatcattccccgggagctgcccgcctatgaggcattggcaggagagaacgtctttgtcatgcgcaaggagcgcgcccaaagccaggagatccgcccgctgcgcatcctgatcctcaacctgatgcccaccaagatcgtgaccgagacccagctggcccgcctgctggccaacagcccgctgcaggtccaggtgacctttttgcagacggccacccatcccgcgacccacactccccaggagcacatgaaggctttctacaagaccttcgacgagatcaaggacgagcgttttgacggcatgatcatcaccggtgcgccgctggaggacatggactacgagcaggtggattattgggaagaactctgccgtatcatggactacaccaagaccaacgtctactccaccattcatttgtgctggggggcgctggcggggctgtattaccatttcggcgtgcgcaaggtgcatctgcccaaaaagatgttcggcgtctttgagcaccgggtcacccggccgtccaatcctctggtacgcggctttgacgaggtgttctacgcgccgcacagccgttgggccgggctcaatgagcaggatattgccgactgcggggaactgcgcgtgctggcccgcagcgacattgccgggccgatgcttctctccaccgactcgggccgtcagatctttgtcatcggccatcctgagtacgacaagtacaccctggataccgagtaccgccgtgatgtggctctgggcaaggagatcaacgttcccattaactactatcccgacgatgaccccgacagggagccgctgttccgctggcgtgcgcacgggcatcttttgtataccaactggctgaactattacgtttaccagaataccccctacgacctggcggaacttcaggccctcaaggatttccgcaaggcaaaccgggagtaaggaactgaaaccaacagcaaatacaaacggcagagccgccggtcctgatggaccggcggctctgccgttttgttatgtcccgcacacaatggcgcgggaatttgtcaggagagaattgccggacaccggcccggcgggggagaggggcagaagcgatcaggcttcgtgacgcttggcccaggcgcgctggcaggccttgacgatctcaacgatgggcaggaccagaacagcaaggccgagggcaatcaggtattcggacaggccgacgggggtgaagccgaaggcgttggccacgaagggaacttccagcacgatggtggtcagggccaggctgccgatcatggcgccccacaggaccaggttgtggctgtgcagggtgaacacgctcttgcgctggctgcgcatgttgaagctgtggacgatctcgcacatgctcatggtcaggaaggccatggtcatgccgtcgggagaaatgcccttgggcatctcaaagtaaccgacttccatgcagtgaccgatgatataggagagcagggtaatgacggtgatcagcacgccctgatacgcaacgtcggtgcccaggccgccggcaaagataccgtcgctggtcttgcggggcgggcgggacatgacgtcaggctcggccttttccatgcccagagccagagcggggaagcagtcggtgatcaggttgatgaacagcaggtgcacaggctgcagcagggtgaagcccatcagggtggcaaagaagacgcccaggacctcgctcatgttggaagccagcaggaactggatggctttgcggatgttgtcgtaaatgcggcggccttcgcccacagcattgacgatggtggcaaagttgtcgtcggccaggaccatgtcggccacgttcttggtgacgtcggtgccggtgatgcccatgccgatgccgatgtcggcagacttgatggagggcgcatcgttgacgccgtcgccggtcatggcggtgacgcagccggccttcttccaggcggtgacgatgcggaccttgtgttcaggctgaacacgggcgtagacgccgtagttctggatggtcttgtccagctcttcgtcggagatctcgtccagggccgcgccggtgatggcctggtcggggctggagatgatgcccagctcggtagcaatggcaacggcggtgtccttgtggtcgccggtgatcatgacgggacggatgcccgcgctgcggcactccacaatggcggctttgacttcgggacggacggggtcgatcatgccggtcaggccgatgaagcagagatcctgctccagataagcgggatcattctgggccggacgctcgctccattcgcggcgggcagcggccagaacacgcagagcgcggtcggccagagccttgttgtccgccaggatggcggcgcgcttttcatcggtcatgggaacgaccttgccgtcctccaggcaggtggtgcagcggcgcaggatctcgtcgggagcgcccttggtgtactgcacaaaaccgttggcggtcttgtggatggtggacatcatcttacggccggaatcaaagggagcttcgtccacacggggctcggcagcttccagttcggacttgggcagaccgacagtcgcggcgtaggccaccagagcggcctcggtgggctcgccttcggcttcgccggcgtcgttgagcttggcgtcgttgcacagggccatggcggtggcaagagccttctcatcactgccggtgtgctccacaacggtcatcttgttctgggtcagggtgccggtcttgtcggagcagatgacctgcgcacagcccagcgtctcaacagcagtcagcttgcggatgacggcgttgcgcttggacatgttggtgacgccgatggagagaacgacggtaacaacggtggccaggccttcggggatggcggcaacggccagagagacggcgaccatgaaggtggacagcacggtgtccaggtcaaaacggccggcggagatcaggttgaacacaaagatgaacacgcagatgcccagcaccagcttggacagggtcttgcccagctggtccagctttttctgcagcggagtctgctcgtcctcggtggcagccagggcaccggcgatcttgcccatctcggtgtccatgccggtgcgggtgatcagagcgcggccgcggccgtagaccacggtggagcccatatagcacatgtttttgcggtcgcccaggggaacgtccttgccgttggccaggccaagggcctcggtgatcttgttgacggggacgctctcaccggtcagggcggcttcctcgatcttcaggctggcgctttccagcaggcggccgtcagcgggcaccgcgtcgccggcttccagaacgaccacgtcgccggggaccagctcgtcggagtgcagcagcacctgtttgccgtcgcgcaggaccttgctggtggcggcggtcatgctttgcagagcctcaatggcggcttctgccttgctttcctggtagacgcccaggatcgcgttgagcagaacgacgatcagaatgataaagacttcggccagaccttcgccctcaaacacgctggtcacggccgacacggcggcagccaccatcaggatgatgagcatcgggtctttcagctgttccaggaagcgctggaacaaggtgggtttggcggcttccttcagacggttggggccgtgctcttccaggcgttttgccgcctcggcagaggacagaccgttttccgtgctctttgtctgagcaaggatttcctcaacggattgggtatactcgttcatgcaaaatctcctcctgatgaacatgggtatttatgtgtaaatttgcggaaccaaaaataggggacgaaacccgatataataatagtatagaaaagaacggcctgtaaaccggtcttttacagtatgcccagaccggacaagagcgtcttgataccgatcaggatcagcaccgcaccgccggcacgctctgctgcggctcggaacttggcaccgaacaccgcgccgatcttgacacccagggcggaacagacaaacgtcgtgacgccgatcaggcaggcagcgggcaggattgcgacttccagtgcggcgaaagaaacacccaccgccaatgcgtcgatggaggtggcaacggccaggggcagcagtgcgcggggaccgaaatcatcgtccagggtctcggtctcgccaaagctttcccggatcatgttgaagccaatcagagccagcaggataaaggcgagccagtatcccacctgggagatcagcgatgagaaggtgctgcccagaaaatatcccagcgtaggcatcaatgcctggaacccgccgaaatagataccgcataaaagcgcgtgggacagcttcagcttgcgcaccgaaaggcccttgcagatggacactgcgaaagcatccatggaaaggccgatgccgatgaggaacaggtcgagaaacgtcattacagcaaaacctcgctttgtatcaaatctcctgatgcccggcagaagggaactgcggcgcaataaaaaagcgagacttatctgcgccgaaacgtacagataagtctcgctgattaaaacaaagccaggacgctgaaacatccaagatgttggcaatgttgcgtgggggaaccacgccagctactcccttatgtcaacgaaaagtatagcacgcgaaagggcgaaagtcaacacaatttgggctcgggattgcacattgtggcattttgcagtagaatatacccggattctacaatacatggggattgggatgtgatggatcatgcagtataaagttctggcactggacctggacgggaccctgaccaacagtcaaaagcagatcacgccgcgcaccgaggcggcgctgcgcaaggctgcggcgctgggcgtccggatcgtgctggccagcggccgtcccacggtaggggtgcagcctttggccgaccagctgggactggcccaaaacggcggctgcatcctgagctataacggcggcaagatcgtggactgcgccacggggcaaaccctggtacagcacgctttcccggcggaactggtggcaccggtgtgcgactttgcccacgaagcgggcattgtggccctgacctatgacgcaggcggcatcctgaccgaggaaccggacaatccttatgtgcaggaggaagcccgcatcaacggcattccggcccgtaaagtggatgaccttgctagcgctgtggacttccccatcaataagcttttgcttgtgggcgaccctgaaaaaatgccccatgccgaggaactgatgcagcagcgttttgcgggcaagctgtccatttatcggtcgcagcctttctttattgagaccatgcctctgggggtggaaaaagccgcctcgctggatcttttgctgcgcaccatggggctgtttgacaaaaacctcatggcttgcggcgacggctggaacgacctgcccatgatccgctttgccgggctgggcgttgccatgggcaatgcggtaccgcaggtcaagtcggcggccgattacatcacggcagataacgaccacgacggcgtcggcctggccgtggaaaaattcattttggaacaggaggaaccgggttgaacctgatcgtttttgacctggaatggaatatcgggtatcagcccaagaccttccggtatcacggcaccgagctgaccctccggggcgagatcatccagatcggcgcggtccgcattgatgaagcgggagacattctggatacgtttgacatgaccctgcggccccgcattttccgcaagctgcagcatcatattgccaaggtgacgggcctttcccagggggaaatcgacgccggtgttcccattgccgacggcctggcggagttcatgcgctgggccggtccggatgcggcctttgccgagtggggcttggacgatgtgccggtcctcaagcagaatttgttcctctgcggtctggatgaaagctggccgactcgctggtatgacctgcaaaggatcttcctccagagctatccccgcaaagaaggcgagggcatgacgctggagagtgttgtggaccgtatgggcatcgagaaggaccagccgttccataatgcgctggtggatgcgctgtataccgtcaaggttgcccgtctgctgccgctggcggagtcccttcgcgcctatcccacggaggatcagctgctgcaggaggcgcttctgaccgatcctgctgccagctactatgacgtacagattttccgggaccgtctggagcatgacgactacaaaaacgattcggaactctgctcggtcaactgcccgctgtgcggtatggcactgtcggtgggagaaatctggctcaaacggggcaacaccggctactataccgaggctgactgcccgaagcacggcccctggtttttgcgtttcaagctgtcccggcgggatggcctgcactggagcttcgcccgctgcctggaagcggtgcgcccggaaacgctggaaaaatgggaacaccagaaagcccgcatggaggcccgcctgcgccgcaaggaggaaaaacaggggaccgcacccgagaaccgctgacggcggaatcgttatgtatgaaaacacacgcttttcccccaagggattccagcggggaagagcgtgttttgtattttcagacatgactgcgaccaggggaaacagaacaaaaaagtaatgcttcgtacatttgaaaacgcaagaaaatacagattttttgtgaaaatatattatgtggtgagagtgaaaggaacaaatattgctcggaaatccggcataaaattggaaaaagacaaaaaacaggacatattttgcacccggcggcaaaaatcatccaacgaaaaagtattgcttttcagataatcggaaggtatatttgtgattgattttatgacgcagcaatgctaaaaagcaaaactgcgcgccgaaattgaatacggggtgatcgtgcgtgaaggagaacgacaggtgtgtatatgtccgcgagtattccgagcttcccggcctgcaaaaggcggcaagcgtccggtatgaactcttggaagaggcgggcatataccgctttcatgtaatgcagcagccggacggaaaatctgcggcttttcatctggccgggctgtcccgcgatgcggcgcgggatcttctgcaatttttgtacgaaaactccgtggggcctgagagcgcttatgcggtggcccgggactgtgtgcagccgccggtgatggctgcaccggatgaggaatgaagaactgacaggaagccaaaacgtcgacagtgggggcaagataggactatgacaaaaccgtccggtcaaaaagcaaaaattacggctgtctttgcggatgcggatcgcggccagcgcgaagcgatcaaactgtatgcgtcgatgcagactgaactggatgtttttgctgtcgtttccgggggcaatgccgtgatcgaactgttccggcggggacttcagccggatgtcctggtggtggacgctctgctgccggataccagcattttcgaactgctttccggcatcagccgcctgtgcctcaaggacccgccggctattgttgtgacgctgtgtacatccagtgataccctccgcaccaagctcttgacatccggggcggatttctttatcctaaagccatatcgtctgcccgctgtatttgaagctgcggcctatgtggcctgtgatgcgccttcgatgctggaacggcgggcgagatcgcacatcaactggtatctggaagtcctgcgcgctcctgccgatgccgcggggacggcctatctgcggcggatgctgtttgaactcgtggtacacgatgagctggccaccgccgatgagctctgccgcatcatggcggaggaaagccggatcacgcccaacaccatcagcaaatccatcggtcgggccatccgggagatctggcgtcagtccacaccggaataccgttccttgtgcgaatgttttggagagactactgacaagccgttgtccaacatgaaactgatcaaaggactggccgggcggatccgctgggaactggatctgtaacccggcgcggcggtctgctttccggaaaggagcggggaaatatgtcgacggaaaacaaaattctggcaagtgagcgcgaaaacgcgctgcttcacggcgggctgcgcggccgcatggccggggcattctgcacgctgcaaagttccgtcgacgcattgcagcgctacctggcaaacagcgccaccccggatgtctacgacaccgcccgggccatgctggaggaaatgaccgaccgcatcgccgccctggaacgcctttccagcaatgccgcggagcttgcctgcggtgtgctgacccgcggtgcggaggagctttcccccctggaactgaccggctacctgaatgagacggcggcctgcgtcaatgaggaactggccatccgcggctttgggacccggctgatcgttgagaaaagcaccgagccgctctgggtgatggcaacgacgggcctggtggacggcattgtcgtcaatctgctgtccaatctgctccaggcgcagcctggcagcaaaatgtatctgactcccggtcccggccggactttgctgtaccgggatgaaggccccggtctgcaaaaagaaacagcggtagccttgctggagcagggaaaaccgccgctccgtctgcgggataacggctccatcggcctgctgctggtgcgggagtatgcccaggcaatgggctggacggtccatgtggaaccgggggagggcctttgtatccggtttgagttcccggattttgagatgcctgccgtccggcgggctctttgggatgcggcagcggaaaaccgcacgcggacgagcttgcttgcttcccggctgaaccgggaactggacggggtgttcggtgtttatgccgggaaggccccggaacaggaatgacattccctgcaagtaccctaacagaacaaatgaaaacagtgcacggaccgggagtacggcgccgcacggccttggagccgacggcgctgcctttccggcccgtgtacttttgtgttttgcctgcggcgcgtcaaagaagtcttttttcacccggtaaaggcggcgccggtcatacccgcaggattttttcaggacaaacggcggaaaaagtatgtgaacccggtgaaaagaggggaatggacggacttttttatccacatttgtttactttgcggacaaactattgtaaaatatctctgatataatccgtttgatcagaatctaacagaaatggtggtattgaacatgtcagtcgtatacaagcgtgttctgcttaaagtcagcggcgaagcccttgcaggggaaaaaggcgccggttttgatgaaaatgtcattgcgtcgatctgctccggcattgccaaggcctatcatgccggcacgcagatcggcatcgtcgtgggcggcggcaacttctggcgcggccgttccagcggcaagatggatcgtatggatgctgacaagatcggcatgctcgccacggtcatgaacgccctggccctcaaggatgccctgcgccaggccggcgttcccgccgtggtcatgaccagcgccgttatgccccaggtggcagagaccttcaccagcgataaggccatcgccgcgctggagtccggcaaggtcgtcgtgttcggcggcggcaccggcaaccccatcttctccaccgatactgcttccgcactgcgtgcgctggagatcagcgccgacatcatgctcaaggcgaccatggtggacggcgtctatgacaaggaccctcatcgctatcccgacgcggtgcgctatgacaccctgaccttcacccgcgttctggacgagcgcctggccgtgatggactccactgcggcgactctctgccgggataacggcctgcccatcctggtgttcgacctggccgaccccgagaacattgcccgcgccgtggcaggggagagcgtcggcacgctggtcgaggaataagaatccaaggcgctgcgacgcctgcaataataaaagaaacagaggtaaggagtaacgctatgagcagcaccacgaagatttacgaagagaaaatgaacaactgtgtgtcccatctttcccgtgagctgggcgccattcgcgccggccgcgccaaccccgccgtgctggataaggtggctgtggactactacggttctcccacgccggtcaaccagatcgccgcggtggcagtggccgaggcccgcatcctgaccatcactccctgggacggcaagatggtcaaggccatctccaaggccatccagaccagcgacatcggcatcaaccccattgatgacggccacaccatccgcctggttttcccggcacccaccgaggagcgccgcaagcagctggccaaggacgtgcagaagctgggcgaggaagccaagatcgctgtccgcaatgtccgccgcgacgccatggataagttcaaggccatgaagaaggccggcgaactgaccgaggacgatcagaagaatctcgaggaagagactcagaagatgaccgataagttcgtcaagaagatcgactccatctgtgaggacaagaacaaggagatcatggaagtctgatctcaggctctctgacgccggtccgctgcacaacgtgcgcgggaaagtgaaggatgccggatgctgtccctgcctgccctgaggcggaaagaacagcacagcatccggtacgggatctgccgtttccgggcagatgcccgttcctttcccgggtgcttgccgtgttgcggccggcggttgccatatctggcaagaacgcgcccccgggcgcataaggtatctgtgagggcggcccatgccgcccgcgaaaggaattcctgcttatgaaaacccgtatcctgaccgctgcggtcggccttgtgattctggccatcgtgctgctgttcttcaacacggtcctgttcgatctggttctgtcggcggtctgcctgatcggtatccatgaagtgttcgcggccatgggcttcggcaaaaaacagtggtatctgtatgccgttgccattccgtacacgctgctcgtcatgctctccaacagcgagcccttccgtgcgctcatcctgcccgctagcttcctgcttttgctggtgctcaactgctgcctgatcgcgcataccaaaacgctggacttcggcaagctctgcggttatctgtatttcagcgcagtcatcgttatgtgcttctactcgctgatctacctcaagcgctgcctgcccatcgagacctattactatgatgcggtctattttattttgctcactctctgctttgcctggggcggggacagcgcggcatattttgcagggcgtttcctcggcaagcataagctggcgccggtggtcagcccccacaagacggtggaaggcgccattggcggtgtcatcggcagcgttctgctgggcattctggcaacggccatttacagcagcatttcgggccgctttgtgttcctgaccgttgaagtcacggtccgccattacctgctcgtcgccctgatgggcgttgtagcgtcggtgctgggcattctgggcgacctgtttgcctcggctgtcaaacgccaggtgggcatcaaggactacgggaccattttccccggccatggcggcattcttgaccggttcgacagcgttatgttcgtcgcaccttttgtggccattgccgtgcggtatttcttctatttcgtgcactgatttttccttttcaggataagtgagggattgtaccatgcaacaaaacccgacaaaaacgatcacgctgctaggctccaccggttccatcggtacccagagcctggatgtggcccggatgcacggataccgggtgtttggtctggctgcaaattcccgggtggaacttcttgcccgtcagatcgaggaattccaccccgcctacgtggcggtggtcgaccccaaagcctatgaacgtctggacgccatgctggccggtcagtccgatgcacccaagctgctcaaaggcccggaaggtctgcgtcagcttgcggccatggacggccccgacgtggtcctcaatgctgttgtgggcattgcgggccttgccgcgtccctggctgccatcgagagcggccatgaccttgctctggccaacaaagaaagcctggtcaccggcggtcacctggtcaccgatgcggtgcgccgggcaggggtcaaactgttgccggtggacagcgaacattccgctattttccagtgtctgcaggatgcccactcggccaagcggctggaaaagatcctgctcacggcgtcgggcggtcccttctacggcatgaccaccgaacagctgcggggcaagaccaaggcggacgccctcaaacatcccaactgggatatgggtgccaagatcaccatcgactcggcgtccttgatgaacaagggcctggaactgatcgaagccgtctggctgttcggcctgcccgaggataagatccagatcgtcgtccagcgggagagcatcatccattccgcggtacagtttgacgatcattcggtcattgctcagatgggtgtgccggatatgcgcattcctatccagtatgcgctgacctggcccgaccgtttgcccagcccggtaccggaactggatttcgcagcgctgacctccctgagcttcggcacggcggacgaggagaccttccgctgcctggccgcctgcaaaaaggccatccgcaaagggggcctgggaccctgcgccgccaacggcgccaacgaggaagccgtccgcctgtttttggaggataagatcggctttttggacatcggccgcctggtggaaggcgtcgtggacagcgacagctttggcggtgactacacgctggccgatgtgtatgaatgcgacaagatggcccgcagctatgtgctgagccatatctgaaacgattctgaggattctgtgtccgcgtaagcagcgcggagatcaagaggtgcttaatgacgactgtgcttaccctggtcgtatcggttctggtgtttggtattgtggtactcgtgcatgagtggggacatttcatggcagcccggcgcagcggtgttcacgtcgaggaatttgccatcgggtttggtcctgctctctggcagaaaaccaagaacggcacggtgtacagtgtgcggctgtttccgttgggcggctataacgccatgtccggctattcggaggactccgacgccgagacccaggcgcccgtcaagccgcccaaaggcgcgccgctgctgcctgccacggtggacggcaagacctacccggaagcaaccgcgggtcagcgcttcttcatcattgccagcggcgcgctgatgaactttgtgctgggttttgtgttgctgatcgccctggtctgtacgcaggatgccatcaccagcaagatcatttatgatttcaccgacggcgccctctgtgcccagaccggcctgcaggccgaggatgagattctctcggtcaacgggcattactgctttaccgccaacgatatcatctatgagctccagcgcgccgaaaattataccgccgattttaccgtcctgcgggacggcgaggtcgtgcatctggaggatgtgcagttcggcacaaccaccgacgagaacggcaagacctccatggtgctggaattctcggtctacggcattgccaagacacccaagacggtggtgcgcgcggcattcaataatttcatgtattatgcgcgggtgattctgcgcagctttgtggatatggccatgggccgtgtcagcctgcatgatatgtccggcccggtgggcatcgtcagcgccatcggggaagcggtgcagtacggtctggccgatgtgctcagcctggctgccctcattaccgtcaacctgggcatcttcaacctgctgcccattccgggactggacggctgcaaactgatcttcatcgccatcgagggcgtcaccggcaaagtcgtgccggaaaaggtccaggccgccatcaacggtgcgggcatcattctgctgctcatgctcatgctgcttgtcacattccaggacatcacccgtattttctgaccggtgaaaggagaaaacgatgcgtaaactgaaaaaggtcgtcaagatcggaaacattgccatcggcggcagcaatcccatcgccgtacagaccatgctcaacgtccccgtcaaggacattgcgggcaacgtggcccaggcaaagcgcgtggccgacgccggctgccagatcgtccgcgtgacggtcccttcgccggaggatgcggcggtggtcgcagccatcaaggaagcggtggatatccccgtggtggcggacatccatttcaactataaggcggcgctggcggctctggatgccggcgcggacaagatccgcatcaatcccggcaacatcggcgcggatgaaaatgtcaaggcggtggcggatgcctgcaacgccaaaaacgtgcccatccgcatcggcgtcaacggcggcagcctggaaaagcacatcctggccaagtacggcgccccggtgcccgaagccatggtggaaagcgccatgtaccatatccgtctgctggaaaagcatgacttcaataacattgttgtctccatcaagtcctccaacgttccccgcatgatggcggcctaccgtcttttgagcgagcagtgcgactatccgctgcacgtgggcgtgactgaggccggcacctcccgcatgggactcatcaaatcgggcatgggcatcggcggccttttgatggaaggcatcggcgataccctgcgtgtctccctgaccgacgagccggaagcggaggtcgtggccgggtatgacatcctgcgggcggcgggctttgcagtggcaggccctgagatcatcagctgccccacctgcggccggacccagtaccccatgaccgatattgccaagaaggtggaagcccgcctgcaggcggatcacttcaaaaagccgctgaaaattgccattatgggctgcatcgtcaacggccccggcgaagcctccgatgccgacatcggcattgccggcggcaaggatgaggcattgctcttcatccgcggcgagaaggtccgtatgctcaagggcgacgccgacgccatcgtcagccagcttgtggaggagatctacaagctgtaacgctctgtacccgacgccggaaaggacccagtcatggaactctttcagatcctgtttgacctgctcatggccgtcagtccgcagtttgccgcagcggtcctgctgctgtcaacgctgctgttcggcttttgcagctatgtcttttttgcggcgtccaatctggcgggcggcatcgtctttctcgttatggcgcttgtgacccttttcctgctggtgcagggaatccgccagcaccgttttgagcgccggaaaaaggacgggcacaaaaagcagtaaagccggagaatcttcaccgggacaggctcacgactttccgggccgaggattcgcagcacacatacatatcgccaaatccctccctttgcgtctgaatgacgccaggggagggcatggcgtttttgggacaagcaacaaaccggatgcaccaaatccccagaaaaaggagacaccttgaaaccctttgtcacacaggtctggccgcagtttacggccgatgcccaattcaacgcctgtttcgggcaggtactggtcgaccgggtcgaactgtaccgcaccgcccgcaaggtcatcatctgcctgcgcagctcggagccgctggacggcgccatgtgcgggcggctttttgcgtctctggaaccggtgttcgagggctatgagctgaccctcagaaactatttcaattacggcaatatcaccccggaggccgcccgcaccctcattgaggagctcaaaagcgaaggcctgccggtcaacggctttctggataagtcgcccatcagcatcgagccggacggcatcacggtgcatgtggcggcgggcatgaacattctggagagcatcgactttccccgccgtcttgccgagcgcattcaggaacgcaccggaaccctgcccatcgtccgtatggtagccagcggcaagaccgtctcggcggaagaatttgaaaagtacgtccagaacaagaccccggccgtcaagttcgaggccaaaaaggacctgccgcccatccaggtgcaagggctggacctcaccgacaaaccggtcaaggtgttccacggcaaatacttcaagcctgccgacctgcgccccctcaacgatctgggcgacggcggcaagatcaccgtctggggcgatgtctttgcctccgaggtcaagggtaaccgccgcaagatttatttcacgtccatcaccgactataccggctccgtcagcgtcaagatgctgggggacgacggcgaggacatgagcaagtgggagtccatcaagccgggcaccaccttcatcatccgcggcgattacagctacgataaatacgagcatgactatgtgctctatccctatgacattctgcaggtggaacgccgccagcgccaggatgaggcccctgacggggaaaagcgcgtggagctgcacctgcataccaagtccagctccatggacggcttctgcgaccccggcaagatcgtgcgtctggcccacagcatgggccaccgcgccattgccatcaccgaccacggcgtctgccagggctaccccgaagccatgctggccaccgatgatatccataaaaaagatccggacttcaagctgatctacggctgcgaggcctactttgtggacgacatgatccccgccgtctacggacctgccgaccagccgctgactggcagctttgtggtgttcgataccgagaccaccggcctcaatgccaacaccgaagccctcaccgagatcggtgccgtctacgtggaaaacggccgcatcaccgacaagaccttctgcacctttgtcaatcccggcaaacccatcccggcccgtgtggtggagctgaccggcatcaacgactccatggtggccgacgcccccacaccggaagaggccatccgccagttcaaggaattctgcggcgagtccatcctggtggcccacaacgccaacggctttgatatgctgtttatccgcaaggcaggggagaaggcaggtattcgctttgacaacacctacctggataccctgcccatggcccaggctttgttcccgggacttcacaactataagctggataccatcaacaagcacctggagatccctcccttcaaccaccatcgcgccgtggacgacgccatggctctggcacgcatttttgaaaagatgctggaggacctggacgagaaggatatccacagcgttgccgccgtcaacaccggccttggcggcaacaaagaggttctgaaaaagaaatactaccaccttatcattctggtcaaaaaccagatcggtctgaaaaacctgtaccgcatcgtcagtgcggcacacacccagtatttcttcaaaaaaccccgtgtgccccgcagcctgctcaacaaataccgggaaggcctgctgctcagctctgcctgtgaagcgggtgagctttacagagcggtagtggccggcaaaagccatgaggaacttctcaaaatcgccgactactacgatttcctggaagttcagcccttgggcaacaacgaattcatggtccgcaacggccaggtggattccattgaaaaggtgatggagttcaaccgtaccatcatccagctgggcgaggaactgcacaaacccgtggtagccacgggcgacgtacacttccaggaaccggaggacgccatctaccgtgcggttttgcaggcaggcaacggcttcaaggacgccgaccatcaggcaccgctgtactaccgtaccacccccgatatgctggatgccttcggttacctgcccaaggaaaaagcctacgagatcgtggtcaaaaaccccaacaagatcgcagccaccatcgacggcaatctccgcgccattcccaagggaacctatccgccttccattgagggcgccgaggaccagctgcgtgaagctacctggaaacacgctacccgggattacggcacgcccgtccccgagatcatgcgcctgcgcctgaaaaaggaactggattccatctgcggccacggctacgcggttctgtacgtcattgcggtcaagctggtggccttctccaacgcgggcggctaccaggtgggcagccgtggttccgtcggttcgtcggctgtggcacacttctccggtatttcggaagtcaacagcatgccgccccattacctctgccccgagtgcaaacacagtgaatggatcaccgacggcagcattgcggacggcttcgacctgcccgacaagacctgcccggtctgcgggcatcccatgatcgtggacggccacgacatccccttcgaaaccttcctgggcttctacggcgacaaggagccggatatcgacctgaacttctcgggtgaatatcagtccaacgtccaccgctataccgaggaactgttcggcaaggaaaacgtctttaaggcgggtaccgtttccggtctgcaggacaagaccgcttacggctatgtcaagaagtatctggaggagcgcggccgcaccgtcaaccgtgccgaagaaaaccgcctgtgcatcggctgtaccggcgtcaagcgcaccaccggccagcaccccggcggcatggtcgtcgtcccggacaccttcgacatttatgatttctgcgccattcagcaccctgccgacgacgtcaagggcggcctgctgaccacccacttcgaatttaagtacctgcacgacaccctgctcaaactggacgagctgggccacgatgttcccactttctacaaatactttgaggagtattccggcatccctattgattcggtgcccatgaacgaccccaaagtcatcagcctgctgacttccaccgaggctctgggcgtcaagccggagcagatcggcagtcagacgggtacctttggtatcccggaaatgggtaccaacttcgtccgcggcatgctgctggaagctcagcccaagagcttctccgacctgatccagatttcgggcctgtcccacggcaccgacgtctggaccaacaacgccgacgagctcatccgcaacaagacctgcaccatttcggaggttatcggctgtcgtgacagcatcatgctgtacttgctgcgcaagggcctggagcccaagatggcctttgacatcatggaggccgtgcgtaagggcaaggtggcaaagggcggcttccagcccggctgggaggaggccatgcgggagcatgacgtccccgactggtatatcgagtcctgccgcaagatcaagtatatgttccccaaggcccacgccgtcgcctacctgatggcggccatccgtctgatgtggttcaaggtgtaccatccgccggtgttctatgcggtgtattttaccgtccgcggcgaggacatcgactacgaggctgccatcggcggcatccgtgtggcccaggatcacatccgcgagatcaaccagcgcctgaaagaggaaaagaacgccaaggacgaggacatgctggtcagcctgcagctggtcaacgaaatgctccagcgcggctatcggttcctgcccattgagctgggcaagagctatgccagcaagtatatcgtcgagaatgacatggtgcgcctgccgttcactgcgctgaaaggtgtgggcgagaccgccgccattgccctggaaaaggcgaccatcaacggccagcagtatatctccatcgaggaactgcagcaggccagcggcgtatccggctccatcatggaaaaactgcgcgatgtaggcgcactgggtgacctgcccgataccagtcaggtcagtttcttcaatatgtgacacagcaaaggagactgcatgatccgatccaagtggcctttttactgtctgatggcgtcgccttatctgtttgtggcggcgtcggttgtggtgtatctggcagccggcggcctgtcgggcgatggcctggcaggcgtctgcctggttgtcgttctgcttctggcgggggtctgcgtgccgtgtacggcccacgccctgcgcctgtccgcaggggagggagacggccgggaactgctgcgctgggtgcgccgtgtcaagttcagtatgatcccgttttatctgctgctctttttgagcacgatcctgctggctgttacgctggtggggctgcttttggtgccggtgctgctggcgatgggatatgtggtgatgtttccgtcctccatgtatgcgctggcggcactcaaactgatgcgccgtcagggcttgctggacacccgcagctaccgcacccatgcgataatgcaatttgttttggcggcagatgtgatcagtacggcggacctgcatgaatttctgaaaaattcccaaaataatttgcagtgacaagagagaaaaaacgcaggaaaaagccttttgtcatgcgatttttcaaacaaaaagagacgtgctttcgacgcttttttcaaacctcaaaaaaacttcaaaaaaaatagaaaaaagggttgacatttccaggtaaatgcgataaaataacacacgtcgcccggagagagctgacaacgctaaactctccatcatgcggccgtagctcatctggtagagcgccaccttgccaaggtggaggtagcgagttcgagcctcgtcggccgctccatttgggagtttagctcagctgggagagcatctgccttacaagcagagggtcagcggttcgagcccgttaactcccaccaatgtggcccggtagttcagttggttagaacgctagcctgtcacgctagaggtcgtcagttcgagcctgattcgggtcgccatttgcctctgtagctcagttggtagagcaggggactgaaaatccccgtgtcattggttcgattccgatcggaggcaccaaacccacgtacccttgggtcaaagggtacaatatgcggccgtagctcatctggtagagcgccaccttgccaaggtggaggtagcgagttcgagcctcgtcggccgctccagaacaaacagtgaaataccggcttccaagccggtttttcactaattatggtgacgtggccaagtggtaaggcaagggtctgcaaaaccctcattcaccagttcaaatctggtcgtcacctccaaaagtcggttgacattttgtcagccgatttttttgttgtatctgttgtatcgctgcggtcatagaacctaagccccgccatacaccatgcgcaggctttcatgtaccgacaatttgggggattgtcgaaaggccccaaggactgaaagctgccggataatttttatccggaaatccgcaggggacccaaacagtctgaaaccattgcaacagaaaagcgcccggcgaaacctcgccgggcgctttttcttatgattcttttgtataatactgtgcctgagcctgccacagctgatgatatagcccagcctcgtcagcaaccagcgtttcatggctgccggtctggacgatggcgccatggtcaaataccgcgatctcatcacagaatttgcaggaggaaagccggtggctgatgtagatggccgtcttgtccccggcaatggcgtcgaatttggagtagatatccgcctccgcaatggggtccagggcggcggtgggttcatccagcacgatgaagggggcgtccttgtacagcgcccgggcaatggcgattttctgggcctcaccgccggagatctccacgccgtccttgtccagtttcttgtacaggaaggtatccagcccctttggcatggttttaagccgcgggccgaacccggcatcccgtaggcatcgttccacccggtcacggtcacaggcggcggagcctgccacgttttcgtccaaaggcagggaaagcaggcggaagtcctggaacaccaccgagaacagggcgatgtagtcccggtaccggtacttgcggatgtcgatgccgttaaggaggatggtcccttcggtgggatcatacaggcggcagagcagcttgataaaggtggtcttgccgctgccgttggggccaaccacagcaaggcggctgccgatgcggaacttgacgttgacatggcgcagcgcccagaaatcgcttccgggatagcggaaggatacgtcccggaactccacctggtaattgcggtcggcgcgcttttcggtggtcaggctgccctgatacatgtgattgggcagatcgagaaattgaaaggtaagttccagaaactctccgttggcgcggatgttccccagcgttttcagcagcagggtcatgccgccgaacagctgggtggcagagcctacataccgggtgacggaacctacatcaaaggctccgccccaggatttcagacagacaaacagatatacaaagcaggtgagcagggcggagatggcctgggacaatccggccagcagccccatttttccgcgcggcagccgggccagaggaccggacctagcataatgggcttcaaaatcatccatataatgccggcagaccttttcctgctggcaatagatcctcaaatctgctgcccgtttgtcgttcagcgccatgacaccgtaaaagttggcgtagcggttggcttcccggcacatggcggcgcgctggatcatcatcatggcggatttgctactgcacatcgaggaaatcaggactgccgccaccatggtgcccagcaccagcagcatggacaggggattgttcaggaaggccatggggctgtctgccggtacgtcggtgagaaacagggtcagcgtaaatccgataccgcccaaaatctgcaccacagccttgcataggtccggaaaatagcggagggattcggaaaatccaagcccccgccaggtgtcgttctggcgaatctgggcatacaggtcgtaaagctcctgacgatcgatctcggcataatccaaagtggtgatcttgtcggccaggggcttgaaccgttccgtggccacacgtccctgctcaaagccgttccattgacggagcgcaccacccaacagtgccagcaacgccgtgacaacgacggtcaagacggcccagaacaaaagccgctgcgggtcacggccgccggccagctcactgatgatctgcgccgagagaatcagggtcacatagggcgtcagcgcggtgcagaccgagctgaacagggaagagacaaaataaccggggacctgttccatccacagcttccagcagcgcagattcagctgccaggcgcggacgaacctgcaggtggttttctcgcctccggcattagaagtcttgcttgccattttcgctgcctccctcctgatagtatttgctctgtaccgcaaacagatgagcatatccgccgccagcagccatcagactgtcgtgagtgccctgctcggtgatgcgtccctgctccatgaacaggatgcggtcacaaaagcgggtggaagccagccggtgactgatgaacagggcggtgcgcccggcggtcatctgattgtatttttgatagatgtcgtcctcggcaatggggtccagggcggcggtaggctcgtccagcgccagaatggggccgtttttatacagagctcttgccagcatcagacgctgggtctgcccgccggaaagctctatgccgtcctcgtagacctcgcgccccagccgggtgtccagtccctgggacaggccacgcacggtctcggaaagccctgcctggtccaaacactgccacacccgcccggtatcgatgccctccacccgctgcgccacattttctgcaacgctggcttccaacagggaaaagtcctgaaataccgccgagaacagcgcgtagtaatcccgccggtcatactggcggatgtcctgaccattcaaaagcacccggccttcggttgggtcaagaaaaccgcaggccagccgcaccagtgtcgtcttgcctgcaccgttcagccctacaatggccagcttttctccggcgtggatggtcaggcagatgtcatgtaaagtgtccttttccgcttccgggtagcggtagcagacatggtcgaagcaaagctcacaggccatgtccggcgtgcaggcaagcggtttgccgccttcaaagcggaacggctccggccagtccagcatctcccgcaaaatggagatctccagcgaatgccggtgcagttcgctccctttggtcagaatatccgacacccattgggtaaagccgctgacggcggaaaagtagagcagaaactgggaggccggcagcccttccgacaatgccagccagatcaggtaggcataggcaataccgtcccgggcaaaggtcagaaacagatcggccacatcgatccagaggtaatgcagctgccgctggcggagataatcctgatacagccgcagtacccttgcccacacctcgtccagccagggcttgagaccgaaaatgcggatgtccttggcgtaggagcggtcagcggaaatctgctgcagataccatagctgcccctggtatttttcctcttcgctgcgatgatcatagacccaccggttgacccggcggctgaaaaggtatcctgtcacggtggtaaccaccaccacgaccagaagcaggggatgcagcccggataaaagggccagataaacagcaaaaccgatcaggctggtaagcaggtcggaaagggtattccagatcgcctcagtcgcggaggcggggctctggcaggtcatgagggaccgttccacgcggttgttgaattcggtgtccagaacattgacaaaggaggtcccggccatcttatcggaaattttggtgatcaggatcaggcggagatcctcgcggccgatgctgacgttttccgccagataggctttcagtccgtacaggacgaacaacacggcaccgaagaacaggatcatagtcaccagtgcagacagggaggtatggagctccacctgatggagcacggcagggacgatgagcatctgtgccacggcgctgcccgccgtgaccactgccgtggcaatgcagagaagcggcacgcttttgtaatagcgccgggccacactcagcatatagcccacgttttgcagcgtgctgtatttttgcgtttgggtttgcttcatggttgtgttcacctcttgtccctaccataccataacaaaaaatccccggcatattccggggacgaattgttggatccgggggacgaactgcaaaaaatcatacctgaggaatcaggatttcggtggtgaaagcgccgtcctcgctgttgcggctgaggtagccgtccagacggtcgatgatgttgtcgatgcgcaccagcccgaacccgtgcccggctccctttgtggtggcaaaccggcggccgacttttttctgtttgcctgcggcggtgaaattggtaaagctgatgtacagctgagtgcctttcatgtccatgtagacgcggatcatccgctgctcctccggcagggcaaggctggcctcgatggcattgtcaaacaggtttcccagaatgacgcacagatcaagttccgacatgcgcagcttgacaggaatgtgagcgtccgcctgcacggcaatgtgccgggatttggccagagaaattttgctgttcaggatagcatctgccatggcgttgccggtcttgatgacggtgtctaccgtgttcaggtcggtgtccagctcatccagataggcctggatgccggccaggtcaccgctggcggccagagccttcatcacctgaatgtgattgcggtaatcgtgccgccagccgcggatctgccggtacatgttctccacttcctggtagtgggtgtcaatgagttcccgctggtaggcggccagctcccggtcgatgcgccttgaaaagaaacccattccattcaccccctgttgatgatggcgcggttgatgcggtcgtaggcgccccggggcagagggagcacgctgccgtcattcaaggtgactgccgttttggttacccttgccacatatcccagattgaccagcgccgaacgtcccagacggaaaaaactgtcatccaggcgggtctccaactcgctcagcgtcatttttgcggtgtagtcggattttgcatggacggtcacataattgccctggacctcggcataccggatttgatagaccggcaggcgcaccgtctcaccggacagctccagcgtcaggacttgctcgttgcggcacagcttgtcggcggcgcggtccagtacgctgaacagcttgttttcgtccaccggcttcatcagataatgcagggcctccacctcatagccgtcggcaatgtagtcggagtacccggtgataaagacgatctgcaccccgtcattgtcttttcgcagcgtgcgcgccatggtgacgccgtccatctgccccatctcaatatccagcaagaggatctgcaccgtcttgtcctcggcgtaggcgaacagaaaactttcggcagacgggtacagcgccagctgcaccgtatgcagatgccgcccggcccagcggcgggccagtccggccaggtagtcccggtcggtagccgaatcatcacaaatggcaatacggagattcatacagattcctttcaaggcgggatgttttgcacatcaaacggcggatgcgcatttgtgccttattatacgcccacggggcgggagcatcaagggcaaggggagaagatgagcgctgacggcgggaaatggaagatttcaaccttgcaacagatcctccgggattccgatgccggcaatggtcaactgcccggcgtacagcttgccctggccggtgagcaggccgggcttggcgcagctgaaggtcacggtctcgtccgcctgtaccgcaatgcccaaaacatcccccgtatcgccgtgaatgcccgagggaatgtcacaggccaccaccggcaccccggcggcatgggcggcgtttatggctgcgatggcctgggcaaaggctccgcccacgggacggtccagccccacaccgaacagcgcatccacgatgcaggaggtgccggaatcaatggaactgccgtcgtaaggcgttacagtgccgcccaaggccagcagcttttcctgctctgcgcgggcatcggcggtcattttttcgggattgcccacaaagcacacccgggcctgtacgcctctttccagcagctgccaggcacaggcaaaaccgtcgccgccattattgcccgggccgcagaaaaccaggaccgggccgctgcgcccggcttcggcccggcgggagagcacagcatgggtcacatgccctgcggcggcctccatcagctgcagggagggaatgccccgctcctgaatggcaatacggtccatctctttcatttcccgtgtggttttgacgatcataaggaaccttctttctgtgcggttttggcaaaccttgcttttgtacgccgtgcgctttctgcgggatgacataggaaaacaaagacgcaaagctataattataagccggtgtctgccgcgtgatggggccttgcgttctacaaaggattgtttcggtcctctgtcctacatctgccgcattgcagcggtttggcgatgttttgcagaacctccgctttcttatatcacttgcgtaatggcaatgttcttgccattacggcagcatggctgcgcggcgatacggccaatcttttctccagtataacacaaccggccccggctgtccccggtttccgtccgaacacaagaaaaccgggacatcagcctgatgcagccgatgtcccggttgtttctgttttttgctgtaaccctgtaaatgagtgcgcagtcagacggggttactcgctctggcccagcacgatgctctgtaccgcttccaccaggtccatggcgtcggaacggttgacgagagacacactctcaccatccaccgaggccaggcagagggaaccgtcatagcgggtgatctggatggtgacggtggggaagtcctcgttgtccagatgcagcgtcaggctgatctcttcctggccggtagccgcggtgctggtaaagctgtctgccgtcaggttttccagggcggtggtgaaatcggtcaggtcgatctcactgccgttgtaggagtagacgcgctcgtcgtcctcgagagcagaggtgatggtatggctttcgccctccagggtgatgtcgatctgggtcacgtcctcaaagtcgccccagaatacctgctgatggcgcagagagtcgtaggaggcatccatcagggtggtaaagtcgtctccggagagcttgtagatgatctgggattcacccacccgcagataagcggtgatgtcggaggtatcgtccgtttcctcgtcctcgctgtcggcggtctcgagggtggcgcggtcatccggagcccgggcaatgcttaccaccacggtgtcggaaacttcctcatcctcgtcgttggtgtagctgtaatccaccgtcacggtcagttcgggatcgttcatgccgtattcttccagctcgtcggcggtggcattgtaggtcacatattcggagagatctacgttggacaggctggacaggtaggactccaacaggctggaatccagcggtttgccctgctggttgaagtagacgtcatcggcggagtagctcttgccgctgttctcctcataagtgacggtgtagttctcggaaccggcaaaggtaatgtgggaaacatcgtcaaaggaggggatctcatcgtccagaatcaggtcgctcaactccacgtcaaaggagtccatggggtcggtggacacgagatagacgttgccgtcaccgatgtccacgtaccgctgttcgtccatctggctgaaatcgcccagcttgatttcgtagctttgctcggcggtggcgatgctgatggtgcattcgggagagtccagtccgtactgggcgtagtcctccacattttcaatgatgaaggcgaccccgaactcctcaaattgggagagcatctcctcaattttttcgtcgtccaccgggaaagcctcgtccgtgtcgtacagccaggactcgtccttgtggaaggccagggattcgtcaccaatggtccaggacaaggaggtgacatcctcggtgggaatttccagaataacctcgtcgctgtttgcaatttcttctttgtactcttcgtagcggcttacggcaaaggtggcaatgcaggccaccgccagaaccgccagcaggatcacaatgcgcttataccgtttcattctgcaccttccttttcgtcaggatgaccgcgatgccgatggccaggtatgccagcgggaatacgccgatcatcaggcccttgagcaccgacgaggtcgagtcgctgatggtcaggtagttgtagttgagggatttggagcggatggcaatggcttcgcgctcaccaaccagccaggacagggagttcatggcaaggtccacgttggcgccggaggagtaggcgttgtacatgtcgtccaggaagttggaggaactgaaccaaacgatttgtccgccgctggtgtcctcgatggtcaccgccacggcaaagggaccgtcaacgtcgccttcttccttttcataggtggtcaggctgtatccggctactttgctgaacgcggaatccgaggtggtcatcagggcggtcacggtggcaccgttggaggaaccgaccgtcaaaccctgggaaatgggcatcagcacatagtagttttcttccatcagagagtcggtgatgtcgctgcttgccagatccggcatcagcacgtaaggcatgccgaaggcgtagtgctcgcggtcctcatccaccacaatgccgtcggcggtggtaacgccgtaggtctccagcaggctgtacaggttggtcagggtgccgttttcggtggggcctgcgctgaccatcagcttgccgccgttggcaacgtaatcctccagcatggtcacttcctcctccgaaagatcggtggagggcgcataaatcaggatgcagtcggcctcctcggggatttcatccacggtcaggagggagagggtgttgatctcgtagttttccttttccagctgatcggagaaggtggaggggaggtcagcttcgccgtggccttccagcacatacagctggggcaggtcctcggtggtcacatagtcgatggccgaggtgatggcgccctcaccgtcaaaggaggtggtgtagctgtaggagtagacgttggtctcagtcaggtaaatgtcgttgtagctgatgtagcgataccggtcgccgcattccaccaccaggctgttgttggggacgtcctcgtcggtgtactgctcggcaaaggtggggtagacgtcgggattgcgcttgaccaccgaaatgtggtcagacaggctttcatacttgcccagcaggttctcaatgacgtcatcttcctcgccggcctgcacgatccagtagatcgtcacgtcatcctgcaaggcattcaccaccactttggtgttgctggtgatggagtacagtttggtggagctgatatcgtatttggtcagagtggtgggcagagcagagacaaacaggtttgccacgatcagcagcgccagcaccactgcggagatcaccagagaataggagccgcccatcagggctacctggctgcgcaccggggcggaagttttgggcttttttgtgaatttcatcagttatacctccgcttttccagagactgcaccgacaggaacaggaagaacacagccaccgagagatagtacacaacggccgtcaagtcaaacacgccgttgacaaacacatcaagacgttcaaacagagacagcgcggtcatgatctccggcagcagtccctcaaagatcgtgctgtctacccaataggtgatgacgactactgccatcagtcccagtcctacgatacaggccagatcgtcgtttcgtgttaagtaatgaatcagcaggcccagcccggcggccagaacaaacagggcaacggccgagccgatggcggtggaggagacatactccgacagcgtcacgctgaaatagttcagcaggatggcggccacgccgatgccggcggcaaagccctggttctcgctcagggacgaaataaagaggccgagagcaatgagcgccgcgcccatcaggaagaacgcgaccagagaaccataggaggtgggcaggtacacttcaccgaactgggcaaagatgacgggataaatggcaatgacgcacagggggatcacaaagaccagcaaaagagccgcatatttgcccatgatgacctggaaggtggagatgggcagggagtaaagcagctgatcggttttctggcggcgttcctcggcaatgacgcgcatggtcaggatgggaacgatcaccgcataaatgatgctgctgaaactcagtacatactcaaaattgctcacggcagcctgcaggttgtacagcattgcgccgatgcccacaatgaccagcagaaatgcgccgaacacgtaggcagtcagagactggaagtacatccgcagttcatgcttgaatacagcgaccatgattacgcctccttctgcccggcgggcttttcattggtactggattccgtcagttcgataaagacatcttccagcgtgcctttcttcagggccatttccaggatcaccttgtcgctggcggtaaatgccagataaatggcgcgggacagctcatagatatcgctgcggtcggtgctgatgtgcgccaccgtccatttgcccggcgtgtcctccaccgtaagttgagaaatggcggggacctttgccagaatgtgacgcagttcatcgggagcggcatcggtggtcaggcgggtctcgttgggggccagcagtttcttctccagattggccggagtgtcaaaggcgaccagcttgcctttggagatcatgaggatctggtcacagatggtctgtacctcggacaggatgtgggaactgaaaatgacggtgtggttctggcccagttctttgataaggtcgcggatctcgatgatctgcagggggtccagaccgacggtgggctcgtccaggatgatgacccggggattgcccagcagtgcctgcgcaatgcctacgcgctggcggtagcctttggacaggttggaaatgcggcggtttttcacgccggagatgccggttttctggatgacttcctcgatctggcggttcagctcctcgtggcggaggcctttggcctcacccacaaagtgcaggtattccaggggagaatcgttcagatacagcggcggatgctccggcaggtagccgatcaggcgcttggcctggtcaggttcgtcaaaaatatcgtggccgtcgatgcggacatggcccgacgtggcggaaagacatccggtcatgatgttcatggtggtggattttccggcgccgttcgggcccagaaagccgtatacgtgtccctcgtcaatctcaaaggagatatcgtctactgccagaaaattcccgtaatatttagtcagatgctcaacggatatcatcgtacgcctccttgtgcagagtctttttcatggaaatccatcctttctgatgtgatgcggaacacagccgtcggcaggcccggcgggctgtccaagggaaagtatagaggggaaaaatcaacttccggtcaagttttcggtgcagagacgaaggtttctaagaaatttcaccattttcataccgcttcgtcgcaggttgacggtactatatgggtaaagattggatagaaggagcaaacggttatgtttcggatcctggtagccgaggacgacaaaggcacccgccgcctgatgcaggacacactggccgatgccggctatgagcccatgctggcagccgacggtcaggaggcccttgatcttttgatgcagaaacacgtggacttgatgatcctggatgtgatgatgcccaaactggacggtttttcgctgctgtcgaatctcagacactcgggcagtcagctgccggtcctggtgctgactgccaaggaggcaatggccgataaaaagcagggccttcgcctgggggcagacgactatatgacaaagcctgccgatgaggaggaacttcttcttcgcatcggcgctctgctgcgccgggcccaggccatcagttcacggcgcctgacggtgggcggcaccactctggtgtatgacagcttgtcggtggagtgcggcggcagcgtcaccgagctgccccgcaaggagtttcagcttttgtataagctgctttcctgcccggacaagacctacacccgccgtcagctcatggacgagatctgggacttggggagcgacagcgacgagcataccgtcaatgtacatatcaaccgcctgcgggaccggctaaaagaaaaccgggactttgccatcgtcacggtgcggggactgggatataaggcggtgcggctgtgaggcggcatctgaccggcacgacccggtggggctttgttgcctgtgtggctgtcagcaatctgctggcagggttggtatcggtgtttgtctggatgccgctggccgaccggatactgccggcggagcataccatggcgccgtggattcccatgctgctctctaccttgctggcactgcccatcgcatcgtttgtgagccgccgttccgcaaaacccattcaggacatgctggaagccaccaagtccatctcccggggcgattatagcgtccgtgtggaggagggcggttccggtgatgttgcggaacttctgcgcagttttaaccgcatgaccgccgagcttggcagcaccgaaatgatgcgcaacgattttatcaataccttctcccacgaattcaagacaccaattgtgtccatccggggctttgcccgccgcctgcgcaaaggcggcctgacggagacccagcaaaatgaatatctggactttattgcggaggagtcggagcggctttcccatctggccagcaacgtccttttgatttcccgctatgagacgcagaaactggtgggggagcagaccgactatgacctggatgagcagatccgcaccagtgtgctgagattggaaagccagtggtcgccccggcacctgatttttgagctggacctgccccgcctgccataccgcaacaacagcgagatgatggaacatgtgtggatgaacctcatcggcaatgccatcaaatttagtcccgacggcggcgtgattttcattgcgggcaaaatggaggattcctgcatcaccatttccatccgggacgaggggccgggtatccgcccggaagaactggggcacatctttgataagttctatcaaggggactcatcccgggctgccgcaggaaacggccttggcctcgccctggcgcaccgtattgttgagctgtgcggcggcaagatccgtgtggaaagcacggtgggggagggcagtaccttttacctcacactgcctgctgacggtcagacatcaaagaattcgggacaaggctcttgacataaggcgggaaaatccgtcttttgcaggcttgacaaatactttcgcgcgaactatactgaacgatgttcagattgaggtggcacaatgaataccgtagtgacttcaaaagaagatattctgaaagccagcagggaactggtctgccggcagggctggtctgcgctcagcattcgttctgtcgcggcggcctgcggcgtagcggtagggtcgatctataactattttgattccaagtcggctttggccggggcggtggtggagagcatctggtgcgagattttccaccgtcccgaggacgccgctgtgtttcaggacacccaggcctgcattgtctggatgtatcagcggatggaatacggctgccgtgcctatccgggcttttttaccctgcactctttgggctttctgcaggaggaaaaatcggacggcaagcgccggatgcagcagacctggcagcatatcctggacggtctgtgcctggtcctgaagcaggatgccagaatccgccccgacgccttcacgcctgactttacggcagaaaaatttgccgatgtcctgttttcactcatgctgtccgcactgatgcgtcaggattacgacccttccgccgtgctggagatcgtccgccgcacactctactgaaatacccgcgcagcctgcgcttgcgcgggatgttttatccatcaaaatgaacgatgttcacaaaaggagggaatccatgaaagtaaaacgcaataccttgctgcttcttgcctgcctggtctggagtgcagcgggcttcaatatcctgcgcatcggcctggtaagctacccggcatacctttcagcactcaatctgctgctgtcggttctggtctttgtcatgttccagcgctttgtgttcggaaaactggtgaaaaagcatactgccagaattcattcttatcaggaagaacgtcatttctttttgaagttttttgatggcaaagcatttgccattatggcagtcatgatgtccggcgggatcgcgctgcgtgtcagcggtatcgcgcccgagcggttcattacagtgttttattccggtctgggcgcgtctctgctgctggccggtgtattgtttggtcgtaactacggcaaagcggttctggccgccggtcaaaatcaaacggaacagaaaggaaaatgaatgatgcaggcaattatggaaactttatttgacgcagtttatcttgtctcggtcattaccatcggtgtgttgatgatccggggcagcaagggcaatctgcagtaccggctgttcggctggatggccgtggtcttgggagcaggcgacgcatttcacctggtcccccgggcggtagcactctgcaccacggggctggaaaactataccgttgccctgggcctgggaaaatggatcacttccgtcaccatgacgattttctatgtgcttctttactatgtatggcgccgccgttatggagtcaggggacagcagggccttaccgctgcggtatatctgctggccggcctgcggatcttcctttgcatgatgccgcaaaaccggtggctcagtgccgatgcgccgctctcgtggggaatctatcgcaacattccctttgcacttctgggccttatgatcatcgtgctgttttaccgcagcgcaaaacagcatggggataaggcgtttcgctggatgtggctgaccattgtactgagcttcgggttttatatcccggtggtcctgtgggcggatgctgtgcctatgatcggaatgctcatgatccccaaaacctgtgcctatgtctggacggtactgatcgggtacacggcaatgaaacacagtgccggaaataagtaaccatcagaacagctttccggtaagagactacccccaaggtgggacggatgcagtccggaatcatccgtaaagaatcagctcgaaaagacgtgtaaagatggtctgctttacatgctcgcttgagcaaaatgaaagattacgttaaaatggaatctccgcctgcatagggaaatgccgtatgcagacggagactttttattctgttttatggaaacaagaaaaaagcaagatttccggctgaaccaatcccccggttctgtggtatgataagggcactgtgcggaggtgagaaaaatgaagcacggccgtgccattcatcggcgtgtatttgattatgcgtatatggacccggatacgctgcgccgggattttaatgtttccgaacaagggtataccgaagcccaggcggaggaaagccgcacccggtatgggaaaaacagcctgtcggggcgtgcatcggatacggtgctttatcgcctgagacgcgcgttcatcaatcccttcacggtgatcctgtttgtgctggcaatgatctcctttatgacggatgttgtgctggcctccaatttcagccgcaacattaccacggctgctatcattctggggatgctgcttaccagcggcatcgtccgttttgtgcaggaactccgggcaaaacgcattgcggatcatcttacggagatggtttcttccgccgtgctggtacgcagggagggaagctggcagagagtttcctcggaggatcttgtggtcggggaccgtgtccgcctgtcagccggagaccgtgtcccggcagacatccggctgactgctgcaaaggatctgttcgtctcgcagtccgtcctcacgggggaaagcgccatcgtggaaaaggatgccgggaccatttcttttggacaggcgcggtcttactccgaatacaacaacctggttttcatgggctcgtcggtcatcggcggcagcggcgagggtattgtgcttgccgtcggcaaagacacggtctatggcggatttgcagcggcagagccccatctgaaaaacgggtttgaccagggggcgaactccattgcacgggtgctgattcgctttatggcggttctgatcccggtcgtttttattgcctgcggactgacaaaaggaaactggggctccgcgtttttgtttgccctttccgtggcggtagggctgacgccggaaatgctgcccatggtcatcaatgcctgcctggctaagggaagcgcggccatggggaaaaagcagaccgtagtcaaaaatatcaacgccatgcagggattcggcagtatggacatcttgtgcgtggacaaaaccggcacactgaccggcgatgagatctccctggaatattatatggatattctgggcaacgaaagccaaaaggcgctggacctggcctatctgaacagcctttaccataccagcgtgcagaatcatctggatgatgccattctgaaataccgggaaatgccggggtacggggatcactatcgggaactggaaaatcagcatcccaagctggatgaactgccttttgaccacgaaagaaaaattgccagtgtccttgtgaaaagcgggacagagaatcttctcattgtcaaaggcagcattgacgaagtatgccggagatgcagctgcattgagtataagggcgagcgccgcagcatggacccgggcgacggggccagcatccatggcgtcgtggatgaaatgctggaagacggcatgaaagtccttgccgtggcgtacaaacccatccgtcaggaaacggtatcccgtcaggatgagcggcaacttattctggtaggatacctggcattttttgacgcgcccaaacaaagcgcagccgcggccattgaaaagctgaaacaactgcacgtgggtgtgcgcgtactgacgggggataaccgggatgtggcggtctccatctgccgcaggctggggagcgacaccggaaagactctgaccggcggagacctggagcggctcaccgatgacgaacttcctttcaagatagaacatgttacggtgttttcggagctttcgcccagacagaaggtccagattgtgcagaccctccaggcaaacggtcatacggtgggatttctgggagatggcatgaacgatctgcccgccattgtggaatcggatgtgggaatatccgtagacacggcggcggaagcggtcaaagaaagcgccgatgtcgtgctgctgaaaaaggacctgaacgtattggaagagggaatcaaggaaggacggaaagcctttgccaatgtatcgaaatatatcaagatcacggcttcctccaatttcggcaatattttctccattgtgattgccagcgtgttcctgccctttttccccatgacgtccctgcagattttgctgctgaatcttttgtacgatattttgtgccttgcccttccgtgggaccatgtggatgaatcggcctgcgccagaccgttggagtggtccggcaggaccttggggcgttttatgcgcttttttgggccgatcagttcggtttttgatatcctcacatttgcctatctgttttttgttctgtgccccgcggtctgcggcggaaattttgcttcgctgacaggggctgcgcaggcacattttgtgatggtatttcagaccggatggtttttggagtccatgtggacgcagattctgattctgcatcttctgcgcacacagaatgtccctctgctgcaaagcagaccgtcccggccggtcatgctggttacgctgttggggacgctgttatttaccgttttgaccttcacctctttgggaaggctgattggcctgaccgcgttgccgccagtctattttgcctatttggcggttgccgttttgctgtatctgctgtgggtgtccatggccaagcgatggtatgtccgcaagtatcgtgaactgctctgagaaaggaggaatctgcaatgaaaaagcatgttggttttatctctttggattcctctttcgctcaatggctttgggaagccctgggcacttcggcgccgcacacccaggctgcgcaggaactgcgggaaggcctgcacgatttgatggatggcagcatgggatcgcttatgctggaactgggcgaagatcagccgctgaccacagcaggggataccctctgctgcggcgcactttccattgacttgagactgcgcagggtatgccgtgacggaacggacatttccttgacgcccaaagaatttgatatcctgtattttttggcccgtaaccgcggcgaagtgtttaccaaagagcagatctaccaggccgtatgggagaacgactacctgcttgatgacagcaatattatggcattcatccggaagctgcgcaaaaagatagaaccgaacccggattcgccggaatacatcctgacgatctggggtatcgggtataaattcaacgataaactgtaatctctaattcttacgaaatcgcaagaaaatcgcaaggtttcgaccatgtgatctttcttgcgatttttttatactgactgaggtcagagaaaaacagaaggttcgggaggtgaatggcatggactctgacggcagtcccccaaaggttgatgcagtccgcgggtcatggagggccatgcctccgtcggctgtattgccttgagtacattcaaggaggtaaacagcaatgaacaagaaagcagttcgtatgtcgcttcgtcaggatgcaaacaagacggtcattcgtgacgagcagaaccgccgcctggaatatgcggcgaccattccggtgaaggaagttttgcaatatctgcacaccacgctgtgcgggcttgacgcggaagcggtatccaccagccgggtgcagcatggcagcaacaaggtgacccatgagaaaaagaaatctctggcaaggcggttggccgacgcttttgtcaatccgtttacagccattttgttctttttggcgctggtctccaccatgacggatatggtgttcccgtatttttccctgttcgggagccttcccgaggattttgactgcctgacggtggtgatcattctgaccatggtcatcatttccggcacgctccggtttgtgcaggagtcccgcagcggaaatgccgcggaaaagctgctgtctatgatcaccaccacctgttcggtgacccgcaagagtcaggaaaacaccgagatccccatggatgagctggtggtaggggacctggttcatttgtctgccggggacatgatccctgcggatgtacgaattctggaagcaaaggatctcttcgtcagccaggccggcttgaccggtgagagcgagccggtagagaaaacgccgcttctctgcgaaccgaaggagagcgtcaccgattacaccaatattgcctttatgggcagcaacgtgatttccggtagtgccactgccgtggcggtgtgcgtgggagacaacacgctgttcggttccatggcgtctgcggttgcgggcgaggcggtggaaaccagctttaccaaaggtgtgaatgccgtttcctgggtgctgatccgttttatgctggtgatggtcccgctggtgtttttcatcaacggcatcaccaaaggggattggctgagcgcgtttctgttcggcatctccattgcggtgggcctgacgcctgaaatgcttcccatgatcgtgactacctgccttgccaagggggcggtgtccatgagcaaaaaacagacgatcgtcaagaacctgaactccatccagaactttggcgcaatggacatcctctgcaccgacaaaaccgggaccctgacccaggaccaggtggttttggaatatcacctcaatgtcaatggcgaggatgacacccgggtcctgcgccacgcttacctcaacagctatttccagaccggctataagaatctgatggacctggccatcatccgcaaaaccgaggaagccgaagcggaggacagccgcctggttgatctgtcggaaaactatgttaaggtggacgagatcccctttgattttacccgccgccgcctgactacggtggtgcaggatcgcagtgggaaaacgcagatggtgaccaaaggcgcggtggaggaaatgctctccatctgtgcgtttgcggaatgtgatggtaaggtccggccgctgacggatgaagtgcgcgaccgtatcttgcagacggtcgactcgctgaatgacaagggattccgtgtcctggccattgcgcaaaaaagcaatccgtctccggtagggacctttggcgcgcaggatgaatgtgacatggtgctgatcgggtatctggccttcctggacccgcccaaagagtccacggccgatgctatcagggccttgaaagagcatggggtcaggaccaagatcctgaccggcgataacgataaggtgacccgtaccatctgcaagcaggtagggctgaaagtacggaatatgttgctgggggccgacctggaacagatgagcgacgcagagctggccaaagctgcggaatctacggatgtctttgccaagctgaccccggaccagaaagcgcgagtggtgtccgtcctgcgggaaaacggacataccgtcggattcatgggtgacggcatcaacgatgcggcagccatgaaggcggcagacatcggcatttctgtggacacggcggtagacgtggccaaggaatcggcagatattatcctgctggaaaaagacctgatggttttggagcagggcatcatcgaaggccgcaaaacctatgccaacatgatcaagtatatcaagatgacggcatcctccaactttggcaatatgttctcggtgctggccgcggcggctcttctgccgttcctgcccatgatgagcgtgcagctgatctttctcaatctgatttatgacctttcctgcacggcgatcccctgggataatgtggatgaggaatttattgcgaaaccccgcaagtgggatgcttccagcgtgggcaactttatggtatggatcggccccaccagctcgatctttgactttaccacctacctgttcatgtattttgttttctgccctttggtggtgtccaacggcgtgctgttcaatgatctgcctgcgcattttcatggcgtggagttggcggccatgcaggcaaagtatatcggactgttccaggcaggatggtttgtggagtccatgtggagccagaccctggtcattcacatgatccgcacgcccaagctgccctttcttcagagccgtgcctccgcaccgcttacgctgctcacactgaccggcattgttgtactgaccctgattccctttacaccgttgggagctgcgcttggttttgtggctctgccggttacttattttgcctatctgattccgtgcattctgctttatatggcgttggcgaccagcctgaaaaaggcttatgtgcgccactacggggaactgctttgatccatggaggtgttttctgtgaactggactgcaatttggctcaaactgtttgggactacttcgtttttgggaatcgacatgggcttttgggctgccatgggtgtgattctgttgatcgtcgttttgatgaatgccgtgttctggggaatgaagcctaaaaaacgggagaactccgattgacaaaggtttttggtcaagtttctataaaagtctgaacagctatgatataatcatcgtatcatactggtgttggagattttttgaaaggatataaaggcatggtcaaaattctttttatctgtcacggcaacatctgccgaagcccgatggcggaatatgtcatgaaaaagctggtgtcagatgcaggtctgtccgacagctatgaaatatcgtctgcggcaaccagtaccgaagaaatcggcaacccggtgtatcctccggccagacgtaagctggccgaacatggcatcacttgtggggaacattcggcccgtcagatgacccgtgccgattatgaccggtatcggtatggaccgcgaaaatatggattctatgcgccgcatctgcgggggagacccggcggggaaactgcacctgctgatggattataccgaccgcccgggaaacgtggctgatccctggtacacaagaaactttgaaaagacctggcaggatgtactgcagggctgtacggccttgctggaatatcttgaaaacaaatgatgaaaatacgccctctcggaaggactgcttccgggagggcgtatttttgtcgggggataccaaactcttttttgaaaaggagagcaaaacaaattggactgttcttccataaggtgccgtttttggccgcagagcaagggtatactcatattcaaagctgaaaaaatacggtgcgatagtcctatgacacggcatcctttacaaatctgatacgaacccgaaacatttccatgcaaaataagagacagaaaccggtccggcagcgtatatcataggtgtggggaccggaatatatggcagaaaatgtaacttgcatacctccggaggcacagattcatataccgttgggaaaggtggtggcggatattcggacagacaaactggatatggaacacattgcgctggtgattcccgcatatgaaccgggagaacccctgatccggcttttgcagcagctttgccctcagtggagcggccccattatcgttgtggatgacggcagcagtgaaaagtctgccccggttttccaacaggtggaagagatgggggccagagttttgcgccacagtgtcaatctgggaaaaggacgggcgctcaaaaccgcattcaatgcctgcctgacagagtacatgggcctgattggctgtgttacagcggacgctgatggacagcaccttccggaagacatccttcgctgtgcaaaagcactgtaccgcactccgtctgccctgattttggggtgcagggacttctcgggtacacaggtgccgtggcaaaaccgtctgggcaaccggatgacctgccttgtgatgcggttgtttgggggagtagatcttgaagatacgcagaccgggctgcgcggcatccccgccgcgttcatgcgccggttgatgcaggtggacggggaacgctatgagtttgaaaccaatatgctgctgtttgcaaagaggcaggacgttgcaatgattgaaattcccattgagacggtctatctggatcagaaccgggcatctcattttcggccgctgcgcgacggactgcgaatctacgcgctgtttcttcgattttccgccgtgtctctgttttgcgcactggttgaccttgcgcttttttcgctgtttgttgccgtgcttcgccccttggctcaagagtggtatattgctgcggcaacggtgggcgcgcgaatcctttcggcagtgacaaattatcgtctgaacagcggcctggtatttgaaaaaaggatgacccgcaaaagcggcgtgggatattttgccttgtgtgtgttgcagatggctgccagcgcagggctggtgtctctgctgttcgatgtgctgcactggccggaacttttgtgcaaagtcattgtggacggactgctgtttttcgtcagttttcagatacagaaccgctggatttttcggtgaaaggggatgatccaatgagtgcgctgctgatcctgtgcatgatcctgcctcttgcagcgggcatctgtgcagcacttgactgccgcatggaagaagcccttccgctttctttgcttgtcatgattgccgcaggatatgcggtgacactggcggggggactgtggctgaccggcggattggtatggattctttcttttgccgggggcggatttgccgtctaccggttcgccgtcaaaaaggcggttccggtgacagtcctgctgaaaggaacgggaatcttcctcttatttacggcttttttctggtggctgtgccgtggctgcgcatttacggattgggatgacttttcccattggggcaaagccgtcaaatggatgtattacaccgatacgctgtatacggcgcctgcatcgacggatgccttcaaatcctatccgcccgcgacggcgattttgcaatacatgatcctcaaggcaggcggttttccgtttcgggaggacatcgttctctatgccaatgcgctgctgacggcggcaatgctcacgctgccttttcgcgccgttcatttccgcagccgtccggtccgtgccgcggcaatggtcgctttgcttgcgcttctgccgatgctcgtctatccgtcctactttttccgggccagtgtggatggcctgctcggccttttgtcggggatgctgatcgtatcggtatttcttccggggcggacccgggcttccgactggctggaaactctggggtgtctggtgcttgcccttgtcaaatcctcgggcaccggcctggcggttttggctgctttgacggcacttcttctgcgctctgccaaagaaaaaaggctcacaggaatgttcccgttgggagcggtgctggtggcaaaatgcagctggagcctgcatctttccatcgtcggggcaagcgggaggatgcagtggccgggcggatggaccggaggccttttcagccttttgaccggacgggcagacgcctggcggtatgaggttctgcaaaaatttgccgaaaccattttccggcagggcaattacggggcagggcagtggattccgtttgcggcgatacccgctgctcttgctgtgacggcggcgattacgctgataagctgcgagacggcagaacggcgggacaggaaaaaggcgattctttttctgacaggagcagcgttggcaattacactggtgtttgctctgaccctgctgtacagttatctttatctgttcaatcaggcagaagccatgtatcttgcctcggtttaccggtatctggacacctgcacgatgcttacggcgtatacgatggtagttctgatgggcgcattttccggctgccgcaaaatgccgcttgcggtattgcctgccgcagtaccgctgatgctggcggtgctgtttccggcggatgggatgccggcgacgattctgaatgctcccatccatgcagcccagacgcaaaatgaccgcattctggctcgccatgccgcgcagcgcattcgggctctgggggaaaattccccgcggcttcagctgatcacggccaacgatgcgggtgctgcggcactgaaaattgattatgaactgctgccggtctgccttccggaacagtcgacgattttgatggcggacaacagcagcggacagcttggcgtgtgtgagatctcagcccaggagtggagcacggaactggccagacggtttgactacgtctatatttattgcccggaagatcagttcgtggcggattaccaatctgttttcgaggatgacagccagatcgctgtggaccggatgttccgggtcgtcgcacagccggacggcacggcaaaactgcgctgtatggatgaatgaggctccgacaaatcaaaatctcgtccttaggcagaaaagcggttgcaggagcaggggagagacaaacaccatatacaaaatcagaggcaccggaatggttgttccggtgcctctgattgattgtattgctttcggcattacagccggatcatatcccggctgatttcatccaggttgtgcgcaccgcacatggacatggtgtcggacaactcatcgcccagtttgtcgaccagggccttaacgcccatggctccgccgccatacacggcggtcacaaagggacgggccatcagcacggcatctgcacccatggcgagggccttaaacacatccacaccgctgcggatgccgccgtccaccagaatggcgcagcgtccggccacggcatccacgatttcaggcaggacctcagcagtagcgggggtctggtccagcacgcggccgccgtggttggagacgatgattccggcagcaccggcctgaacggctttctcggcgccgcgggcagtcatgatccctttgacgatgaacggcacttttgcgtccgcgatgatttgggcaagctcctccaccgtcttgctgccggccggcgggttcaggtttttcaaaaagggaagccccgccgcatcaatgtccatggcagcggcaaatgcaccgcagtcacggaccatgttcatcttttccccgatggtagcggcatcccacggcttcacagttgggatgccgaagccgtcggcctttttgatggcggcacaggcggcgaccataactgcagggttggtaccgtcgccggtaaaagccaggatgccgttatcgcggcaggcggaaaccagaacgtcattataagacgggtcgtcgtactttttgccatagtgcagctggacggcgcccaccggtccggcaaagaccgggatgcggaaactgtggccgaacagtttcagtgtagtgtccggagtaccgccggcacagatggtatccatgttgacgcggacatcctgccatgcgcgatagttgcggatggcaacatccccaactccttttgcgccgggacccggaagggtgttcccgcaggcccggccgtcacagacggggcaaactttgcaggggcccatctggcctctggcggactgtaatacttcctggtaggtcattttgttgtgcgcgctccttttaccgcaaatttgggcaggcacgcggtctgcaccatgtcaaacctattgtatcgcgcggctgcggcaggtgcaaggcgggaaccgaaaaaatgcggcaggggagggggcacattgcatgaaccgtgcatgtaccggaagcaaaaccaaaagagcagagagtgccgcaaaccaagaaaacggcgattcatcgtaaaagaacttgggcttgggaaacttccataaaaaatatgaataaataaaagaatatttgtgaataaagtgttgaattctcggtaaaagggactataatgagaattgcgaggagcatgtttgcccgaaaggcaagcataaaatctaataaggaggaatcattgatggttagtttttttgtctgcctggtgctgctgatcgttggctactttacatatggtaaagtagtggacaacacctttggaccagatgaccgcgaaacccccgccgtccgcattaacgacggtgtagattacgtggttcttccccaatggaagctgtttctgatccagctgctcaacattgccggactgggcccgattttcggtgccatgcagggtgcgctgtgggggccggtggtgttcctttggatcactttcggcaccatttttgcaggcggtgtgcatgactacttctccggtatgatgagcgagcgtgaggatggtgcttccgtcgccgagatcaccggtacttaccttggcaacaccatgaagaacatcatgcgtgttttctcggtcgtgctgctgatcatggtaggcaccgtgtttgcggtgggacctgccggtctgatcgtcacgctgttcaaaaatgccggtatgtcgggcgttgtcaccaccacgctgttctggctgatcattatcctggtctattactttatcgcaacctttattcccattgacgcggtgatcggcaaggtctatccgctgttcggcttctgcctgctggccatggctgtgggcgttgcgttcggcgtcgtcaccaaccccaattacgtcatccctgaaatctgggatcatctgtacaatatgcatccttccggaactcccatctggagcttcatgttcattacggtcgcatgcggcgcgatctccggtttccactccacccagtctccgctgatggctcgctgcatgaagagcgagaaacagggacactttgtgttctatggcgccatggtctgtgagggcgttatcgctctgatctgggcggcggccggctgttccatctacgaagtcactggcggcctgaacaccgggctctctgagatcctggccgacggtcagtccgcggccatctatgatgtctgcgtcaagaccatgggcagtgtcggcgtcgtgctggccatgctgggtgtcattgcctgccccatcacctccggcgatacggccttccgttcggctcgtctgaccctggccgactggctgaaaatggatcagaaccactggactaaccgtctcaagctctgcatcccggttctgggcgtcggctccatcctgggcatcggcaacgcgctgggcgtcatcgactacacggtgatctggcgctacttcagctggaccaaccagacgctggccatgatcgttctgtgggcggcttccatgtacctcttccgcaacaagaagaactactggatcactgcagtgcccgccactttcatgacggcagtttccatcacctacttctgcatggcgccggaatgcctgggtgcgttcggtatcggtgcggtggttgcgtatcccgccggtatcgttgtggcgatcctgttcctgggactgttcctgcgcgccaccaaaaagcctgctcctgccgcgggcaagtgattctggggtaaacccatacagacacactgatttttcgtagtctgcacggggccgttgcaatgcagcggcccctgtgctgattctgggacagggatgccggctctttgcatggtatcccattccatcgggaggaaaccggaaatgtatctcaaacccaaatgcctgagcaacgcaagcctcgaggcagaaacgctcagggcggacaaaaaatcctgcaaacggtacggcccctgcggtgtcggccaaaaggcactgtaccttaataatatcgtgctggatcgctgctattatatcccgcttgacagtgtgcagcgcgtgtacaagcgcgtggccatgagtaagggcggttatacgggcaagggcattttcggttccattccatacctggtcgtggagttcgacggcgacaaacagcggcagttcaccttcaaatacgaggaggacgtggaccgtatgcttgaccgcattgcggcgatacggcccgacctgaaacgcatgagcgaagctgccgaacagaaacttctccagcgggaggccgaacgtgcggccagggtcttgcccaggctgtcagacaaggcagaccgcagtattcaccgcctgcaggccgctgcggagtatctgaataaaaagcctgaactggcaggggagctcagcgccgccgccaggcgcaaaagagcgctgctcatcagcaaacccgcttaccggtgggtcgcactggcgatcacgctgctgggggctgcggcgtttgtgtatggcatttactccctgaccagacaggacggctttgccatctatttcaccttgttcggactggcggcgattttcctgttttcaggcgtcagcgtgctgcccactgcccgcaataaccgcagggccatcctggaacgcgccgaccgtgccgagtcctccatgcagacttatttgaacgggtttgctgatttcccgattcccgcacggtatgcccatccggtggttctgacccgtatggagcgcgtgatccgggaaggccgggctgaagatgctccgcaggcccttgaagtggtgaaagccgatctcaaggcgctcaatgccgatgtccaggtcgagcaggatgaatacgatgaggtcgtggccatcaaggcaatgtttttgaatcatgaatatgcctgataccttcgggaaccatatcccggaagttgtcaggcgacgaaacggacgcagggaaatgacagagtttccggcgtccgtttttcgttgttcctaggtcgtttcccaacaggatcagatgtggacgttcccgcaaaatgcttgacgatggcgggcgcattgcgtacactatccattgcggaaacgtttgaaagtcaaaccgcacgcgccaattcaacaacaggaatgaaataaatggaccaatacggtgttttgaaacaatatttcgggcatgatgagttccggcccggacaaaaacagctgatcgatgcgctgctgtcggggcgggatgttctgggggttatgcccacgggagcgggaaaatctgtctgctatcaggtccccgcgctgctgatgcccggcatgaccctggtgatctctccgctgatttcgctgatgaaggaccaggtcgcggcgctggaggaatccggcgtccccgcaggctgcctgaattcctcactgcaggaagagcaatacaatgcagttctgcgaaatgccatcaacggagaatataagattttatacgtggcccccgaacgattgtccacagcgggcttttcctacctgacccggaatgcgcagatctcttttgtggcagtggatgaagcccactgtgtctcgcaatggggacaggatttccgccccagctacctgaaaatcgctgaatttatttcctcgctgccggtacgccccgttgtgggggccttcacggccacggcaacggcacaggtcaaacaggatgtggcgcagctgctcgggctgcaagaccctttttccataaccaccgggtttgaccggcccaacctctattttggggtggcaaggccccgggacaaggaacggtatatcgaggagtacgttctcgaccatcccggcaaaagcggtatcgtctactgcgccacccgacgcacggtggaggcggtctgccgtcagctgcggtcggtggggatttccgcgacccgttaccatgcgggtctggaagcggaggaacgggagaaaaatcaggaggattttgtctacgacaagtgccgggtcatggtggcgaccaacgcctttggcatgggcatcgacaaatccaacgtcagctacgtgctgcattacaacatgcccaaaaacctggaaagctactatcaggaggcagggcgtgccgggcgtgatggcgaaccggccgagtgcatcctgctgttttctctgggcgacatccagacggcccagtatttcatccgcaatacccaggacaatgacgaactgacgcccgaacagcgggccgaggtagaacgccgggatctgcagcggctggatgccatggtgacctactgcaaaacgacccgctgcctgcggagcgtcatgctggaatactttggtgagcagatgacggaacggtgcggcaactgcagcaactgcaacagtgaaatggttgagacggacatcaccaccgaagcccagaagatcctgtccggtgtggcccgggtagaaaaacgatggcccggcggcctgggcgaggtagcagtggtgcagatgcttcgcggctcccgggaccagaatacgctgaaaaggggactggacagtctgcctacctacggcattttgaaagacgtttcccagcagcggctgcggcagtattttgacgcactggaagaacagggatacctgatcaataccaagggagaatacccggttttgcatctcggggccaaagcggtggaggtgttgtttcacggccagagcgtgactatgaccgagcgccatgctccgggcagccgtgaagaacaggcaggccgccgtcagagcggcaaaaagcgttcagaacgggcagcggctttgccggatgagggcctgatcggcattctcaaagcggaacgctcccgtctggcacaaaagaacaaagttccggcctacattatattcaataacctgacgctggatgccatggcacaaaagaaaccacgcaccctgggggatttcatgcgcctgccgggtgtgggcgatgccaaagcccacaaatacggcaaggactttttgaaatgtatcgcccagtattgtgccgagcatcccgacgaagagtaagaccggcaaaatgtgaaccctcttttcttgcaaaagacccggagcaggcagaaaatattttatgatttgtgaaaggattggccctcactgatcgtattcagggtgaagaaacataaaccaaccctgatgatctggaggaattttgatgaaaagaattgtattgagtgttcttgcagccggaatgattttgtccattggttcggtaacggcgtttgccgcagggatgcacaacggatatgccggcgggttttgccggggaagcggcgtctgccaaaaccatgtggacctggactgcgacggtttttgtgatgactgtgcgtatgtttgcgtggaaggctgcggcagctatgcggatgccgacggcgacggaatctgtgacaaccgcacggcaggtgcctgtgcggggcatcataattgcggcggggaaggatgcagagaaacaagatgcggagcgaacaggagataaacagagccgttgaccgatatgccgacacggtccggcggctttgcatgatccatctgaaaagctatgcggataccgaggacatatttcagacggtgtttttgaaatatgcccttagttccgtgcagtttgaaagtgatgagcatgaaaaggcctggatcatccgtgtcaccctcaatgcctgcaaagacctgctcaagagctttttccgcagccggacgacctcgctggaaacgctgatcgaccagccggcgccgatggcatcggaacaccgggaggtgctggaggccgtactatccctgccggcgaaaaacagggaagtcatatatctgcactattatgaaggatattccgcgccggagatcgggaaaattttgggcaggaacgtaaacacggtctatacgctcctggcacgatccagacagatgcttcgggaaaagctgggaggtgaggccgatgcgtgacaaaattgtacaggcgtttgatcaggttcatgcggaggactctctcaaacaagctaccaaagcttatctgagcgagcagcttgcagcaggaaagcgaaagcaaattccatgggggctgcgtctggtcctggtggccgcctgcctggctctgatggtttttggaggcgggtggctctattttacccccacactggagatcagcatcgacatcaacccctctattgagctgggggtgaaccggtttgaccgggtggtgtctgcgacagggtataacgaggatggccaggagcttctggattctctttccctggaacatttgaattataacgatgcagtggagcttatcatcaacagtgaagaggtttcgacgcttttgtcaggtgacggtgttatgaccatcggtgtcattggcccggatggtgaacagaccacccgagtactttcggatatggaagcctgtacctctcagtcagaaaacatgcactgctaccatgccgataacgatatggccgacgaggcgcatgaagttggcctttcctgtggcaagtaccgggctttcgtcaggctgcagtccctggacccttctgtcacggcggaggaagctgcgaatatgaccatgcgcgagatctgggaccggatcgaagcgctgacccaggctaccggggaaagcgcggctccccagacgagcaccggggcagagcaggaaagcagttggagccacgacgggcagcagcatcacgaggaagagcatgagagcggctatcgccatggctgggaggatgactgaaacctccggaactgatgccggccccggccatttgaacagaatacgttgagcggcctttccggcggcaggattccttttttacggaatcctgccgcttttgttttgagccaaaggacgaaaacggaatagaaatgctgcgaaccgcaaaaaatcatgcgctgacacgatgaatggggctgtttgcatatggcgggataacatggtaagatagtaccgcatataaaacggacaaaaagcgtggctgaggagggagagaaaagatggcctggtttccaatcatgatcgaactggaaggccgtccctgcctggttgcaggcggcggcgcggctgcactgcgcaaggcatcggccctgctggatgccggggcagatgtgacgatgatctctccaagattcgacgataaggcaaagacacttccggtccgtcggatttcccggcccgttgagccgcaggatgtgcaggacatggtgctggtggtggatgccaccggagatgccgataccgcctgtgctttgcggcaggcttgccgcaaggcgcgcattccgtttaactgtgcggcatacccggaacagggggacgtggccttttcggcggtacttcgccggggagatctggtggcagggtttgccaccacggggacaagccctgctgctgcggcctggctgcgcgaccggacagaggaacttctgccggagcggtttgaggaaattctggtccagatggaatccctgcgcgtacaggcaaaagaaagcatgccgcaccagcatgaccgcgcacggtttctgcacgcctgcctggacgaggcattgcgcaggggccggccgctttccgatgatgaaatcagcgagatcgagaggaggaaaagataaatgccgggaaaagtatatctggtcggtgcgggctgcggtgcctccgatctcattaccctgcggggacagcgggtgcttgccgcggcggatgtggtggtctacgatgcgctgatggaccctgaccttttacagatggcccgtcctgacgcggaaaaaatccctgccggcaagcgcagcggacatcacagtatgccccaggcggatatcaatgcactcctggtcgatctggcccggcagggcaaaacggtctgccgtctcaaaggcggagacccctttgtgtttggccgcggcggggaggaagccgaggccctgcttgccgccggtattccctgtgaggaagtccccggaatcacgtcggcggtggcgatccccgcggcggcaggtatcccggtgacccaccgggggcagagccgcagcttccatgtggtgactgcccacacggcggcaacgcccgacggcctgccggaaaaccttgaaaaactggcagacttggacggcacgctggtgtttttgatgggcctgaaaaatctgccgcagatcgcggcccgtctgctgaaagccggaaagcctgccgatactccggcagctgtctgcggtgctcgcaccgtgcgcggtacgctggcggatattgccgaccgtgcagccgcggttccgccgccggctgtcatcctgatcggcggcagcgccggtatggatctggaactggggacgggattgctccggggcgttacggtgggcctgaccgggacgccggatttccgtgtccgggcaagaatggcctttgctgcccagggagcgcaggtcgtggatgtgcagcgcagcgttgtgaccccgtgctgtacaccggagcggttttcacaggcattgcagaccatgcccggctggattgccttcaccagccccaacggcgtcaatcttttcttttcgctggcggcgcaggcgaggatcgacctgagacggtttgcacggacccgttttgccgctgtcggtccccggactgcagagacactggcagagcggggaatactggcggaccttgtgccgcaaaaacatgatacccggtcattgggaacggcccttgccgcgatatgcaaggggagtgacgtacttcttgcttcggcgcaggagtgcagccctgcgccgcggctggcactggaagaagcgggaatcgcctgccggagcctgcccctttaccgtacagaaatcctcccgccggaaaaaattgccgtggattacctggtctttggcagtgccggtggggtaaacgcctactttcagaccggggggcggacgccgacacgggcggcggcttgcatcgggcaggtcactgcggcagcggcggagccgtttgcccctgttttgacagcgcaggatacccggatcgagtctgtggtggagtctgtgctgaacgattggaccgaaaaaggagaagaacattgaaaaagcgtatcatctgtctggccctggcgttttcttgtctgcttggggcaacggcctgcggcacgaacactgcgccgcagtcggaaccggaagttgaagtgacggcggaaacggcatccccagaaaccgctcagaccctgacctttaccgatgatttgggccgtacggtcacggcaccctgccagccccagcgcgtcgccgctctgatcggcagctttgccgatgtgtggagcctggcgggcggaagcctggtggcaacggccaacgatgcctggacacagtttgatcttggcctgggggaggatgtggtcaatctcggcaccaccacggaactcagcctggaaaaactctttgccgtggagccggatttcgtcattgccagcaccaacacccagctggatctggactggatggaaacgctggaagccgcggggattcctaccgcgtattttgatgtcaatacctttgatgattatctgcgcatgctcaaaatctgcaccgacctgaccggccggcaggatctctatcagcagaacggcctggacgtgcaggcccagatcgatgctgccattgcccgcagtgacggcagcgcaccgacggttttgtacctgcgcgccacggcagtcagtgtcaaggtcaagggcagccaggacaacgtgctgggcgaaatgctcaatgaccttggctgtgtgaacatcgcggaccaggacggcagcctgctggaggagcttagcctggaacgcatcgtgcaggctgacccggactacattttcgtggtggagcaggggagtgacgcggaggccatccgggaaaacctggacacccttctgcgggacaacccggcctggagcggcctgaccgccgtgcaggaaggccgcctgtactatatggatcagaaactctataacctcaaacccaatgaccgctggggagaagcctatgaaaacctcgccgacatcctgttcccggcatgacgcccggacttttgtcctggccgggctgatctgcattgcggcggcgcttctcagcgtctgcctgggagcggcgggactggccctgcccgaactatggcaggccattcggtcggggccggacggcagcgcggcggctagaattttgtggtatgtccgcctgccgcgcacggctgcctgccttctggcgggggccgggctcgctgtgtccggtgccatcattcaggcggtattggcaaacccgctggcatcgcccagtatcatcggcgtcaatgcgggcgccgggctggcggtctccatctgctgtgcggcgggcggggcaacagccggctgggcggtagcgggctgttcctttctggggggcatggctgcggtcatgatcgtggtgctggtatcccggcacacgggagcttcccgcatgacagtcgttctgggcggtgtggcggtcagtacctttttgaatgccggaaccgaagccatagctacgttgtttcccgatgccgcggtaggcagcgcggatttccgcgtgggagggttctcctcggtgtcactggcccggctgtggccggcggccatcctgatccttctggctctggccgtgtcctttacgctctgcaatgaactggatgttctggctttgggcgaagacaccgcccgcggtcttgggatgaaggtgtccaccactcgtaccttgcttctggcgttggcggcgctgctggccggtgctaccgtcagctttgccggtgtgctgggctttgtgggattgatcgttccgcatattgccagaaagtttgtcggcagcgagagccggacgctgctgcccatgtgcgctttgtgcggtgcaggccttgtgacgctgtgtgatctggctgcgcgcctgctgtttgcgccctatgagctgccggtgggaattctgctgtcttttatcggcggaccgttctttattgtgctgcttgcgcggagaggagggggccggcatgcttgaaacaaaaggattgtgtgcgggctatggcggtgcggatgttctccatggcgtcacggcccggtttcttcccggacgcgtgaccgggatcatcggccccaacggctgcggaaagagcaccttgctcaaaaccttggcgggactgcataagccgaccgccggacaggtgctgctggacggtgtttcggtgccggacctgccgccgcagcagtccgcccgaaatattgcctacctgccccaaagccgcaatgtgccggagatcacggccctgcggatggtgctgcacggccggtttgcctatctttcgtatccccgccgctaccgtcctcaggactacgaggcggcccgccgcgcactggactggatcggggcaggggaccttgcggaaaagagtgtctcggctctttcgggcggacagcggcagaaggtctatatcgccatggcccttgcccaggatacggacatcgtgctcatggatgagcccactacctatctggacatccgcaaccagatggaagtcatggccctggccaggcgcctggcggaactgggcaaggcggtggtcatggtggtccatgacctcggggcggtgcttcgcaatgccgacgaggtgctgcttctgcatgacgggcgggtgacggcctgtggctctcctgccgaggtctatgcctcgggcaggctgcagcctgcttttggggttgcggtccatgccgtcgacacaccggacggcatacaatattactgtacgcccgtataaacatactgcgctgcgccccgcttttgcggggcgtttttgtgtgatgtgccttgaccacagtagagggaaaaacgcccccctaaaacttattttaaggtgatttttccgtaaaagacttaatttttttcgggtttgaggcgggctgtggaggaaaaaacttttttcaaatgttgaaaaaatggcgaaaatgcttgtaactttttgccttttcgtttatactttaatgtatgtctgttgctgcgcatttttttagaggggaacgcgcaggcggcatatgatacgtatacgcaaaacggaaagaatagggggaagcatgatgtctgaatatcgcaacatgacaaaagaacagctcctggccgagaaggctaccctggagaagtcctacgccgatttcaaggcgatgggcctcaagctcaacatggcccgcggcaagcccggcccgcaccagatggatctggcgatggatctgctcaagatggaggattacacctccagcgacggcaccgacgcgcgcaactacggcaacctggaaggcctggaagaagcccgagccctgtttgccgacgtgatgggtgtcaagccccagaacgtttttgtgggcggcaactccagcctgcagctgatgtatttcctggtgagcatcggatatacctttggtttccaggattctccgtgcccgtggtctcaggtggaaaagcccaagttcctgtgcccggtgcccggttatgaccgtcacttccgcattaccgaggagttcggcatcgagatgatcaacgtcccgatgactccggaaggccccgacatggatatggtggaaaagctggttgccgaggatgcctccatcaagggcatctggtgtgtgccccagtattccaaccccgacggctacacgtacagcgatgaaacggtgcgccgctttgcttccatgaagaccgctgcgcccgacttcaagatcttctgggatgaggcctacatcgtccatcacctgaccgacgagatcatcgagacccccgtcctgctggaggaaagccgcaagtacggcaatgaggaccgcgtcttcatgttcacctccaccagcaagatcaccttccccggcgcaggtgtttcggccctggcctgcagcgagaactccatgaagtatgtctgcagccgctttgaggtcatgatcatcagctatgacaagatgaaccagctgcgtcatgtccgcttcctgaagaataaggaaggcgtcctggcccatatgaagaagcatcgccgccgtctggctccctgcttcgatgccgtcaagaccacctttgcccaggaactgactccttgcggcgacatcgcccactggaccaaccccaagggcggttacttcatcagcctgtacgtgatgcccggctgcgccaagcgcgttgcccagctgtgcaaggatgccggcctggtcctgaccggagctggttctgccttcccgtatggccgtgatcccgaggattctcacctgcggatcgcgccgacctatcccagcctggatgaagttgaaaaagcgtctgttctgcttaccgtctgtgtgcggcttgccgttgtggaaaagctgctggcacaggccgagtaagccggaaatagaagtcttgcccgcgcgggcaatatttggaggtacctatgagcagaaaaggaaagtcatggcacttttttgtcgtggcgattctgatcgctgtctttgcatggacggcaattggcggtgtcagctatcagtatggtgacatcaagaacacctacatcaagggtgtgtccgacattcgtttcggcatcgatatccggggcggtgtggatgtgacctttgtccccgcaggggatgttgatgctaccgacgcacagatgcaggcggcgcagaccgttatcaatgaccgactggtcggccttggcattaccgactatgaaagctatgtcgatgccaacaaagaccgtatcatcgtccgtttcccctggaagagcgacgagtcggactttgacccgcagcaggccatcgatgagatcggcaccactgcggagatggtgttccgtgagggaagctccgccgacggcgaagtcatcctgacgggcgatcaggtggagtcggcgacccccgggtatgactcgaccaacggctatgtggtccagctttcctttaccagtgaaggcgccgaggcttttgccgaagcaaccacccgcctgtatgcggatggcggcaccatcagcatctggctggacgatgagaacatcagcaccgccacggtcaactcggccattaccgacggcaacgccatcattgaaggcaacttcaccgccgaggaagttgagaccctggccaaccagatcaactccggcgcgctgccctttgcccttgaggcggagagcttctccaccatcagcccgacgctgggcgcccgcagcctggatgtcatggtcatggccggcatcattgcgtttgtgatcgtcgccatcatgatgatcgtccgttaccgtctgcctggcgctctggctgtcatctccctgctgggccaggtcacggcaactttggctgtggtttccggttacttctctgtgttctccggttccaccctgaccctgcccggtatcgccggtatcattctgggtgtgggcatgggcgttgacgccaacgttatcaccgccgagcgtatccgtgaggaacttgccaaaggcaagaccctggacggcgctatttccagcggcttccgcatgggcctttctccggttattgacggcaacgtcaccatcgtcattgttgcagccatcctgatgggcgcattcggtcccacggacggcttctgggccaaggtgttcaccgctatctttacctggttcggtgcatccaccgcaggcaccatttactccttcggcttcacgctgttgactggcgttatcctgaacttcgtgttcggcgtctgggctacccgcgtgatgatccgcggcgcctccaagatcaaggctctgcgcaatccctggctcttcggcggcgagaaagaccccgcaaaggtctggaagacccccaagatcaattttgtcggcaaccgcaaaaagtactataccttctcctgcgtgctggtggccgtcgttctggtgttctccgttgtgttcggtgtgtccatggacattgagttcaagggcggcgccatggtcaccatgggctaccagggtgaggcggacgtcaacgccgtcaagtctgcggcggagtccactctgggcgtctccaacaccacggtccagaccggtaacgatatttccggcaaccagacgctgaccctcacgctgcccggcaccgagaccctcaccaccgaggatgtggactctctgctgactgcgctgaatgagcagttcccggacaacagctttgtccagaatgagatcagcaacgtggatgccaccatcggcaacgagttctttatcaagagcctggtcgccgtcgcagcggcctgtgtgctgatcctgatctacattgccattcgcttccgtaggattggcggctggcccgctggcagcatggcgatcgtcgcgctgctgcacgatatgttcgtggtgttcggcgtgttcgtcatcttccgtatcccgctcaacggcaacttcattgccgccatgctgacgatcctgggctactccatcaatgataccgtcgttatctacgaccgtatccgcgagaataccgccctctacggcaaaaagatgccgctgccggaactggtcaacctgtccatcaaccagagcttctcccgctctctgatgacctccatcacgacctgtgtcgcactgggcgttgtctgcattgtggctatggtgttccagctggaaagcatcttcaccttcgccatgccgctgatgttcggtatggtcagcggtgtgtacagcaccatgtgcattgccacccagctctgggttgactggaagacccgcggcaaaaagaccgcaagactgcccaagaaagcagcctcttgacgcatccgacatgaaacgggagggaacctgatgaaatgtccgtattgtggtgagatcgattccaaggtcattgactcgcgccccacggaggacggtgaaaagattcgccgtcgccgggaatgcctgagctgcaaaaagcggtttaccacctatgagatcgtggagaccgtccccctgatggtcgtcaagcgcgaccactcccgggaggcctttgaccgccagaaactgctcaacggtatgctgcgtgcctgcgaaaagcgtccggtcagctatcagcagctggactccgcggtcagcaatattgagcaggcgctgctcaactcctacgaccgtgaggtctcgtcgatgtacatcggcgatttggctatggaccagctcaaacacattgacgatgttgcctatgtgcgttttgcttcggtctaccgccagttcagcgacgtcaatacctttatggaagaactcaaggacatgctggctacccgctcaaaaaacagcgataaatgaggcctccagctgatccagctgggagagcgcccgggccgtttccaccgccagatcggcgggattgtccggcagggcataatgctccagcgtctccatggtctcgttgatcttgtccagcagactccggcgtacaaacaggcacagcagcgcactgcgcttgcgggtgttttcggcagcggttcgataggcctgtgcagcggtttcatactgctgcatcagcgccagactgtatgctgtccgcagttcctgtcggctcttctcaatactgtcggtgactgccttcccggaaccgaatacggtgacgaacaaggcagccaaaagcagtacggcatagaaattgcgcttcgtacgcaggacctcctttccgttgcagcaccaaagatgctgtatccggttcgatttatcggccgcccttcggggcggccttttttggtatcaggagagtttctttcccgttggcaaggagaatcaggacctgcttggagataaggcccgcatttttcagctgctcccggagccaggcatcatcataccccagggccagcagattatcccggtaaagatgtcggtcaatgaggatgggcagcatgggcggggcttcgcctgcggcgggctttttggcgatgctcaggcttccgttggattcgatcacgccccacatcacgtctttcggggagaacacttccgcctcgcgcaaggattcggccaaatcgttgggggtaatgcgcagccgccgtaaggcctgctgatccacggcgccgttgcggatcactgtgaccgggttgccaaagagcaggcgcgcgtagcgcgggcagtaccaggcaagagaggaattgaatatttccagagcagtgatgagcaggatgggagtcaaactggcaaaaatgggtaactccggctcatcgatgcagatggatgccacattggagatcagaaaagtggtgaccagttccgacggctgcagctccgccagctgacgtttgcccatcaggcgcatggcggcgatagcgacgatataaacaactagcgtccgggtaatggaagaaagcatatggcacctccccggtgatattcggcccaaagtctggcaagactatacccaggaccgcctgcgggcggccatgcaggagaggggctgatactttgccgaagcaaaaactgagcgcgtccctgcagcagaaccttgcgtatctgcagcagatttttggcgcgtcctcggacttttataccaaaaaactgaccctgggacagatcccgtgcgctatcgtgctgttcacgggtctgtcctcaccggaaaaactctgggtcatggcgctggatgccttggagcgctgcccgttgcccacacgggatggcagacagcttttggcataccttttgacacgcagtgttatcccggccgaaagcacccccatccaggaccggacagatctggtggaaaagctgtcaaacgggatgtcggtgctgcttatcgatggctgccgtggagcgctggcggtctccacccaggaaatgccccagcgttcggtagggcaacccaacggggaaggggatatccgcggcccgcaggaagcctttaccgaacttttgcgtaataacatctcgctgctgcggcgtcagtttcggaccgacagctttgtggcggaggtccacacggcgcacacccatgccaagaccgagtactgcctgtgctatgaccgcgccctggcgccgcccgagatgatcgaaaccttgcgccgcagactggaaggtgtccgaatcccggtcctgctggacagcgcctactttgcatcctttctcaaacaggacaagctcaacctgttcccggccgctgcttataccgagcgccccgccacggcctgtgcccgcctgtgcgaaggcaaggcggtgattctggtgtccggcagcccctacgccatggtggtacccagctttttcagcgaacactttgaaagcctggatgactattcctccggggcggtgtttgcaggcatgatccgcattctcaaatatattgcattcctgctgtcggtgtttggccccggattatatgtcatggcagtggaatttgcccccgagaccattcccatcaaattgctggccaaactggcccaggcggaggcctccacgccgctaccgctcatgctggaaatgctgtgcgtgacgctgctgctggagatcgtccgggaagccggtctgcgcgcgccaaaatccatcgggcatacggtcagcctggtgggggcgctgattctgggagaaaccgctgtgtccgcgggaatcgtcagtatcccggtcctcaccatggcggcagccgctacggtcgccacgctggcggtgccgtcgctgtatgaacagtccattctgttccgctttattgtgattgttcttgcaggcgcctttggactgccgggccttgcggcgggggcggtcatcattctggccatggcctgcggcacggaaccctttggctatgactatctctatccgctcatgcccctgggccgggcagcatggcgggacggcattgtgcgggtgatctggagcagactggccgagaaaggatacgtggtgggcaacgatgaaacgagataaccccagcctgtacgcagccctccagcttggactgttcgtcaatgttctgcttcgggctcagacattgttttggacaagagcaggtattctgactgcgctaccgggcattctgatcacggctgctgcggggcttgtgtttgcacgggcctggccgttggtccagtgccgtattttgcgaagcgcatttatcgcactgctgctggcaggttctgtgctggacattttgagcctgtggcagctgtattcggcggtatacccggatgtagtaaacctgttggggatctgcctgaccgccctgatcccggtggcatacctgcgccgggtgtcggccattgcccagactgccaacgtggttctggggcttttgcttgttgcctgcgcggcgctggtgctttcggtcgcaggtcgcctgagggtggtgaacctgcaaaccacagtcattgataccgctgcctggaaggatgccctctccgcacagtgcacgttgtatccggaactgcttttgccggcgctgtggccggaccatgaaaaacgcggtacccatacggtacttcgcctggctgctttcggaacggccttcaacctcggcgtgcatttgctgctggaattgtttttcggtgcggcgatgccggatgcgcaaaacccattgcatcaggctgcccgctgcggtgcgctttccatttttgatcgaatggaatggctgcagcttattgtctggactatggcggtgtcggtcaaactggcattgcatttgtatgcggtgacccgcctgacgggggcaccgcgcacaaacgaaaacagcctgacagccatgccgttttttgcgggatacacggtgcttttgatgtttttgtctgctacggcccggaactgggatttcaccctggtgtccgaggtgcgaaatgcggcggcgtggtcttttgtggcgctggttgccgggatgggagggatacgatggctgacatcttacgccgcgcgaaaacatgcctgattctggcgggggcggcgctgcttcttatgacgggatgtgcgggcaggccactgatcgagcgtgaaatcgtccgggcgatgttctttgcgcagcaggaaggcaaatcccatgtggtcctgcttttgcaggaccaggaaagcgaagactcttccgattacaaaacggcaaccggggagggggataccgcagcacaggctctgtccgacgctgcggcagggctggacggcgtcatgttttatggcctgaccgatcttgtggcgttgccgccagactgcaactgggaggaactgcggcagtttgcctccgtcttgtatgagactgcgcagccatcccccgagatcacgctgtttttactggataaccggacagtggagcggctgcaggaaaccgcaggagacttgtatgacgccatgcaggcagtggaaaagaaataccgtatcagctgcggcctggagtctgttctgagccagtctgaccaggcggcgctcccgtgctggcaggaagaggggtacgggtttgcggtgctcaaacaggggcaaagcgcccttcggtatgttgagccaatgcgtgcgcagctggcggccgttttgtgcgggcagagcagacagctggaatttacctttgaagatggcagtgcatcctgtcgggcgggaacgacggtcctgtttggcgcggagcgggacggcgtcgagatattgcttcagctccatgactccgacctctcggcactgacggacgctgtgccgcgccaggaggagctggaacagctgcttgcacagcagctggagacagccttttcgcagatctacgctgacacacaaaaaatcggtgccgatcccttccgcctgacgttctggcaaaattgtctgctggggagcggggagacggacttcccggtaaacttccgggtggagtatacctgaaaaaatgcgggaaaacggcacgattcttcaattggataaagcataaagccacacatcgggccagactggcatctgataatactgcaaaaaaggcgcggagacgcttcacacatcgccggcagctgtgagctgtcaggcggcggtgacgcagtctctgcgcctttagtttttgtgttgtatgaaagaatgggaacggtcaggattcggcagtcaaagtcgtaggccggttcagatagatgacttttgtgtcggtcaggaaggtctggaaattgtacagcacaaggatctggtcgtaaccttcctgctcaatgatggaatcgggaccgaaagcatagttgcggaaatcgatcacgccgatcttggcgtagttggcggtcagatagggaataaagcagttggcgtagctgtccttgataacgaggatggaaccttcgccgtcgccctcgatcaccgaatatccgttgttgccgcctaaaaatgcggcgtacttgtcccgggtctcaaacttttcggtgtcgatcatggtggcggtctcggcggtgctgaaatccgcttcgccgttgacctggtaaacggtcatggggttatcaaggggatagtaggtgatggtatcgggggctacgttccagtaccgcgtggacgaatagtgagtgccgtaaaagtcgggaacatccacactgctgtgggctgacgtatcaaagggcgtcaggcctttgagcgtgcagaactgctggtatgccagataggcgccgtacgtcgtccagtgatggtcggtgcggtaatacagatattcgtccttggcatcggtgtaaaccgagcgcagatcgatcacatcggcggtgggggagacctcggcaaagatctcgtccagcatggtgttttcttccaccatgggagcagcgagggggagttcttcctcatagatgacgctggcggaaggtgccagcaggaaggtcactctgcccggataccgggaaccgaactctgccacggcactgacgtttttgtccagctgcttggtgctgggcgtaccgaagttcttggtgaacatccagtgatccttgcccagcaggatgccgttttgctccaccttttgcaggcagagcgcgttgaaatcgctttgcagatcaatccatccgtcccggaaggcgacctgatcctggacataggtggagaaatcttcaaaccagtcgccgttgagcagggcggtccagctgaaagagggcatctgggcgagtttgcggttttccagttcggaaagcgtacgcttgggccagaaaagattcaatacggcaaaaccgaacaacaggacaaaaaacaggatcagagaggcatatccggcgataccgcgggattttctgccgtgctcggcatgataggtctgtttcatcgcgatacacctcctgtcagaattgagcgtacagcggcgtattgttggtcgccgccacgataaaggccgtggaaaggatcatgaccaccgccagcaggaccagacgtaccggtgtatggcgcttggcccactgccagatcttgccgggcagagcggtggagcagaagatggacaaaatcagcaaaacaccgtagttgcgcagatagtacagagcagagatgccgccctggggcaggaacagacggctcatcagaaggggcagcggagcgccctccacatcggcggtgaaaataccccagcccagaaccacaaagaacagggtgtagatgtgcggccagacacggccttttttcaggtacttgagcaggaaggtcttttcaatggtaagcaggacaaagtagtaaaggccccagcagatgaaattccagttggcaccgtgccagatgccggtcagtgtccagaccaccagcatgttgaagatctgccgcggcagacccttccggttgccgcccagggggatgtatacataatcccggaaccaggacgacagcgaaatgtgccagcgccgccagaactcagtgatgctggccgagatataaggcaggtcaaagttggcagggcagtcaaagcccatcattttgctcaggccgttgctgatctcggagtaaccggcaaagtcaaagtagagctgcagggaataggcgaggatgcccagccatgccagcggtgtggagacgttggcaagcccgatttcagaggacagcagatccgtccacagagcgccgatggaatcggcaatgatgactttttttgccaggccgaacacgaacatttccgcgccttcctggatctgcatggcattgcagcggcccttgtaggtgtgcagggcaggggcgagatcccgatatttgacaatggggccgatgagcagctggggatacatcaccacgtaggcggcaaaggtgatgggattgcgctcggcacggatcttgccggagtaaatgtccgctacgtagctgatgagtttgaaggtataatagctgatgcccaccggcagaacatccaggaaggacagctggctcagctcaccggaagcgatctgattgatgatgtcgatcaaaaagttggtgtacttaaagaaaatcagagcacccagcgttataagaatcggaatcaccagccagatgattcggattttgctgcggttgtcccagtgatcgatgagcaaaccgaacagatagttgaccgctaccagaatcagaatcagcggcaggaatttagtgccggaacagcagaagaaaatcaggctctcgatcagcagcaccgcattcttcaggcgcccgggcaccacataatacagcagcagcgccaacggcagaaagcagaataaaaatacgacgctgttaaataccacacaaagccccccttaggcaaaatgtcacagaacgcccgcaaacggccgcaaatctgcgccatttgaatcgaaaggccgttacccggaaaaaggggtagcggcccatcggaacggtcagacagaagctgtccgacaaattgattttataaaagaaacagtgagccaatctcaggccagagcgctgtcaatggcagcgtcgatgtctgcgtagtcggggccgtcaatgctggcaacgaccagaacaacgatgttgtccttggaaacaatgcgggcatcctgggccttggcgaccttgtcggcgaactcggcgtacaggctgctggacatgctgtcacggaaggcttccagctcttccacaacggcatccatgctgccgtccttgacctgggcaacaaagacgatgccgcagtcggactggttgttggtaatgtcaccgcggaaatcgatcaggttgtcgggcgtcatgttcatatagaactcgatgtcgtcgctggtgatggcgcggggattgctgatggggttgacctcttccagagaggcaacgatggactcgagcttctcggtatcggcctcggctgcgggagcctcggattcagaagaagtctcggaggaggaagtctcttccgaagaagtatcggcagactgagaggtgctggcggaagtgtcagcagaagaggaagaagagctgtcgtccttggagcaggcagcgaacatcgcggcgcacagagacagggcgcacagcatgcaaatcagttttttcatatggggttccctccgataaatcagttgcgtgttatgtgacagaagttcgcctctctgccgcacatgatgggcaaaaacaaggcgaacagaaaatgataccttatacaaaggttactatatacgatacactatttttgcctttttttcaagtcccgccagttgtaaaatcgtcgtgcaaaaagccgcgtttatgcgataaaacggcacgtattgacaagccggtttcgcaggatttagaatgcagtgagaaggaagggggaaaacaaatgcgcaacagtaagagctttcgcgctgcactgatggggatgctttttgcgctggcgatcgtactgtcttttgtggaatcggcggttacgccgctgctggggctgatgccggccatgaagctgggcctttccaatatcgttgtgatgtacgcactgctgtttttgtccgggcgctatgcagctgcgctggtggtgctcaaagcgctgttcgcgtttttgacccgtggggcgacagcggggatgctgtccatggccggaggtgtgctctcccttctggtgttgtgctttctgctttggctgcccggcagcataagcggatatgtcttttccgcctgcggtgcactggcacataatctgggtcagctggcaggcgcggcggtgattctgtccagcagtgcggccctttcctatatgccggtgcttatgatagctggtcttattgttgggggagtgacctggatgcttctgaaggcgctgctgccttattttgaacgcatttcaaccgtaaattgcacacaaagtaaaagaataaaaaaattaagataaaatcttaaaaaacttgtaaaaggatgttgacagattcgctgtgggggagtatactgaacacatggcaaatgctgtatgccgtgccgcgggccaaaggccgcggcttaccaaaatatatcaattcaggaggctactattatgaccaagtatgtctgcaccgtctgcggctacatcgccgagggttccatccctgatttctgccctgtctgcaaggctcccgcttccaagttcatcgagaagaaggacaacacctacgttaccgagcatgtcgtcggcatcgccaaggacgctcccgaggatatcatccagggcctgcgtgagaacttcaacggcgagtgcagcgaggttggcatgtacctggctatgagccgcgttgccgatcgcgagggctaccccgagatcgccgaggcctggaagcgctacgctttcgaagaggctgagcatgctgccaagttcgccgagctgctgggtgaggtcctgaccgacagcaccgagaagaacctgcgtatgcgtgttgacgctgagtgcggcgcctgcgccggcaagatggacatcgccaagaaggcgaaggagctgggcctggatgctattcatgacaccgttcatgagatggcgaaggacgaggctcgccatggccgcggcatgcagggcctgctggaccgttacttcaagggctaagcaggagctttgtttcccggtaaataatacgcaaccggcttggggcggttttgcccagccgtgagaaacaggcggcagccatttggctgccgcctgtttttgtgttctgatattgtttttacccatggcgtaagtctccactcttgcaggaatctttccgcgcatgctacaatgcagacagaacgagaggaaccggagcaggagggacgctttatgaaaattcgcggtaataccctgtggcgtgtaccggtcttttgtatactggcgagtgtggtgtgctattacctgaccatatatctgggcgggatgttttatgccgtgaaaacggtggaagccgacgggatgatacaggcttccatcgatccgttccgtgccatgatatttgaacttgttctgtttgtggcggtgcttcttgcgggaggatttctggttgtgcggtccatgaatcgggcagaggtcgcagtgtcggcagccattgcagtggtgctttgccttgcgctgcgaggagtaatctatgttgcgtcgcaatttgcaccggtagcaatggtctggctgattccgctgttggagtggagcggtgaattgtataccgtcctggtccgtctgatccggcactccggggcggcgtacgggatcagcctttttgcaccttttctgctcgttttctttggcaaggggaagaaagacgaaagagtcacaaacgaggccgcaggcatttaagcgcgtatgcttttgtgcccgcttaccgtggtttatccatgtgtcggccggcagagtgtaatataaaaatccccgaggggttgcgggaacccttcggggattttttattgctgaaatgtaccgcgcatatccgcaatcagcgatatagctgcttacaggtcgcagatctcgccgtagcattcgggcctccggtcacggaagagcccccaggacaggcgttcttcctggatggcggcaaagtcatactcggcgtggagaatggtatcgccctcccggggagcctgggtcaggacggcgccagtggcgtcggtcatgaagctggtgccgtagaagcacagggaggaactctgtccgccgttttcggggcagggagtgacggtttcggtgccgaaacggttggccgccaccacaggcaccacgttggccgcggagtgaccctgcatggtgcgctgccagtgaccggcgctgtccacttccagaatcggttcgctgccgatggcggtgggatacatgagcagatcggcgcccatcaatgccatgcagcgggcggcctcggggaaccactgatcccagcagatgcccactcccaccttgccgtagcgggtatcccacacgcggaacccggtgttgccgggggtgaagtagaacttctcctgatagtagtggtcgtcgggaatgtgggttttgcggtagacacccagtacggtgccatcggcgtcgatcatggcaatggagttgaacaaccgggtaccgtccttctcgtagaagctgacgggcagcaccacgcccagctcggcggccgcggcgctcaggcgctgcacggcaggattttcttccacgggggtagcataggcgtaatattcatagcggcgctcctggcagaagtaggggcgctcaaacagttccggaagcagaatgatctgcccgccctcggcagcggccttgcggaccaactgctcggccagagcgaggttctgcgcgggatcttcaacacagtgcatctggatggcactgacatgggtaacaggcatcgggtcaagcccctttctttgttataccagcgggatctgctgggtgatgcagtggatgttgccgccgcccagcaaaatggcacgggcgtcaatgcccacgactttgcgaccggggaacgcatcctgcaaaattgccagcgcacgggcgtcgctctcgacattctcgccgccgaactgggggaccagcaccgcgctgttcgctacatagaagttggcgtaactgccggccagtcggtcaccgggttcccgcatatcttcgccgggggcaaagtcgtaggcggcgcagtcggcttcggtgcagaggatgggatggtcgggaatgggcagcagccgcactttgagctttcggcccgctgcgtcggtgacagagttcaggtaatccagacctgctttggacaggggatactggggatcgtcctggttgtcggtccaggcaagtatcacctcgcccggcgcagtaaaggcacagacgttgtccacgtgctcgttggtctcgtcctgatagatgccccggggcagccacaataccttgcggatacccagatactcggccagcttggcctcaatctgctcccggctcatggacgggttgcgcccagcgctgagcaggcaggcttcggtggtgaggagcgtgccctcgccgtccacatggatggagccgccctccagcacaaagtcgcctgcatcgtagcaatctacgtccagcgccttgcacagggcaggggccacagcgtcgtccttgtcccactgggcgtacagaccgtccacctcgccgccccaggcgttgaaccgccagctgatgccgcggagagctttgccgttggtcacaaaggtggggccaacatcccgcgcccaggcgtcgtcactctcgatttcaaacaccgtcacccgggcaatgtctgccacggcggctttggctgcggcaaagtccgcaggcccggccagcagataaacttcctcgcccttggcgatctcggcaatcacgtcgagaaaggctttctgcgcggcggaaggatcgcggccccagctgccggggcgcaccggccagatcagcacggtggcgcggtggggggcaaactcggcaggcatggcaaagccgtcattcaccggtttggtatgcagcattgccatatcaggaaagcctccctttgaaatcttcgtagccgaactgccgtacgatctcgcagctgccgtcggggtgacgcagggcgatgtcgggcaggggcatgccgttaaaggtgttgtttttgaccatggaataaatggccatatccccaaagaccagccggtcgccgatctcgggctgcttgtcaaagctgtaatccccgatgacatccccggccagacaggtgcgggcgcccagacggcaggtcacggccttctcaccgggcatgccggaaccgaacagcgggggacgataaggcatctccagcacgtcgggcatatggcaggccgccgaagcgtccaagatcaggatgggcatggtattctccaccacgtccatcacggtggtgatgagggtccccgcattgagggcaatggcctcgcccggctccaggtacacctccacatcgtatttgtctcggatatagaggatcagcttttccaaggcggcaaggtcgtagccctcccgggtgatgtggtgcccgccgccaaggttaagccatttcagcccgtgcagaaactgaccgaacttttcctcaaaagcctggaaagtctccaccagcggggcggagtcctgttcgcacagggtatggaagtgcaggccctccacaccggcaggcaaagtatcgcccaaagcgctgcgcaggatgcccaggcgggaacccggcgcgcaggggtcatagatggcgtggccctcctgggtagaatgctccgggtttacccgcagccctacgctgacaccggcagcctcccatacgggacggtgatgctccagctggcgcagggagttgaagctgatgtgatcgcagatcttgcagatctccgccatctcctcgtcggtataggcggggcagaaaacatggttttctttgccgaactcctcgtgggcgaggcgggcctcatacaggccgcttgccgtggcaccggagaggtatttggcaatgaggggatagacacggaacatggagaacgccttctgtgccagcagaatgtggcagccggtgcgttcctccacgccgtgcaggatctcgaggttgtgaatgagggcggcctcatccaccaaatagaccggggtgcgcagcgtttctgcgcgcagctgttcggccatggggcttactcgacggtggcgggggcctcatcgaccacccagggcagaccgtactggttgagcatctccatgaacggatcgggatccatctcttccaggttaaagacgcccggcttcttccaggtgccgttgactaccagggcagcgccgatcatggcaggcacgccggtggtgtagctgatggcctggctgcccagctccttgtagcactcctgatggtcgcagacgttgtagatataaatggtcttttccttgccgtccttgacgccggtgaagatgcagccgatgttggtcttgcccttggtacgggggccgagggaagcaggatcgggcagcagagccttcaggaactgaatgggcacgatttcgcggccctcgaacatgacggggctggtggacagcatgcccacgttctccagacacttcatatgggtcaggtagctctggccaaaagtcatgaagaagcggatacgcttgacaccgggaatgttcttggccagggactcgatctcctcgtggtggagcagatacatgtccttcacgcccacctgggggaagtcgtaggtgcggtggatttccatgggttcggtctcgacccagtgaccgttttcccagtagctgccgttggcggagacttcgcgcaggttgatctcggggttgaagttggtggcgaagggatagccgtggtcgccgccgttgcagtccagaatatcgatggtgtggatctcgtcgaagtagtgcttgagcgcgtaggcggagaagacgctggtgacgcccggatcgaagccggaacccagaatagcggtcaggccggcatcctggaacttcttctggtaggcccactgccagctgtaatcaaagtaggcggtaaagccctcctccttgcagcgcttctcgtagatggcgcgccactcgggatcgtcggtgtcctcgggttcgtagttggcggtgtcgatgtagtccacgccgcaggccaggcaggcatccatgatggtcaaatcctggtagggcagggcaacattgagcacggcgtcgggcttgtactcgttgatgagggccttgagggcttccacgctgtccgcatccacctgggcggtggtgatcttggtggaggtcttgccctccagcttttccttcagtgcgtcgcacttggaaacggtgcggctggcaatgcacagctcggtaaaggtgccgctgttctggcagcatttctggatagcgaccgaggcgacaccgccgcagccaatgacaagcagtttgctcataataacaacactcctttgttgggggtatctggtatagaaaaacaaacgtttctaacaagtttgggcagaaaaaggatcagctttcttcctcttcctgcaaaagttcctccacgtagcgggggagcatgaatgcaccccgatgcagatgggtggagtaataccatgtcttgatgtggcgggcatcccagcgggctgcatcaaaatccttgagaggatggtactttttggaggcaaagccgaacagccagtaaccggccgggcaggtggggatgtgcgcctgatatacccggctgatggggaagctgcggaaggcccgtttgtgcatggcgcggcaggtttcctcgtcctcatcaaagaaggggctgccgtgctggtagaccatgatgccgtcttcgtgcagggccttgaagcagctgccgtagaactccttggtgaaaagaccggccgcatgccccaggggatcggtacagtcgttgataatcagatcgtagtcatccgatttggtgcgcaggaatttcagcccgtcctcataaaagacatgtacgcgggaatcccggaggccgcaggagttgtcgggaaaatatttgcagcagacgtccacgaacatcttgtccggttccaccacgtcgatgacctcgatctcgtcatactgggacagctcacgggcaacgccgccgtcgccgccgcccaggaccagaacccgacggacgttggggtggacagccataggaacgtggacgatcatctcgtcgtaggtgaactcatctttctcggaaaagatgacactaccgtcggaagtcagaaaccgcccgaactcgggggaatcaaagacgtcaatgcgctggaactcgctctgaccgctgaacagctgctggtccacgcggatgctcattttgacgttgtcggtgtgcagttcgccgaaccagaggtccatatcctgcatacgatcactccttcaacacatagagatgagaaatatccgagcttgccggtccctgcatggagcagcccttttccttggcaaaccggatgtaatccaggatttccttggtaatgacctcgccgggggccagaatggggattcccgggggataacacatgacaaactcgctgcagatgcggccggcggtatcctcgatgggcagatattccttctcggcatagaaagcccgctggggcgtggcagccaccacgggagtgatgtattccgaagtgaagatgttggtctccggcttggaatacagccgcttgatatcggccaaggcaccaaccaggcgctcaatgtcctgaatgcggtcgccaatggaaatatatgccagcatgttggacaggtcgccgaactccacctgaatgtcgtactcgtcccgcagaaggtcatagacctcaatgccggtcaggccgataccacgggtgtagacagccagtttggtaacgtcgaagtcatagatgctgccgccgttgatgagttcggaaccgtaggcataatagccgccgatctcgttgatctcacggcgggcatactcggccatatccaccacgcgggagaaactctcggccccgcgcagggcgagattccggcgggaaatgtccaggctggacatgagcagataggatgcgctggtggtctgagtcaggttgatgacactgctgacatagccctcgtcaatgttggggccgaggagcagcagggaactctgggtcaggcttccgccggacttgtgcatggatacggcagccatgtcggcgcccgcacgcatggcggggcagggcagaccggggccaaaatacaggtgggtgccgtgggcctcgtccaccagggccagcatgttgtgctcatgggccagcttgaccagagatttcagatcggagcagatgccgtagtaggtggggttgttgataaagacagccacggcgtcggggttggcatccatggcagcgcggacgtcctccacttccatgccgaggggaatgcccagacgcttgtctaccttgggatcgatataaacaggggtcgcaccgcacagaaccagcgcgttgatagcgcttttgtggacgttgcggggcaggatgatcttgtcacccggtttgcaggtggaaagcaccatgctctgtaccgaggacgtggtgccgccgaccatcagaaaagcgtgagccgcaccgaaggcatcggcggccagttcctctgcgtcccgaatgaccgagacgggatggcaaaggttgtccagcggcttcatggagttgacgtcgatgccgacacatttttcacccagaagctgaaccagctccgggttgccgcggccgcgtttgtgacccggcacatcaaaaggcacgacgcgctgccgccggaaacgttccagcgccgtatagatgggcgcctgtttttgacgctctttatccattcacattcctcccggacggtccccgtaccgaatttatagccgattttgcttgcgcctgactggcgggcaaacaaaaagcaggcagcgcccgacaaacgcggcactgcctgcgaaaagacaaacaggacataaaacgcccctcgcccgggtagttgccggggagaagagaggccagcatccggttgcccgatccgtacacttcagagtctatttagcaaatatacttttactactcttattgacgtttcacaagtggtgtgcgattgcacgggaaagtaaggaccaacttataaaatttgaacccatcaacgccgggttcatcaataattgcggtgctttacaccgcacgcggcagcggccagccctgtccgatgagctttaggcgtcaaaaaacgcccggccaaatatatttgcatggatagaagtgccttggcaacatctatgcatagcaacttaattttaacatggattttgtgcttgtcaaccgttttcagactatataaagggatgcccggggcaatgccgacaataacaaacaaaaaatgccgcccgctcggcacttttgccggacgggcggttgtttgtacgaatgatgcttaggaaaccgataaaagagatgtccccaaatatcggccatggccgataaaaagatgccggacagtctgcggcgttccaagtttgtgtgacttggaaaaatgaagaaatctcaatgctgtgatggaccagggaaatgtatgaagtgtattttggattttgtgaaaaccggtctctctccaatgtcagaaaacttaccggtgtctgcgccataacagcacggcacaaatgacaaagccgatgcccagcagaagagccgcaatgcagaaaacaatcccgggaatgtccgggccagtcaccagaatggaggtcggtccgtcagcgcctccgatgacccccagagtggcagcgggggtgataaggcaggtcagtaacgttccgacggcagccccaaggcaaacgacggcagccagaaccagtacgataaccccggcgaaaacagcgagtcgaggccgactcttgcgcggctcggcaagcggggcttgcccggtgggggcgtgctctgcctcctgcggcgtgccgctcagctccgacacggaacagccgaagatccggctcagtgccagaagattggccatgctgggcagggaagcaccccgctcccatttggccactgcctgccgggatacatcgagcttttcggcaagtgcttcctgggacagaccctgctgcgtccggaaactgcggatccgtgcaccgagggtctcgggctccgggatcgggccggtataagagctctgatagttagtatcatggtcgttcatgtttttgttccgcctttcccgggccggagacaaaccggcaccgtatctgcattcagtgtagccgagccctgccggacagacaagaaaccgactgtaaactattggttgcgcagccggaattttgccttggccggggccgtctctcagacgccgcgtgcttttttgctgaattcgcagccgcagtagtcctggcggtacagtccgtactcggtgctcagggtaaggctccgcttgtagccgtcccgtttgcggaactcgctttgcagataattcagctcgtattgctccgccagctccataccgatggtgttgagccgtaccgggtctttgaccggcgagatggacagagtggtggtaaaccacgggaaatcatgttccgctgcgtaccgggcggcacgctccagccgcagacggtaacacacggtgcaccggctgccccgttccggttcctcctccagtccacggattgcatcataaaattcctgtggttcatagggaagttcaattacggggataccctcgtaaccggcatcgtgtacaaaacgttccagttcggcctcccggcggtggtattcggcagggggatagatgttggggttgtaatacaggatagaaagctcaaaatgtcctgcaaggcgttccagtgttgcgctggaacagggagcacagcaggcgtgtagcagcagcctggggcgctggccttccgcggcaaggcggtcgagcactgtctgcatctcgcggtcataattgatacggtttgccatggtttgaaatctccgtgtaaatggaatttatggtaagaaagagcgccggctgccatcgatgcgaaggcgaggcggtcctaggctttgcaagaaacatcaccgcaatatcaatgtcacacagcacggcggggcttgccggttcggccaggctctttcggtggcgcgccttgcttttggaacttgaaattttcagcgttcacaattcattataacttctttcgtaaattcttgaagtatctgtcacctttttgtcacaaattggcagtattctaaacgtgttcccaaaagcaaggcgaacagggacgcctggcaggaaagacagggctttccggaaacgggaacgaacgcttctatctttttcatctccactcctctttctctttcttttttggttagaaacagcgcgccggaacagggaccggcgcgctgtttctttgtgtgtgccggccttatgcaagaaaagcaatgggagaaaaacggcgctttttcggaagcggaaatcatctgacagaaaaaggttttttgttcacacacggttcaaaaaaggaaactatactggtaaagggttcgggatatcttgctaattttcgcatattgcggtacaatatagtgatttattctgtaatccgccgtcgaaatccgacatgatcggaagctggcggtgattctgatacgccgccgcgtttccttcacgaaatgcctgtgcggaatagaacagaaatcctccccggtgagccggagactcctccggccggcttgggacggtacggctttttgaggaggtttttgtagaatgagagtcgggctggatattggttccaccacgatcaaatgcgttgtcctcaacgacgcagacgaattggtttactccacctatgaacggcattacagccatattttggagaaaggccgcgagatcctttcccgtattgattccgactacctgcatggggaaaaggcactgcttgccatttccggttcggcgggcatgggcctggccgacagctgcaaggtttcctttgtgcaggaagtctttgccacccgcgtggcggcaaaccgtcttgcccccggcaccgattgcatcattgagctgggcggtgaggatgccaagatcctgtttttgaccaacggcaccgaagtccgtatgaacggcagctgtgccggcggtaccggtgcgttcattgaccagatggccacgctgcttaaaatgtccgcagatgagatggacaaggccgcgcagaatgccacccgtacttataccattgcgtcccgctgcggcgtctttgccaaaagcgacattcagccgctgatcaaccaaggcgcactggcaggggatatcgcccggtccatttatcaggccgtggtcaaccagaccattgcaggcctggcccagggacgccctatcaaaggcaatgttttgtatctgggcggcccgttgactttctcgggcgtgctgcgtcagtgttttgatgagacgctccatgtcaagggtgtctgccccgagaacagcctgctttacgtggcattgggcgcggcctactatgccgaccaggcctttgacttcagcgaggtctccgagcgcctgaacgagtacagcgccaccgccacctatgccagccagccgcccctgttcgccaataaacaggagtacgaggagttccacgcccgccacatgcgggcgacggtgccttgcgtccccttcggtgtggactgcggcccggtgcatatcggcatcgactcggggtccacgaccatcaagctggtggtgatcgacgataacagcaacatcctgttcaccagctaccagcctaacctgggcaacccggttcccatcgtccgggatgtgctgaccaaactgtacgagaatcaccccaatctgcatatcgccagcgtgaccaccaccggctacggcgaagccctcattcagaatgctttccatgccgatttcggcctggtggaaacggtggcacacttcacggcggccaagtacttcatgcccaatgtggatttcatcatcgacatcggcggccaggatatgaagtgcttcaagatcgaggatggcgccatcagcaatatcttcctcaacgaggcatgctcctccggctgcggcagcttcctgcagacttttgcggaagctctggggtataacgtcaaggaattcgctgccctgggcctgtttgccgaccggcctgtggacctgggcagccgctgcaccgttttcatgaactcctcggtcaagcaggcccagaaggacggcgccagcatcgagaacatcagtgcagggctttccatctcggtggtcaagaatgcgctgtacaaagtcatccgcgcgtccagccccgaggaactgggccgcaacatcgttgtgcagggcggtactttctacaacgaagccgtgctgcgtgcctttgagaaggaaatgaacgtcgaggtcatccgccccgatattgcaggcctgatgggcgcttacggtgctgcgctgcacggcaagagcaaggtggcccagggccatgtcagcagtgtgctgacccaggaacagctgcgcaactttgagcagaaggtcacctccgtccagtgcaagggctgcggcaaccattgccagctcaccatcaacatctttgcggacggcaagcgctttatttccggcaaccgctgcgaaaaaccggtcaccggcaaggcgtccgacgaatccatggacctgtacgcctataaactggctctgctgctggattacaagccggtcaagggcagccgcaataaaaagatcggcatcccgctctgcctgaatatgtatgaactgctgcctttctggcacagcttcttcacgaccctgggctttgaggtcgtcaccagcccggtgtcctcccgcgctctttaccaggagggccaggcgaccatccccagcgacaccgcatgcttcccggccaaactggcccacggccatattgcggagctggccaagatgggtgtggacgccatcttctacccctgcatgacatataatatcgacgagggcctggggcagaaccattataactgcccggtcgttgcctattatcccgaggtcctggcaggtaactgccccgaactggagaacattccgttcttctatgagtacattgatatttcccgccgcaaggattttaccgcaaagatccccaagctgctggccaaatacttcccggatgtgacccgcggagaggtcaagaaggccgtcgacgctgcctatgctgagtacacccgccacatggcactggttcggcagaaaggcgagcagatcattgaaaaggcccgtgccgagcaccgccgtatcattgttctggccggtcgtccctatcatgtggaccccgaggtcaaccacggcatcgacaagctgattctgcagcagggggctgcggtggttacggaagattcgatttccgaccgcgtgcagcccttcaagacctcggtcctcaaccagtggacctatcacagccgtctgtatgccgcggcgcggtactgcaccacccagcctgatatggacctggtgcagctggtctccttcggctgcggcgttgacgccatcaccactgacgagacccgcgagatcctgcaggaaggcggcaagctgtacacccagctcaagatcgacgagatcaccaacctgggcgcagtcaacatccgtctgcgcagtctgtttgcggccttggacgagaagtccggcaaagtctgacgcacgcttttcgggatttatcacaatagcgagggaacctgtatggaatataccacacccaatttcaccaaggacatgatccatacccacaagatcctgatccccaacatggcggtgacccagttccgcctgatggaggccgctctggaaaaggagggctatcaggtcgaggtcctgggcaactgcggcagcgaggtcgcacagctgggcctcaaatatgtccacaacgatacctgctacccggcgctgctggtcatcggccagttcatcgacgccctcaacagcggcaaatatgatctgaaccacacggctctgctcatcacccagacgggcggcggctgccgtgcttccaactacatcagccttctgcgcaaggcactggtcaaggccggctacggcaacattccggtggcgtcgctcaacttctccggcctggaaaaggacagcggcatccccctgaccgccaagctgctgcgcaaggtcattgcagcgattttctacggcgacttgctggccagcctgcgcaaccaggtccatccttatcagaatgaacccggcgccgccgaggctatgaccgaaaagtggatcaagaccatccagggctggatgcatgaggataaatactacagcgcccatgatatgaaggcgaaattccccgacatcgttgctgattatgccgccatccccattacccgggtgcccaaggtcaaggtcggcgttgtgggcgagatttacgtcaagtattcgcctctgggcaataacgatctggaaaagttcctcgagtctcaggactgcgaggtcaacctgcccggtctcatgggctttgtggagtactgcatcgccaactataccatcacccagaaactgtacggcggcaatgtgatcgttgcaggcggtgcggatgcgctgcttagctggctggattccatcggcaacgccatgaacgccgctttgcgcaagtacgggttctatgcgccgggctcttttcgggaactgatggaaaagcccgagggcatcgtctctctgggcgcaaaaatgggtgagggctggctgctcactgccgagatgatcgagctggtggagggcggctatgccaacatcgtctgcgctcagcccttcggatgcctgcccaaccatatcgtgggcaagggcatgatcaacaagatccgcgccctgcatcccgaggccaacatcacccccgtagactatgaccccagcgctactcgtgtcaaccaggaaaaccgcatcaagctcatgctggctgttgccaaagaacgcctgcagagcggtgccgccgagacttcgtccgttacggcagaggaccttgcgggcggtgcgccgtctgtcaagactaccgtcccggctggtatgtaacttttgaaacaataaaaagcctccgcacaccgttcgggtcaagcccgatggtgcgcggaggctttttgcaaagtaaaacgatcaaacggttttggccggatcgatggctcggtagaatctacgtaccaggaagatgatgcagacgaccagtacggcagtcagcagttcagaggtccacaggccgatcataccggtctggtacattgcggcgggtacgttggacaccgcatgcagtgcgatggaaaggggatatccccacatgggcaggcgcttggtaacgaccatccagatcagtacggacagggcaatgtgcatgctgatggcgatgatgcgctccacaccggcagccaggaaagttgtggacggaagcgcggcaagctgttccaactgtgccatgacaaggctggactgttcctcggtggcgcccgtcagcagcgaatccacgctgccgccgtttaccgtgagcatgatgataaagttgttgagcacagtgacgccgaccagcaagatcgcctcgatgccgccatggccgacaccgtaggaaaaaccggtgacaggggaggcgtcccgcttgcacaggaaccgcagaccgatcaggcgggcggtctcctcaaacagaccggctgccagacagccatatacaatataaaggagcgcgttttccgtcagtccgggaatgatggcaagtaccagctgatggaaagcggattccagcacgatcgctcccagagtaaaacataccgcgccgacagccacagcaaacaaggcgttgcgggaacggcggcagcaaagtactgccagcacaataggcagtgcaaaggcaattaccccggaaatgccggtgaaaacgacgctgagggtgggaaaggcaagcgtagtcatcataaagattcctcactttacaacaaagattagaagattgtctaaatctttgagcattatacacgcttgcctttgggatgtcaatccgcggtgccggtagcgctgaccacagcggcagacagcggggaagccgatacctccgcgttgcgggaagccgaccggcatccggccacgatgcttgcaaacagaatggcagctgccagcaaaagggtcccggccagtaggacggggatgaatgcgagccgtcttgtcagtttcatagtcgatccctccgaattggctttgatggcttgccgcagagttccgcggcctttgccttccgcagctgtgcggtatctgtggaaggcctttctatctattaaaacgacggtagctgccgctttgttacaggttcgacgaaaaaagatctgatattgaacgggtagccggacagatgaaaagcagtccaaaaggataccgggaatttccttccgcttttctcaaaaaatggttacaaaaggggtgagtggggctgcaagaaggaaaaaacgggcaaaaaggccccctgaaccctgctttttgccgtaaaaatggcaaaaagacttgcattttcaggggctgtgtggtatattcctattgttcgatgattacttgaaagtgggccgtgcaggtccgctttctttttatgatgggggctgtttgatggaaaaagccaaaaaaggacagggctcggcaggcgcggcggcgaccgtggaaaagctggtccggccgacgatcgagagcatgggacttcgcctttgggacgtccgctttgaaaaggaaggcccggactggtttctgcgcgtcctgatcgaccgcgacacgccgctggacaccgatacctgtgaggaagtctcccgggcgatcgatcccattctggatgaggccgatcccatctcccagagctattatctggaagtgggcagccccggccttggccgccgcctcaaccgtccggagcactttgaacagctggcggggcagaaatgccttgcccacctgattcgccccgatgcccagggccgccgggaaatctccggtgtcctggagggactgactgacggcagcgtcacgctcaacaccgagcagggccctgtcacctttgccctggacgcggcaagctacgtcaagctctgcgacgacgaagatctgttctgaatttccgcagccgtgcaaaaataccgcgcggtctgcgcatacaatgcctttgaacgagtaccggctgtattatgattttgggaggaaaccgaaaaaatggctactgcaaacaacaacgagttttttgaggcacttgccgcactggaaaaagagcgcggtctgcctgccgattacctgatcgaaaagatcaaggcggctatcgtgattgcggtcaaaaaggattacgaggtcgaggacgagaacgtcatcgtcgatattgacccctccatcggtgcatttcgtgccagcctggcgcgggaaatcgttgaggaagtggagaatccccacacccaggtcaccctggaagacgcccagcgcgtgcgcaagagctaccagatcggccagaagttcatcacccagctcaagaccaaggagttcggccgcatcgccgcgcagactgccaagcacgtgatccgtcagggcatccgcgaggcggagcgcagcgctcagtgcagcgagatgcagtcccgtgctcacgagatcatctcggcaacggtcgtttccatcgatcccgagcgcggcaatgtgacgctggacctgggcaagggcggcagcgctgtcctgccccgcaacgagcaggtccctggtgagcactacaccgagggcgacatcctgcaggtttacgtggtggacgtagttcccaccgagcgcggcccccgcgtgaccatcagccgcacccatcccggcctggtcaagcggatgttcgagctggaagttcccgagatctacgacggtaccgtcgagatcaaggccatctcccgcgaggccggcgcccgcaccaagatggctgtgtacagccgcgaccccaacgttgacccggtgggcgcctgcatcggctctcatggttcccgcgtggagaagatcgtggaggaactgggcggcgaaaagatcgacatcatccgctggagcgaagatgtctccgagttcatcagcgctgctctgtctccggccaaggtcgtcaaggtggagctgctgcccggtgagaccaagagctgccgcgtcaccgtgcccgatcaccagctcagcctggctatcggcaacaaaggtcagaatgcccgcctgtgcgcccgtctgaccggctacaatattgatatccggcccgagtccggctactatggcgaggaataagccgtggcacggataaaataaggatcggggcagggccccggccaaatgtttgttggaaaagaggtcagctatttgcagcaaaaaaagatcccggtccgccggtgtgtgggctgcaacgcccaaaagcctaaaaaagagctggtgcgcgtcgtgcgcgcccctgacggaaacgtcagcgtcgatctgaccggcaaaaaagccggccgcggcgcttacctgtgtccgtcggctgcctgcctggcaaaggcacgcaaggccaagcgcttggaaaatgcgtttggcgtcagcgtgccggatgatgtgttcgcgcgcttgacggaggagatccaatgcgcggaacagatggcaaaggaggcggcgctccatgaatgaaccggaattgctgctgggggcgcttggtttgtgccgtaaggcaggcagcctgctgcatgggtatgaccgtgtctgtgatgcggtctatggcggcaaggcaagcctggtcctgctggcttcggacgccagcagccgcacggcatcccatatccgcgaagtctgcgcggacctggtggattgccgcgccatgcccctgaccatcgcacagctcagtgcattgaccccgcgtccggcggctgtctttgcggtaacggacgagaacctcgcccgcctgtgcgccaaacacctgacccaagagaaggaggaacctgcccatggactttaagtataagatcagcgatgttgccaaggattttggcatttcgaccaagaaggtcatcgatatggtggcacagatcaccggcgagaccagaaagaccggcggtaccgttgacgagcaggagctcaatcacctgctggaaaagctgacccgcgataacgcggagagcagcctggacgcttatttcgcatcccagaacgaaaagaccgaggagcccaagcccgcccagcccaaacaggcaaagcccgccgagaaggctcccgccaagccggccgagcagcccgcccccaaggcagaggagaagcctgctgcgcccgctcagcccaaacccgccgagcagcccgcagccaaggagcagcccaaacagcagcccaaggccaacgagcatcgccgtcagccggagaagcctgccgagaagcgcaaggaaaagcgcgtcaccatgcaggccctggcagcggataccggtgtgcagcgccctgtcaccaccgagaaggtggaagtccagcgcgcccgcgttcaggtcgacacccgtacggtggatgtcaatgttgacaagttcagcgcccgttatgacgatctggccgacagccgcaacatgcccgccaagcgtaagaaccagcccatgggcaacaagcagaagttcaacaacaagaacaagggccgcaaccagtatcagcaccgccgcgagaccgaggcggagcgcctgcagcgcatccagctggagaaggcccgcaacgcccagctgaagatctccatccccgacgagatcaccgtgggcgagctggctacccgcctgaagcagaacgttgccaaggtcgttgccaagttcatgcagatgggcgagatgcactctgcctccgacgtggtcgatttcgactccgccgctctggtggccgaggaattccacgccaaggtcgagcgtgaggtccatgtctccatcgaggaacgcctcttcgatcaggaggaggacaatgccgccgatctggtcgagcgtccgcccgttgtcgttgtcatgggccacgtcgaccacggcaagacctccattctggatgccatccgcaagaccaacgtcactgctggcgaggccggcggcatcactcaggccatcggcgcctatcaggtcaagtccggcgacagcgtcatcaccttcctggacacccccggccacgaggcattcacctccatgcgtgcccgcggtgccaatatgaccgatattgccgtcctggtcgttgcttccgacgacggtatcatgccccagaccattgagtccatcaaccatgccaaggcggccggcgtcaagatgatcgtcgccatcaacaagatggataagcccaccgccaaccccgagcgcgtcaaggaacagctgaccaagtacgagatcgttcccgaggactggggcggcgacgttgcctgcatccccgtgtccgctctgaccggtatgggcatcagcgacctgctggagcgcatcgttctggaagccgaggtcatggaactgaaagccaaccccaaccgccgtgccaagggcgctgttgtcgaggctcgtctggacaagggccagggcactgttgctacgctgttggtccagaacggtaccctgcatcgcggcgattgcctgatcgcaggttctgcggtcggccgtgtccgtactatgcgaaacgacaagggccaggatattaccgaggccactccctccatgcctgttgagatcaccggcttgaccgaagttcccaccgccggcgatatcttcgaggcggttgccgacgagcgtctggcccgtgagctggccgaccgccgtaccgccgaggccaaggagcgtcagtttgctgcctacaccaaggtcactctggataacctgttcgatcagatggcccagaacgacatgaaggaactgcccatcgtcgtcaaggctgacgtccagggctctgccgaggcggtcaaacagagcctggagaagctctccaacgcggaagtccgcgtccgtgttatccatgcgggcgtcggtgccatcagcaagtccgacgtttctctggcggatgcctccaacgccatcatcatcggcttcaatgtccgtcccgacgcggtcgccaaggcggaagccgagcaggccaaggtcgaaatgcgtatgtaccgcgttatttacgacgccatcaacgatgtttccgacgctttgaagggcatgctcgctcccaagatccgcgaagtcgccctgggtgaggcgcaggtccgtcaggtgtacaagatttcctctgtcggtatggtcgccggctgccgcgtgacctccggcaagatcacccgcgacgctcagctgcgcctggtgcgtgacggcatcgtcatctgcgaggatgccatcgcctccctcaagcgcttcaaggacgacgccaaggaagtggccgaaggctttgagtgcggcattacgctggccaagttctccgacatcaaggaaggcgacgtcttcgagtgcttcaagctggaagaatatcgcgactgatccgggaaagacggcgtcctgccggatttcccacgaccgaaaaataacaaagaatctctgtacggcggcgggcaatgaccggccgcagcacagagcgtaaggaggcgacaaggatgcccaccaaaaatcagggccgtatggctcaggatatgaaacgcgaactgatcgacatcatcggtcagatgaaggacccgcgcatcacgggcggtttgcttacggtgacccgcctggatgtcacgcccgacttggacgtggccaaggtgcatatcagtgtaatgggacgcgagggcggtgtagagccggtcctcaaggcactcaaccgggcgtccggccatgtccgcaccgaggtgagccgccggatgcacatccgcaaggctccgaagtttgtctttgtggcagacgacggtgcggcgtacgcggcccatatcaaccaactgctgaagcagcttgacgacaagcatcccgctcaggagacctcgggcacggatgcggcatccgaagagtaatcccgcattgtccgcggacagcgggggaagccgggctttttgtaccggcctgcggatgaacgccaagctataagaaaagaggagcattatgaccgaatctctggatcgtcaaaccgccgccgcaaggctgcgtgccgcagacgatatcctgatcctgagccacaaaaatccggatggggatacgatcggcagcgcgctggggctttgccttgccctgcgtgcgctgggcaagaatgctgcggtgctttgcagcgatccgattcccaagatgtatgaatatctggacatcaactggtatgacggcagctatgaaccttcctttgtggtggcggtggatgttgccagcatccagctctttggcgagaacaacaatgtccaggaatatgtcaagcgtgcaaatctctgcatagatcatcacggttccaacagcggctatgcctatgcaacgctgctggagccgcaggctgccgctgtctgtgagatcctgaccgatctcatcccagacaatctgggtgtgccgctgaccccggaaattgccaactgcctgtataccggcgttgcaacggataccgggtgcttccgctttaccagcaccacggccaagacccaccttgcggccgcccgcctgatggaagccggtgccgatgcggggcgtctcaacgagatcttgtttgagtgccgctcccattcccgcattgaggcggagcgcgaggcgctggagagtctcgaatattacttcgacgaccgctgcgccatgatctgcctgactcgggaccagatcgtccagaccggtgttgccaatgccgagctggaggacctgaccagcctgccgcgctccattgaaggcgtggaggtcggcctgaccctgcgtcagcagccggacggcagcttcaagatcagcgtgcggacctccagggatgtggatgcctgttccattgcacggcgtctgggcggcggcggccataaccgtgctgccggctgcgagatctcgggcaacctggacaacgccaaacgcgcgatccttcaggaagtgcagaaagaacttgcccgctgcgacgaaaatcgcagggaagaataaggctccgggcttcttatccgaaaatccatatgaccgaacgggtgacggcctgcatggctgtaaggcggcctgctcggtcttttttatgtaaggacgacattgatgaaaaacggaattctgcttgtagacaagccggcgggctggacaagctttgatgtgctggcaaagctgcggggcgttctgggaacacgaaagctgggacattcgggaacgctggaccccatggctaccggcgttctggcggtatttgtggggcgcgccactgccgcggcggaccgtcagctcaaccatgacaaaacctatgaagctaccatccgccttggtgtccgcaccgatacgggggacatcaccggcacggtgctggaaaccgcaccggtcacggtgagcgaacaggattttgtggccatgctgccccgttttgtgggagagcagcagcagcttccgcccatgtattccgccgtcaagatcaacggccagccgctgtacaaggcggcccgggcaggaaaaacggtggagcgtaccccgcggtccatcaccgtctattccatcgactatctgggaacggcaggagaacaggaataccgtatccgtgtggcctgctccaaaggaacttatatccgaaccctggccgaggacctgggcaaggcgctgggcgtcccggccaccttgtcggcgctgcgccgcactgcggcgggcgtctttgagattgccgatgcccataccatgccggagcttttgcaggctgcccaggagggtggcgtgccggaaagctggctgctgggagtggataccgtattttcgccgctgcctgccttgaaggtaggggagaaggtgcgtgttcacctgttcaatggctgtcctaccagccggtatccggcggcggatggccgttaccgcgtttacagcgaggatggcggttttctgggcctggcccaggtctccggcggcgtgctgacggtagaaaaactgttttgtgaaagagagtgagtcgaaatgcacattttggagacccttgcgccggtggatgcaccgaaggggagcgctgtggcgctgggcttttttgacggtgtgcatcttggccaccggaccgttctgcagtcggcagtggactatgcggccgctcacggcctgacgccggcagcgttcacctttttgctgcctccggggaatgccctgaaaggcggacgcattttttccgtggaggaaaaacgccgccgtattgcagcgctgggcatagagcagtatcaggaagccccctttgccgatttctgcgccctgtctccggaggattttgtccgcaaggtccttgtggaatgcttctcggcccgggcagtattctgcggggataactttacctttggcgcccgcgcggcgggggatgtggagatgctccgtaaactctgtgaaccgcagggaattcaggtctgcgttgttgagatggagcagtataaaggagaaaatgtttcctccacccgcattcgagctgcgttggaagcaggggagatggaagaagtcaacgccatgctggggcagccttatgccgtggactggcccgttactcacggaaaaggcgtcggaacttcccggctgggcacccctaccatcaaccagaattatccccagggagcactgcagccccgctgcggcgtgtatatcacccgcatccagatcgatggctgctggtatcctgcggcaacgggactgggccgcaggcccaccgttgaccaggaggatgccccggtcacctgcgagacttatgtcccgggcttttccggagacgtttacggtacgagaccccggctggaattccatcggtatctctgcccggtgcggaagttcaactctctggaggaactgcgcgccctgatctgcgatgcggcgcaaaagagctgtgactatttttcgcaaaagtaatgcacgtcccggactgcttgaagcccaggacgctttccgtttgagctgttttcaggacagctgcccaaaaggagaattgccatgcagccagacaagcaaatgaatcgcgggggatgcttgggaaaactgtaccggccggtcggctggtgcatcgcctgtatcactgccgtattgctggcgctgctgtgctttatggcgctgcggcacagtgctgcctttcatcacgaagagtttcaggaacagatgacggttgtcccggtggatacggtacagattttgctgacagccttggtttttggggcggttgccgttgggatcggctggctgtcaacaaaaggaaaacggggacagaccctgctgattgcgatcgcatcggcaggtgtggtgctgctgggctgcgcatggagcctttcgatgcacggccatcccgtcgatgaccagaaaaaggtctgggacattgccgtggcgttggcaaacggcacgacggacggcatggattttgactatctcatcatgttcccgtatcagagcagtatggcgctgttctttgaaccgctcgcgcgtttgtttgggcccgatccctatcccgctttcggaatcttcaatgcactgtgcgcaggggcctgtgtctgggcactgtgttccatatgcgcgctgctctggccggagaaaggcgccgcagggatttgcgcggtgctttgcctggcctttgtcccgctgccccttatgtcgggatttttgtacggaacgctggcggcctcggccatggggctgtgggctatgtatggcgtgctccgtctttgcaggggcgagtctgcttggtggtggcttttgacgctgatgctcccccttgcggtggtttgctacaacggctcgctgctgtttgcggctgcggctttttgtctgcttgcggccgacggactgttgggcggcggcaaaaagggactgttgtatcgcttgctgccggcagtgctgcttcttgcgatttgcatgaacgcctccacctgggcggggcaactctttacctggcggacgggaatccagctgggtgacggaatccccaaaacggcctgggcggtgatgggccttacggcagaaaacaccaattccgggccgggcggctacaacagctataccaaactgctgttttgggagaacaatgcagacagtgcagcaaccagtgcggcagccatgcaggacctgcgggagtatctggccagctggcgggatactccgcacgaaaacttcggatttctgcatgaaaagattaaaacggaatggctggacccctggtttgacgccctgacgggatcttatcatcccgaggtggatacccccggcaggtttgcatcgctgctctgcggcggcagcctgcttgcaccggtggaagatttcttgcgggccgtgctggcgctgatctatggcatggccggtttcgggacccttgctctggctgtacgcgggaaaggagagatttggaaacaggggatgggcgtctgctttttgggctgcttcttgttccaggtcgtgtgggaaaaccacagccggtactgcttcccgtatttcctgtgcctgatcccggtggccgccgccggactggcgcagctggcttctgcggtcggcggatttgtccggaaaaagggcctgttccgtaagcgaaatagtcaagagacggcagctcaggacgcaatggcggaagccgtgtgaaacggggaaaggcaaagccgtaaaaatcaagtaaattttccttgtaaaaagcagcgccatgtgatataatctaggcgttaccgcggcccggctttgggtgtatgccctgcggcggtccctccgccgcgaaagggaaccttgctgcccgttgctgcgccgttggcaaatcttataaaaagagagggtttcatcatgcaagacaagaagacgattatcgaaaaggctgcgatccacgagggcgacaccggttctcccgaggttcaggtcgcactgctgactgctcgcatcaaccatctgaccgagcatctcaagaccaacaagaacgataaccacagccgtcgcggactgttcaagatggtcggccgccgccgtaacctgctggcctatctgcagaagaaggacatcaatcgttaccgcgccctgatcgctgagctgggtctgcgcaagtaatcttgcaaaacggtgggcaggacgcacaaggttgcgccctgccctctttttatattttcttcaaggaacccgggtccatccaacgtggttttgtgcagtaaatcgaacgcccgtacagtgacagacggacgctggatttattgctcaaaaccgggatgcgcccttgttatagccccgcgggcggagccgccgtaccgcaccaaaccccaaaagccaaggaggaaatacgaatggcactggaatttgcatcccgcaaggaaacattccccaactaccgcaagtatgaaaccacgtttgcgggccgtccgttcattgtcgagaccggcaaaatgtgcggactgtccaacggcagtgcgatgatccgctacggcgagacctgcgtgctgtgcaacgtcaccatgagcgaaaagccccgtgacggcatcgactttttcccgctcagcgttgagtttgaggaaaagctctacgccgcaggccgcatccccggcagcttcatgcgccgtgagggccgccccggtgagcatgcgatcctgaactcccgcgtggtcgaccgtcccatccgcccgctgttccccaaggatatgcgcaatgacgtctgcgtcaccatgaccgtcatgagcatggatcccgacaactctcccgagatcgccggcatgaacggtgcatctctggccatcgccatgtccgacattccctggcgcggccccatcggcggcatccaggtcggcctggtggacggcgagatcgtcctcaaccccactgccgagcagcgtgagaagagcgacctggccctgaccctggccgcttccgaggaaaagatcgtcatgatcgaagccggcgccaatgaggtggacgaggacaccatgatggccgccatcaaggctggccatgccgagatcaagaagatgctggccttcattaactccatcgttgccgagatcggcaagcccaaggccgacttcccgtccatggatctggaccatgacctgctggctgacgtcaaagcccgccacctggatcagttcaaggctgccatggataccgacgacaagaacgtccgtgacgcggctctgctgcctatcatggaccagatcgccgaggagcatcccgagctggacgccgccaccctggattatgtcagctacaagatgcagaagcaggtcgtccgccgctggctgctggacgaaggcaagcgtgttgacggacgcggcatcaatgagatccgcccgctggctgccgaggtcggcatcctgccccgcgtgcatggttccggtatgttcacccgcggccagactcaggtcctgaccatctgcaccctgggctccaccaaggacgcccagatcatggatgacctgtctgataccccgctcaagcgctatatccatcactacaatatgccgccgtactccaccggtgaggcccgcgcaccccgcagccccggccgccgcgagatcggccacggtgcactggcagagcgcgctctgatccccgtgctgccttccatggcggatttcccgtataccatccgctgcgtctccgaggttctgtcctccaacggctccacctctcaggcttccatctgcggctccacgctggctctgatggatgcaggcgttcccatcaaggctcccgttgccggcatctcctgcggcctgatcaccgagggtgaccgctggatgaccatgctggacatccagggcgtcgaggatttccacggcgatatggacttcaaggtcggcggtacccgccgcggcatcaccgccatccagatggacatcaagatcgacggtctgacctacgagatcgttgaggaagctctggagaagtgccgcaagggccgtctgttcatcctggacgagatcatcaagccctgcattgccgagcctcgcgctgagctttccaagtatgctcccaagatgttcagcatgcagatccccgttgacaagatcaaggacgtcatcggcaagggcggcaaggtcattcaggatctgtgcgctacctgcaactgcaagatcgacgtggaggaagacggccatgtcttcatctctgccatcgatgcggatgacgccaagcgcgccatctccaccatcaagaccattgtggaggaccctgaaatcggtgctatctacaagggccgcgtgacccgcctgatgaacttcggcgcctttgtcgagatcgctcccggcaaggagggcctggtccacatttccaagctggatgaccaccgcgttgagcgcgtggaagacgttgtcgctgtgggcgaccccgtctttgtcatggtcaccgacatcgaccagcagggccgcatcaacctgtcccgcaaggacgctctggctgccatcgccaaaaagcgcgccgctcagggcaagtgatttttgatccttaaataaaaagagacggaccattcggtccgtctcttttttatgccgtgcgtaaaatgttatatgcccagtgccaatacgatcatggggagccagagacaccacagggtcaaaaacaccggggggagcagcgctgccgcaaaggcccgaatcagctccttgccccgaagaccggaagaaatgctgcgcaccagccagagaaacaacatcagaatggcagcgccccgcccggcgtatcccagcacgaccagacagctgcagagaatgcccacgccttgggcgcgatgcagggcgggaagaggatcgtcagcggacgccagattcaaaatgaagagcagacaactcaatccgttgcagactgcggccaccgggagagataccgccttgccggtcacggcaaagaacatcagggcggcaagtccggcgccgcagaaaccggcaaggaacaggcggactgtccggcttgctttggaaaaggaaaagcgggcaatcacggcagagagggcggccagcggcggcaaagcagtcgtgaacaggatgctgcggctgttttcgccgggcgtccagatggcaaagagaaaatccagagcggacaggctgtcaccggagaaaagaaaatagccctccatgtggatgtcgccggaagcggcgcctgccgtcgcagtgaatagcgtcaacagtgccagcacggcacagccggtaataaatgcacagacaccgggggaaagcagaaagctcctggtcaggccgcgcttcggccgtaccgtgacgaggaccgctcccagaatgaatgcctgtgcgcccagactcaaaagcccgcagcatccggcggcagccagaacggcaatggcactgccaagcccaagggcaggggcaaaaccgtccgataaatgcatccggcggcaaagccaccagccccatgccagaacgcaaaagatcccgatgagatatgaggtgatcatagaaaccatttcaaggacatctcccttgtcaaaaacggccgttcagtcaattcgctttgcaatcacggcaagacgcttgtcggtggtggaactggtcgtaccgcatgtggacagcgtcagaagttggtcgccgtactgcgcggttacgccggtattatacaaagcaaggtccatgacagcctgatactttgcctgccagtcgcgctcgctggaggcatcaaagaaggtgtagtagggcagatcatctgctccgacttgggtgcggatgacggcaacgatctgccattgcatctcctcatacagtgtatcaaactcaaaggtcggatgttccttgtagaagctttcctcggcgtatttgtccagctggccgaacatgctgccgtcggacatattgtggccgtagatcagccagtttgcagtggaaggggacgtgatacggcaattctcgtccagaaacaggctgcccgccagagaatagagcttgtcaaacccgcggcggaggtaatactcgttgtcgccgggggtctgcatgacaggataatccacgccgatggcatcgatggtaagccaccccacaaggtcgctgttctgggcatacaggtcctgatacttgggcaggatagcgtcctccgtttccggggtgctttccggcgtctggacattctggggggcattcacggtagcgggctgtaccgttacggataccgggccggaggaggcagtttccggagttgcggttactcctatgggcggtttgggctgccctccgttaaagaaaatctgccggaccagaaaaagggcgaccggaacgatcagcgccagccccaaaagacgcagcaaaacaacgcgcatgcgctgcttttttcgcagcgaagtgcgcgcgccgaaaggataataggcggaactgcctttcagatgagcataacggccttttttgggcatagagaaaacctttcacgggaaaacagaatataagaaagaaaacagcctcctgccgataacggaagaggctgttcgatctacatcagatacgcttgagcatcaaaagtcctgcggagcagaacagaatcaagccgatcgcgcctgccatataaacaacgggtgcgtcgccagtggagggagtgggggaggaagtaactgccggggaagcggtctcttcaggagcgtccgttgccgccggtgtggcggtaggggatacgacatccgcgaccgcataagtttcatccaccttgaccggttcattgtgaacgtcgcgggatgtggtcgctaccgtcggtgaaggggtaggcgttgcgacgggagagttggtggaagaaggaatgccgcaagctgcgagcaaggcaagaaaaacaacggtaagcagaataccgacagtacgtttcaagggaaggtgcctccttttatatacacacaaacagcgcaccacaaaagggtacggcccgggcaaggccgcacgacagcgcgaatcaatctataatagacacaaacgccgaaaacggcggggacaatttatctatcgtacactaacttattttatatattatcacggggaaccctctgcgtcaagatgacatccaaaacggcagcgggttttacaggacgccggattgcgggaaaggcaaaggggaaaaagccctccggccatagcgcagtcacaaatttgacatggaacagggcttgtacaaaatccgcgcaggcagtataataaactaaataaacgctggcgggcggtctttttgtctgactgctgaccgcagtgaaggagtaacagcatgaaaggtatcattctcgcaggcggcgccgggacccggctgtatccgctgacaatggtcacttccaaacagcttctgccggtttacgacaaacctatgatctattatccgctgtccacgctgatgctggcgggcattcaggatattctcatcatctccacgcccacggataccccgcgctttgaggcccttctgggggacggcagccagtacggtgtgcggctgcagtataaggtccagccttctcccgacggccttgcgcaggctttccttctgggagaggaatttatcggcgacgactgctgcgccatggttctgggcgacaatatcttctatggtgcgggtttcagcaagctgctcaaggcggcagctgccaatgcggaaaacggccgtgcgacggttttcggctattttgtcaatgacccggagcgcttcggcgttgtggcttttgatgagaacggccatgcaacctccattgaagaaaagcctgcccagcccaagagcaattatgcagtgacgggtctgtatttctataaccgtgacgttgtgcgcatggccaagcaggtcaagcccagcgcccgcggcgagctggagatcaccacgctgaacgagatgtatctggagcaggggctgctggatgtgcagcttctgggccgcggttatgcctggctggatactggtaccatggacagcctggtggaagccgccgactttgtccgcatgatcgagcagcgccagggcatcaagatctccgctccggaggagatcgcctataaatatggctggatcacccgggataagctgatcgaaagtgccgagcgttacggcaagtccccgtatggcgcgcatctgcgcaatgtcgcggacaacaaacttatgtactgaaaccacagggccgcacggtgcacaggtgccgtgccggcccgattgttgcggaggctgatctatgaaaatcctgattaccggctgccgcggacagctgggaaccgaactccagaaacagctgcgtgagggcggctgcgttctgggcccgctgcccgagcggctgaaaaatgctccggtcgttgcggtggacctggaggatctcgacatcactgaccgggaggcgacaaccgcctatatccgcaggcaccagccggacacggtcatcaactgcgcggcgttcaccaatgtcaacggctgcgagaccaaccgtgatgcggcgttccgtgtcaatgcgctgggaccccgcaatctggccatggcctgcgacaaggtgggagcccgcctgatccacatttccaccgactatgtgttcagcggcgcgcccaacggcggcgttccccttgatgagtgcatgctgcctgcgccggtttcggcctatggtcagaccaagctgctgggtgagcagtatgtccagaagttctgccgccgccatttcattgtgcgcaccgcgtggctgtacggcactgccggcaagaactttgtcaagacgatggtcaacctggccaagacccatgacgagatcacggtggtggatgaccagctgggcaatcccaccaacgcggtggatctggcgtatcatctgctcaagctggcggtcagccacgactacggcatctaccactgcacctgcaacggtgtttgcagctggtatgatttcgcctccgagatcatccgcctgtcgggtgagaactgtaaagtaaaaccgatttccagcgttgagtatgccgctcagcacccggaatcggccaaccgccctgcatggagcgcgctggataaccggatgctgcgctgcactgtaggcgattcgatgcgcgactggaagatcgcaattcaagatttttttgcaagttgggatggtaactgaatgatgaaaacgtatcttgtcaccggctgcgccggatttatcggctccaatttcgtccattacatgctggaaaagcatgaggacatccgcctggtcaacctggataagctgacctatgcgggcaacctggaaaacctcaaggacttggagaacgatccccgtcacatctttgtccagggcgacatctgcgacaaggctttggtgtctgacctgatcgccaagtacgaccccgattatctcatcaacttcgcggcggagagccatgtggaccgcagcatcaagaaccccgagatctttgtggaaagcaacgttctgggaaccgtcaatctgctgcagtgctgcaaggacgcctggtatgacgccgaaaacaagacctggaagcccggcaagaagtacctgcaggtttccaccgacgaggtgtacggtgcgctgggcgccgagggctactttaccgagaccactccgctttctccccacagcccctattccagctccaaggccagcgccgacctgttcgtcatggcgttccatgacacctacggcatgccggtcaatattacccgctgctccaataactacggtccctatcagttcccggaaaagctgatcccgctgctcatcaacaacgccaagcagcacaagaacctgccggtctacggcgacggtatgcaggtgcgcgactggctgtacgtcatggatcactgcaaggccattgatatggttgcatcggacggcaaagacggcgaagtctataatgtcggcggccacaacgagcgtcccaacatctttatcgtcaagaccgtgatcgcccagctgcgtgagcgtctgggagatgaagccatcagcgaggagctcatcacccatgttgccgaccgtctgggtcatgaccgccgctacggcatcgatcccaccaagatcaagaacgatctgggctggtatcccgagactccgtttgagaagggcatcgttctgaccattgactggtacctggcaaacccggactggatggcccatgtcaccagcggtgattaccagaaatactacgagcagatgtacaaaaatcgctgagtgatcggcgcttcgcccgtgcccggataccgggtgcgggcatattgtgccaaaatggggtgtccctttgcaatgtccggggcgctgtgctatactagaaaaacattgcagccccgacagtgccggactcgtctgtgagccccgctgtcaggaggagatttccccgacccaaggagtaaagaatggcaatttcaagagaagaacagctgcgcaataaccgccgcctggcccggcagggactggggcttgtggcgattttgctgatcgtgatcggtctgtttaccgtggttggctgggcggtccgcgccattacggcggcactggacgactccgaccgccgggaaagctatgccgatcttctgtatggtctggtcatgtttgacaccgtgccttttgacgatgtgaatactgtggaccagtccatcttcaaacaggcggcgatctggggctgcgtctaccaggtacagaaggacggcggcagcctggatcagtatgagcgtgacgaggaaaccggttgcatgatccttccgcagctggaagtggatgcgtacctcaccaacctcctcggcccggattatcagatccaggaaggctctttccagacctcggagatgaactacgtttacagcgaggaaaagcagggctacctggtgccggtcaccggctcggtcggcctgtacacgccggaagtggagagcatctccacgtcgggcggcaagatgtatgtgaccgtgggctatattcccactcttgccagcaccaccagcctgaccctgaccacgccgacggaacctaccaaatatatggactacgtctttagccgcggcgaaaaccgccagtggtatctgtctgccctgcaggaaagcgacaaacaggtcgtggcttcctccagctccgtcaccagcgagagccaggccgtgaccagcgacccgcaggcgttggtggagagcaatcttgcttcctccgtcaccagttcggaggcttccagcgattcggaaccggcatcggattccacggatgaatcggtagataccgaaccggaaggggatacctccggggatgactcctcgcaagaaagttccgatacctcctcggaggagacggacggcgagactgacagcagcgacagctccgattcccagccggaggaataatcacaaacagccaaacaaagcccgcacaaccggaacgatccggcggcgcgggctttgttctgcctgtggcgtagcaccagctttttcggatatactgaaattgacaatcccgggaaattttgttttaataaatacgtatgtgcgattttagcacggacagagtacgctgctttacgcagaaaaatctgcgtgtaaagagatatagatgtggatgagttgttggatggaggggtaaccttttcatggcaaaaaagcaggagtatggcaacgaaagcatcaagagcctgaaaggcgcggaccgggtacgaaagcgcccggccgttattttcggctctgacggtgtggaaggatgcgcacactcgatttttgagatcgtctccaactcgatcgacgaggcgagagacggatacggcaataagatcaacgttacgctgtttgaagaccactcggtggaagtcgaggacttcggccgcggcatcccggtggactacaacaaggcggaacagcgctggaactgggatctggttttctgcgaactgtacgccggcggcaagtacggcgaggggagcggcacctatgatttcagcctgggcctgaacggtctgggactttgcgccactcagtatgccagtgagtggatgacggcggacatctaccgtgatggctgccattatcatctcgacttcaagcagggcgagaacgtgggcggtctgaaaaaggaaccttattccggccgccgtaccgggtcggtcattcgctggaaaccggatactcaggtctttacggacatcgccgtggcgcctgaaaccttccgggatatgctcaaacgtcaggccgtggtcaatgcgggcatcacccttgtttttgacgaccgctcccagggcaagagtgaaaaaagcgaatactactacgaaaacggcatcgtggactataccaacgagctggcaggggataagtctctgacgccggtgcatttctgccagggttctgccaccggccgcgaccgtgccgatcagcccgagtatgaggtccagatgaatgtggcgttctgcttctccaaccaggtgcagacgctggaatactaccacaactccagctggctggaacatggcggcagccctgaccgggccgtacgcctggcttttgtcaaccagatcaatgcctggctgaaaaacaagggcctgtataaaaagaacgaaagttccataacctttgccgatgtgcaggactgcctggttctggtttcttccagcttctccacccggaccagctacgagaaccagaccaaaaaggccatcaccaataagtttgtggcccaggccatgaccgaattcctcaaacatcagctggaagtctatttcattgaaaatcccgacgaggcggagaaagcctgcaaacaggtcctcatcaacaagcagagccgcgagcacgccgaaaaagcgcgcatcagtattaaaaagaacatcacggctcagatggacctggccaaccgcgtgcagaaattcgtggactgccgcaccaaggacgtcacccgccgtgagctgtatatcgtggagggcgactccgctatgggcgctgtcaagaccagccgcgattcggagttccaggccatcatgccggtccgcggtaagatcctcaactgcctgaaagcggattacagccgtattttcaagtcggagatcatcaccgatctgatccgcgttatgggctgcggcgttgagctgggcggctcccacaacaaggatctggcggccttccggctggagaatttgcgctttaacaagatcgttatctgtaccgacgccgacgtggacggttaccagatccgcacgctgatcctgaccatgctctaccgcctgacacccactctcatcaatgagggctgcgtctatattgcggagagcccgctgtacgagatcaacaccaagacaaagacctactttgcttacaccgagccggaaaaggccaatatcctcaaacgcatcggcgacgcaaagtataccatccagcgctccaaaggtctgggtgaaaacgatcctgagatgatgtggctgaccaccatgaacccggaaagccgccgtctcatcaaagttatgcctaccgacgccgagaagacggcccaggtgttcgacctgctgctgggtgacaacctgcagggccgtaaagatcatattgcagaacacggcgccgagtatctcgacgatctggatctgagctgaaaggaggcgggaatatggcaaaaaagaaagaaaagaaaatcgttcccgcccggccgcagctgggcgataacgtggagatcctctccgccggtaccgtgctggaaagcgccatcaccgataccctggaaaccaactatatgccttacgcgatgagcgtcatcgtctcccgcgctctgccggagatcgacggcttcaagcccgcccaccgcaaactgctgtataccatgtacactatgggccttctgaagggtgcccgtaccaagtctgccaacatcgtgggcagcaccatgcacctgaatccccacggcgatcaggctatctacgacactatggtccgtatgggccgcggcaacgaaagcctgctggtaccgtttgtcgattccaagggaaacttcggtaaggcgtacagccgggacatggcctatgcggcctcccgttacaccgaggccaagctggaccccgtctgtgaggaactgttccgggacattgacaaggagaccgttgactttgttcccaactatgacggctccaccaccgagcccacgctgctgccggtgacgttcccgaccattctggccaacaatacccttggcatcgccgtcggtatggccagcaacatctgctccttcaacctgaccgagctgtgcaacgccaccatcgccctcatgaaggacgagcaggccgacctgtccacgctgctgcccgccccggactttgtgggcggcggctccatcctgtacaacgctgccgagatgcagaacgtctatgagaacggccggggcagcatccgtgtccgcgccaagtggagctacgacaaggaaaacaactgcatcgacgttacccagatcccgcccacgaccaccgtcgaggccatcatggacaagatcaccgagctggtcaaggcgggccgcatcaaagagatcagtgacatgcgcgacgagaccgacctcaacggtctcaaactgaccatcgaccttaagcgcggacaggaccccgacaagctcatggcgcggctgttcaaggcaacgcctttggaggacagctttgcctgcaacttcaacctgctgatcggcggtcagccccgggtgctgggcgtgcgtggtattctgcaggagtggatcgccttccgtgccgagtgtgtccgccgccgcacctattacgacctgcagggcaagcagaaacgcctgcatctgctcaaaggcctggcggccatcctgctggacatcgacaaagccatccgtattgtgcgtgagacggcggaagagtcggaggtcgttcccaacctgatgatcggcttcggtattgacgaggtccaggcggagtacgtggcggaaatcaagctgcgccacctcaaccgggaatacatcctcaagcgtaccgaggaaatctctgaactggaggacgccattgccgacctggaggacattctcaaacgtccggcccgtatcaacaagatcatcatgaacgagctggcagaggtcgccaaaaagtacggcaaaccccgcaagtgcgagatcttgtacgagatcccggacgcagatgaagaggacgaaggggaggagatccccgattatccggtcacgctgttctatacccgtgacggctatttcaagaagatcacgccccagagcctgcgcatgtccggcgagcagaagctcaaggacggcgacgagatcgtcgcgacgatggaagccaccaacgcggtggaactgctgttcttcaccaaccatcaccaggtgtacaaatcccgggcagcggactttgccgacggcaaggccagcgttctgggcgactacgtggcgtcccgactgggcatggaggacggggaagtccccatctatatggcagtcaccaaagattatgcggggcacatgctgttcttcttccagaacggcaagtgtgcaaaggtccctctggccagctacgaaaccaagcagaaccgtaaaaagctgctcaaggcatacagtgataaggcggaactggcctgcatgatgcagatgaccgaagaagcggaacttgccatctataccaccggcaaccgtctgctgctggcaggcagcgccctgattccggccaagactacccgggataccgcaggtgtcaatgtggtcaatctcaaaaagaatcagcgcatttccaaggtgcaggttgccgatggtctggaacttgccaatccccaccgtttccgcgtccgcagcctgcccgcggcaggtgctctgctgcggcaggaggatacttccgagcagctgacgctgtaaagtttttgtgctttatagggaaaaacggcaaaaaaactgcatcggacggcacttgcggcttgcaatccgtgggattgtatgctacactattattcgcattagaatgtgaaggagaacttttcaatgagcgtttacgagatcgttttcggcgttattctggttgccgtttcgctttttatcattgttttcactcttgctcaggaaagcaagggccagggcctgtctgccgccatcatgggcgataacagctttatggctgcgggccgtgagcgcggcatcgacgccaagctggcaaaggccaccaaggtctgcggcgcgattttctttgtcgcgacgctcgttgtctgcgtgctcagcgcgcgccttggctgagccgggttgattcgttatgggacggtccgctgatgcagcgggccgtttctgtgtgtacgcaagttttttcgtgggaaagctgaatacaggggatatggcactgcccggcagaaaagccgtacatccccgccggaagggtcctgtcggacggcagggcgacgtcatggaggagtaaaattttatgatgaccttgaagcagaatatcctgaacgcagtcagacgcaaaccccgctatctgcgggagctgcagtccgaactcaaagtggacggcaaccgtctgcgctataccgtttccgccatggtggcgtcgggcgaattgaccatgaaaaacggtcagtatgcccccggtcttgctaccgtggaaaatgaaaatcttcccgcagccattccctgcacgctggtcaagctggcggcccggttcggctttgcctcccgcgatgacggcgagggcgatatcttcattcccggccgtgctctgcacggcgccatgcccaaggacaagatcaaggtccgcctgttcgatcatccccgtgtggagggcagctccgagggtgaagtggtcgaggtgaccgagccccacaacaccattgccggcaccgtggtccgtaccgaggacggtcgcctggccctggaaccggacggctgcaacggcgtcaacctcatcatccgcaagggggaggaccgcggcgtgcgtcccggtgataaagcgggtgcgctgctttcctcgcgcggtgagcgtcatgccgaccaccgggtcaccatcctgcagcgcttcggttcgtccgaggtggcgggggagtgcgccaaggccattctctacggccgtgaagtccgccaggaattcccggaggaagttctggaggaagccaaagtcattggccgcgcccgggtcacccaggcggagatccagcatcgcatggacctgcgcggcatccccatcttcaccatcgactcggcggagaccaaggacattgacgacgccatcagcctgatgaagctcaacgacggcggctatgagctgggcgtccatatcgcggacgtcagccactatgtcaagccggataccgccctggacaaggaagcctttgagcgtgccaccagcatttactatgccgacaaggtcattcccatgctgcccaaacagctttccaacggcatctgcagcctgaacgaggacgaaacccgcctggccttctcctgcctgatgcagctggacgaggcaggcaacatccgtcagtaccgttttgtcaaaacggtcatccgtagccgtgtcaagggtgtgtacaaggaaatcaatgccctgctggaaggctctggggatgcggcactgcaggaaaaatacgccgcggtcgccgcacagcttcccgtcatgcaggaactgtacgaaaagcgtctggctctgcgcaaggcacgcggcggcatggacatcgaatccagcgaagccaagctggttctggacgaaaaaggacgctgtgtcgacgtggtcaagcgtgaccgcggcgtgtccgagtgcatgatcgaggaattcatgctcctcgccaaccagtgcgcagccaacgcaggccgtgtgcacaaggtgcccttcctttaccgtatccatgaggctcccgacgccgagcgcctggaaaagctcatgaccatgctcaaagcctgcgcgctggacgtccgcttcaagggcgagacgcccactcagctggaactggctgcgctgctggacaagactcgcggcgagcctatccagatcccggtgcatactggtatcctgcgcagcatgcagaaggcaaaatattcccccgaacccaaggggcattttggtttggtgctggccgactacgcccacttcaccagccccatccgccgctatcccgacctggccatccaccgcatcctcagcgatatgctgctgggcaagagcacgcaggagctgaccacggaatatcaggactttgccacccgtgcctgcgagcagtccagccgtcaggaagtggatgcccagcgcatcgagcgtgacgtggaggactgctacaaggccgagtatatgtccgcgcatctgggtgagacctacaccggcaccgtttccggcatcacgccccgcggcgtctttgtggcgctggacaacagcgtggaaggctttgtccctgcggcggaactctgcaaaggagaacccgttgtcaccgagggcgtccgcatctacgatccgctgaccggccgtcactggatgctgggcgaccccatgcaggtccgcgcggcgggcgccaacgtgcagcttggccgtatcgactttacctttgtgccctgagggccatgacagcaagacaggaggatacccatgcccaccaaccgcgaggcaatcgactttcgcaccatgcccgccgccgaggtccagcaggcgctcaagcaggtcctgatggaagtccagaaacctgcccgctacacgggcggcgagtacaactcggccatcaaggatgctgaaaaaatggacgtccggtttgcgttctgcttcccggacacctacgagatcggtatgtccttcctgggagaaaagatcctgtatgagcttttgaaccgccatgaaaactggtggtgtgagcgggcgttcatgccctggaccgatatgaaggcccagatggaagcccataacatcccgctttactccctggaaagcaaaacgcccctgtctcaatttgacatcgtgggctttacgctggaatatgagctgtgctataccaatattctggcgatgctgcgtctgtccgggattcctctgcgggcagaggaccgggacgaaagctggccgcttatcattgcgggcggtccctgtgtctgcaacgccgagcccatggcggatttctttgatgtcatgcagctgggcgagggcgaacagatgcttcaggatatctgcgccgcagtggaagagggcaaaaagcagggcctgaccaaacagcagctgctggaaaaactggccgggattcccggcgtttacgttccgtctttctatgacgtgacctacctgccggatggccgcattgagtcggtgcgccccaacaatccccatgcgccggaaaaggttaccaaggccatcgtcaaggacctggatacctttgttcccccggaaaacttcatcgttcccatgatcggtgcggtgcaggatcgcgcctgtgtggaagtgctgcgcggctgtgtccgcggctgccgtttctgccaggccgggcagatctaccgtcccttccgggagcgttctcccaaactcatcagcgattcggcccgggcgctctgccgcaacaccggctatgatgaactcagcctgaccagcctttccacttccgaccattcccagctggaagaactcctggaccgcctcaatgcctgggcggaagcagatcacgtcagcctgtctctgccctccctgcgtgtggacaacttctcccagagtctggtggaaaagaccaccaaggtccgtaagagcggtctgacctttgcggcggaagcaggcacccagcgcctgcgggacgtcatcaacaaaaacgtcacctgggagcagatcgagcgtacctgcaccattgctttcaaagagggttatacctcggtcaagctctacttcatgatgggcctgcccaccgaaacgctggaggacatcaaaggcattgccgacaccgcccagaaagtcgtggacctgtattacagcctggaccatgccaagggcaagggcgtgcaggtcaccatcagtgtggcatgctttgtccccaaaccggacacgcccttccagttctgcgcccaggaccgccgggagcagctgcgggaaaagcagaagtatcttctcagctgtgtccgttcccggaaaatcaaggtcaactatcacgacagcgccaccagtgtgctggaaggtgtttttgccaagggtgaccgccgcctgggccgcgtcattgagaccgcctttgagaacggcgccttcttcgatacctgggaggaatacttcgactatgaccgttggctggcagcctttgaagcctgcggcgttgatccggacttctacaactaccgggagatcgctctggatgaggtgacgccctgggcgcatctggatgtgggcgtcagccagtcgttcctggcgcgggagtatcagaaagccctgcgcgccgagaccacccagccgtgcaaccgccagtgcagcggatgcggcgccaacaaactgttgggaggaccctgctttgaatacagtaaggatctggtttgaaaaacgcggcgaggccgcctacatttctctgcttgatctgcagcgcgtcatgcaccgcgccctcaagcgcagcgggcttccggtgtggtacaccaagggctttaacccgcacatttatttggctttttcctgcccgctggctttgggacaggagagtctgtgcgaaagctgcgaggtcaaaacggaggaagaaactcctgactacgccgcctgggccgaggcactgcgccccgccttgccggagggcctgcgtctggtgagcatcggtcctgccgtcatgaagatgggacgcattcaggccgcggattataagatcactttgcccgccaacgccgcgcaggcgctggatgcctacaatgcgcaggacagtgtcatcgttgagaaaaagaccaagagcggcaaaaaggagctggacctgaaacagtacatccccgcggtgacttacaccgtctcggaggatcaggcctgctttaccgtccgtttgcctgccggtgacgggctcaatctgaaccctgcgcttctggtgggacatctccaggcgcagtatggtctgcccgcatggcagtgccatatcctgcgtacccgcatctatgtggaggacgggatcgaattccgctgaaaccaaacataagaaatgccgcgaaagatagattgtttcgcggcatttttgtttgcatgataaagatatttgtgatattctgatatgcacaaagcaactgtaaggtgtccggggccgcaaggccggccggaagaatagggaaacaggtgaaagacctgtgcgggaccgccgccgtgacggcaggccccggcttacagacggccgtgcaggccgccgccactgtgggtacacacgggaaggtgaaaagccggggaagcaaaacctgcccaagccggaagacctgccttacagcgtatactgccggaaaggcagacaccgtgcggcggacggaccaaacaccggcacgatgtgcagcgaatgtgccgcaaccctgcggtgcacaacagcagttcccgagcggaaacgcccgggagaaaacacgtgtaccccaaaagcaataccggcaatgtccgagccatcggaattttgccgccttacatttcagggaccacgaaaacagtcctgctgttttgcgtcgcgggcagactggctttgcagttgtacgcctttcccgatattcgggaagggcgtatttttttgcggcacgacaaaattagtcaggaggaatctggaaaatgaaacaaccgttctctcaaaaggaaaaacggctggtcagcctctggatcatgcttggcaccgcgctctgtgtaccccaggccgcgtctgccatgcatatcatggaaggctatctgccgccgtcgttctgtgtcgcctggagtgggctctgccttccgtttttggcggtgggcgtggtgcacctgggacgtctgacgcaaaatcggaaattattgattttgcttgccatggcaggggcgttcgtctttgtcatctcttctcttaaaatcccgtcggtgagcggaagctgctcccatatgaccggcacaggcctggccgtgattttgttcggtgttccggtggcgtcgatcctgggcattattgtcctggttttccaggccttgcttctggctcatggcggactgaccacgttgggggcaaatacattcagcatggccattgccgggccgctcgtaagctggtcggtgtatgccctggccaagcggtttcatgtcagcagaaaagtcgccgtcttttttgcggcggcgctgggggatttgtttacctactgtgtcaccagtctgcaattggcggtggcatatcctgcccaggagggcggcatcggcgccagtgcggtggctttcctgggcgtgtttgcaccgacccagctgcccttggccgtgttggagggtatccttacggtgatgatcctttcgggactggaaagctatgcacagccggaactgcaggaaatcggatttctggagagagggaggtctgactgatgagcaaaacagccaagtggatgatcgtcatgctggcggcagtgctgctgatcgttttcacgcctcttgttgtgctgcgcgacgctgactttggcggtagtgatgatgccggcagtgaaatggtagaagaaatcacgggggaagcctatgaaccatgggccgtgcctgtgctggaacagtttctgggcggcgaactgcccggagaggtggaaagcctgcttttttgtgttcagaccggcatcggtgtgggcgtgatcgcttacggctttggctatctggcagcgcgcaaaaaatatgcgcccgctgccgggaaggggcagcccggcgcgacgcctgtgccgtccgcggagcaggctgccgcgaaagaggcaaagccatgattacggcggtcctttccgggatcgttgtgtattctatgctggcaggaagattggcccatcatttggccatactagtgtctgttgccgctgctgtggtatgcctggctctctccggccatgaccatggagacgtcctttccatcgaccgttatgccgggcgttccgctttcgcctgtacagcagcgggggaaaagatggcggtctgtgcggttttgcttgcgggatgcctgtactccgtaaaaatatggcagccccttgccctggcaggaactttgctggttctgacagtctggggcggacgggggatcggactgcggcagtatctaaacctgttccggataccgctgggatttcttctgctctcagcggcaaccctgttgtggcggtttacgacttccacccaggacacgatcctggcgcttccgtggccaggcggataccttgcggtgacgcaggcttcacagcagctggcgtaccgtgtcacggcaagggcgcttggggcggtaagctgcctgtactttttgagcctgtccacgccgctgactgagattctcacgaccttaaggcgatggcatctgcctgccccggtgactgatctggcatttctgacttatcggtttgtatttgtccttgtgcagacggtgcgaaatatgcaatgttctgcgaccagccggatgggctattccggcatgctgcgcagcatcaggaccacaggcgcggtgtacggaacgctgctgggtaaaagcttttgcaaggcccggatacagtttcaggccatggaaagccgctgcgccgggacggaacttcgcttctgggcggcggagcgcccggcaggttcagcggtacagagagggattctggtcggtattgcggtggtatttactgccatggtattcatgggatgaaggaggaaaaagtgatgcagccaattctgcgtctggagcatgtgacctgtcgctatcccggagaaaacacgccggcgcttcgggattgttcactctccatccaccgcggagagaaaatcgctgtcctggggcggaacggagcgggaaagtccacctttttcctgctgctcaatggtgtcatacgccccgagcatggccggatccagtttggcggaaaggagatccgcaaagaagcagacctttcgattttgcgcagagggaccgggttggtgtttcaggacccggacgtccagatccttgccgggaacgtggaagaggaagtggcgtttggaccggccaatctggggctggcgcgggacgagatcggcagggcggtggacaatgccatcgccgccttacatttggaagagtaccgccgccgcgctccgcaatacctttcggggggcgagaaaaagcgtgtcaccattgccgatgtgctggcgatcaatccggctgtgatgcttctggatgaaccggcgtccagccttgaccccgccgggcgccgtaacttggaggagcatctggagaccctgcatcgctcgggcatggccttgctggtggcaacgcatgatttggattttgcctggcgctgggcagagcgtatccttgtgtttgaggaaggaacgcttgcagcggatggttccccggaagatgtttttttcaatcagtctcttttggagcgctgcgcattggaaaagccggttctgtatcaggtcggggagctgctgggcatcgccccaccccgcacgatagaacaacttcggcagttgaccggaacaaagcagatctaaaaaagaaacagcgtacccaaggcctccatttggaggcgcgggtacgctgttttttaagaaataagtgacttcaggaaagcggcagaagaagaggaggaacgaaccacaacaggcagccgtgctccaaggcgggacaaaagttcgtttgtaatggtgccgcactgctcggccactgtctcggtgcggatcacgtcagagccgtcccgtccaatcagggtgacggtatctccgggaaggacctcttccacatcagtgacgtcgatcaaaagctgatccatgcagatacgtcccacgatagagcaggcaacgccgtgcaccagcacacgaccgtttcgcccacccaggcaacggggcagtccgtcggcgtatccgattgcagccacggcaattcgggtgggacgctctgcggtgaatgctctgccgtacccggcgctttctccgggagacaacacgcgcaccgaggcaacgcgggcgtacagtgacagtacggggcgaagttccagccggtggtataccggcgcatcgtcactgtaaacaccgtaaagggcgattcctgcgcgggcaaggtcgaaaggtgattcgtcacagttcagcaggccgtagcttgccatcaggtgtgtcttgccgggggaaatgcccatatctttgagtttctcgatcagctcccgaaaggattctgcctgatgcttggtgtaagcaatatcatccgcaaccaagctgtcagaaacgcacagatgggaaaaaatcccttcgacccggatgccgggcagccagtacatttccaaaatggcggctaaatcgttcgccggaagccccagccggtgcataccggtatccacggccagatgaacacggacattatacccggttttggcaagagcgtacccgtgcgcggcatctgccacggtttgggttagccgccagcgtgccaggcgggctgcctgccacgggtcggtccagcctaagaccagaatacagccccggatgccggcacggcgaagggcgatgccttcctccaggcacgctacggcaaagaaacgaacgccgtctttttgcaaaaggggggcaacggtttttgccccgtgcccgtaggcgtcagctttgacaacggccatcagctcacagccagggccggcggtctggctcagaacacgggcgttgtaacgcagagcctccgggtcaatctcccgccaggcccggctttttggatcggcgggcagaggacggaagagataaagcaggccggagattccggcactcaacgcaagcacggcggtaaaatgccccagactgttctccaccaaaatcggccaggtaccggtcaggcgggcaattcctcggacagcaacgatacacccgggatgcagaagatagaccagcagagaaatatcccgggcggcgcggcaccggccgctgttgcagccgaccagaagagaaaacaaacagaccatgcacagcggcagcaacagatacatgctgtcgtggcgctggactcccgcacggtgcagccaaaaagccgccgcgctcatagcggacagggtcagacagaaaccggctgctgcaagtggcggccgcaggcggatattggctgcacccaaaagcaaaaacaacggggccagaaatatcccgttgcgggtgtattcggttacggagaaaatcagatcatagaactgccgtatcaccgggaaaccggatacgatgccatagtaactgtcaccgcccagcccgatcagatataagatggcggcaatcagcagtgcacggcgccgtcccaaatgcaggagcaggcgggtgaaaagcacgccccagatcagcgcaggaaaataccacaggtggtacagcgttccttcccacaggattccgcgaagccagtcgctcggagagaaaccgcctgcgtacagattcatgggcagatagaatacaacagcggcaagatagatcagcagagtctttttcaaaaaacgtccgatgccttcccagtctttcttcgcaaggaaaaatccgctgaccatcagaaagaacggaacagccactcttgccgctacgcgggtcagccagaaatccaaatcgagggaaatactttccaagggggatgtgtgtatggcaaccaccagaacagcggctcccaggcggaacagatccagcgcgggcaggcgggagcgggtcatcatacaaagccctcccactgtgtcagaatgatgccgcctgcattgtcaagggaaagctgccggtagcctgatgcgttgtcgggcagtgcggacaaattggggagatactgcacttttgcccggcggccgttttccgaccggaattgcaaggaacggtggcgaagaagctcaagatattcttccaggcacagaccgtactcttccatcagctgggcatggggaacaccgacataccggaaatgccagggttccgcggcaatgccggtgatactttgcttttctgcccgatacctctccacgaaaccgtaccgcggagcaagacggcggaactcaccgcacacgccggtataaggaaactccgggcggataaagtcgatttcgggagcggccagtgccagatcgatggcaaggccggactcgtgttcgctgcagccggggaacgccacataattccgggtgaaaacaggaccttcctttgcaagggtgacgtcccagatctgctgctgttcttcatggctgcgccagccggaaaccggaatgattttaccggcgccatttactgcccggatgcaggcagaaagcagggccgccgcatggcgttccatcagaacgtcgggacaggccgggtcgggggcggccagctcaggtgctgccagggacggcaggggatggcttggattcacgagcatctgatagctggtatgcagcctgacctggggcagagtctgcgatttcattgcgggacctccaattcgatcatacgggtgataaggttggcaaaaccgattcccacggccttcatcatgctgggatagcggctgtgggcggtaaagccggggatggtgttgacctcgttaaagacaatgcgcccgtcaggggtcaggaacagatcgacacgggcaaaatcccgacagcccagggcacggtagatcttgcacgcggcgtcgcggatacgcccggcggtctcctccggaatgcgggcagggcaatggatggcagaagttttgagggtgtatttttcggtataatcaaagaagccccgggccagttcgatctcgtccacggcgcctgttatcagggagtcgttgcccagtacggcgcagccgacttcaaaaccggggatggcttcttccagcaggatttcgctgtcatgcaaaaacgcctcctgaacggcggcttccaatgcctgaggtccgcatacccggctgatgccgaaagaagaccccgcccgcaccggctttacgaaaagaggccagcccaggttttcagcttgctgcaagatttcggaatagggcgttccctgaatgaaaacggcgcttttgggaacatcgaccccggccaaagcggccagcttgtgagcccggtctttgtccatgcacaaagcgctggccagcgtgccgcagccgatcagagggaccccggcaagttcaaacagtccctgcatggtgccgtcctcgccgtttttgccgtgaaggaccggaaaaacggcatcgtaggcttcgacggtggcgggctcgctccgcaaaagcaagagcttggcgccacggtcgagaattacggcgcagggagtacaccaggcatcgtttttctcccattcacgggtggggatggcctcaatgggaccgcggtatcgcagccaccggccatctgccgtgatgcccacgggcaaggcctcataccgggcctgatccaaatgggtgaggaccgccgctgccgaaaccagcgagacctcgtgctcactggaacagccaccgaacaaaacaaggatctttttccgaaccattgcaataccctcctgtaaaacggcaagcggcgcggatagaaaagcgcgttgtgccggtcgcataaatttccgcaggaggattcgccgcaatacaaaaggctccgtcctgctgcctatatggtagcagagcggagccttggggatttcaagactttttcataaagagtttgcgtttttcctttgaaaatcttacgattttcttgcgatgggcttttgggcggggttgcgtggtggcgttggagcagaaagggaaaggtggacaagaaaacggatatgctcgtcggcactttctgcgttgatgcttcctccgtgcagttccacgatttccttggcaatggccagacccagcccggcaccgccggtgcgggtggcgcgggattcgtcaagacggtagaactgctcaaacagccgctccagcttttccggcgggatggtgcggccatggttttcaaaagtcagcagcagttcgtccgggctttgctcggcgcggatggtgacctgggtgccgggataactgtaatggcaggcgttgcgcaaaaggttgtcaaacactctggccatcttatcggggtcgcaggggtattccatgcgggctggcaaatcggtgcggcaggtaaggtttttctcggcaagcatggggccgaactcgctgacgacttgttccagcatgcgggtcaggtcggtcgcgcggagttccagttcgatgtgggacaggttgaaccgggtgatgtcgaaaaactcattgatgaggtcctccagccgttccgctttgtccagagcgatgccggtgtagcgggcccgaagttccggggagatctgcggttcatcccgcagcagggtcaggtatccgatcacgctggtcagcggggttttcagatcgtgggcaaggtagacgatcaggtcgtttttccgctgttcggcttccttggcaatctgtgcattgcgctgtgcctgctggcgggccaatcgcagctgggcttcggcaacactcaactcgggggaaagttccagctgggaaacgtcgtcatccagtaaatgtgtggctgcattgaccaccgagctcaactgcttttggggataccgaaagaaccagtaagtcacaaggaaccaaccgaatgcgcacagcagaatgacgacctgcagagccatgtcgcggacggtgctcatgatggagtaaagggggctggtgatcatgacgagatagtaattggtggagtaatagaagatgtccaccaatgcgtgatagatgttgagccccagaataaaaatcagaaaaacagctgcaactacggcgatgagagagagcagatacagccataccatggaaaatgcgctgcgtccgtactgcgtccaccggggcttggaacgcttctttttcttattcaatggtgtaacccaccccccagaccgttttgatgaatttgggcttgcggctgggctcgttcatcttttcccgcagccgtgcgatgtgagacatgaccgtgttgttgctgtccatatatttttcgccccagacggcctcaaacagttcctcgctggagaccacactgccccgatgctcgcacagataccacaggatggagaattcgagaggtgtcagggaaagctctttgccaaacaaaaagcatttgtggttgcttttgcagatctgcagaccacggaaatcgtattcctccgtttcccggacgggctcggcctggttatagcgggtatagcggcgcagctgtgtcttgacccgagcgatcaattccaaggggttaaagggcttggtgatgtaatcgtccgcacccagggtcaaccccatgatcttgtccatgtcctcgacacgggcggtaagcatgatgatggggaagagatgccgttcccggatcttctggcacagggcaaatccgtccatgtcgggcagcataacatcaaggatcgccagatccggctcacaatggttcagacagttgagtgcgtcggtagcattgtaaaatttatggaccgtgtaaccttcgtttttcaggcagacttccaccaggtccgctatggcggtctcgtcgtcaacgatcagaatatcactcatctttgcagatccctttcttagtttggccgcatggatttggagcaggggaaaggagatgcggctttatccatgtatagcagaaacccgcacgccttgtcaatactgcctgccgtagacaaagtacagcccccggaccgtgcagaagcattggtccgggggctgtacttgcgataaaagacagaaaaaggaatgctgtaaaagcttgaaaaacggggagttactggactttgacgagatcctgtccggccttgacctcgccgcctgccagagtggtgacgctggcgtaatcgtcggtgttgcacacgatcatgggcgtggtgcacagatagccctcggcgcggatggcgtccatgtcaaagctgatgagcagatcacctttgcggactttgtcgccggtcttgacgtagggagtgaaatgcttgccgcccagtttgacggtgtcgatgccgatgtgcagaagaacttccgcgccgttctcggtgacaaggccgatggcgtggtgggtgtcgaacagattgtcgaccacagcgtccgcgggagcgtagagtttgccctcggaaggctcaatggcgcagccgtcgcccagcgcgcaggaggcaaaggcctcatccttgacatccgccatggggatgacggtgccggtcatatgagcggccagggtctcgggtttcattttgcttttggcaggagccggtgcggctgccggctgagcaggagcggcgggggcagtatcgttcatgacggtatccgcggcggccgtctccataaagtcgaccagattagacttgatgacggcgacctgaggcccgtagatgacctggacgccctcgcctttgtgaacgacgccggaagcgccgctctggcgcagcagcgcgtcattgactttgttcgggtcaacgaccgtcacgcgcagacgggtggcgcagcaatccacgtcggaaaggttggccttgccgcccaggccacgcaggatcagcgcggaggtggaatcgctggacttgggagcaccgccggcagcgtcggggccgacgccggtcttttctttgaagtcggcgcgggtgtagagcttggtctcttcgttgtcgtcctcacggccgggagtcttgaggttcatgcgggtgatcatgaaatagaaggtgaagtaatacaggacgaagtagaaaacacccacgatcacgacccagatccagtgagtcttttcgttgccctgcaggattccgaaaagggtcaggtcgatcagaccgccggagaaggtcatgcccacgccgacgttaaagatatgcatcagcatataggacagaccggcataaacgcagtgaacggcgtacatggccggggcgacgaaaaggaaggtgaattccaggggttcggtgataccggtgagcatggaggtcagtgcggcggaaaggagcagaccggcaacgaccttgcgcttttcgggacgggcggtacggtacatggcaagtgcggcaccgggcaggccaaagatcatgagggggaacttgccggccataaaacgggtggcttccacggagaaaacagtggtgctcttagatgcaagttcagcaaagaagatgttctgtgcaccctgaatggtcacaccgtcaacaatggcagtgccgcccacggcagtctgccagaaaggcatgtagaacacgtgatgcaggccgaaaggaatcagcgcacgctcgatcagaccatagagccaggtaccgacgtagccggagctgatgaccagattgcccagcatgctgatgccggtctggaccgtaggccagatgtagaacatggcaatacccaccagcagatagaccgcggtgcagacaatggggacgaaccgggtgccgccgaagaaggacaaaacctgcggaagctgggttttgtaaaagcggttgtgcagcgcagccacaccaaggccgacgatgatgccgccgaacacacccatctgaagggtggtgatgcccagcatggtggtggtagtgttgggggccatggcttccacgccgcctgcggcattgatcatggcgctgatggcggtgttcatgaccagataggcaatggcaccggaaagcgcggcgacttccttctctttcttggccatgccgatggcaacacccatggcgaacagcagggcaaggttattgaagatcgcactgccgcactggttcatgatgtccaggatggtatagatcagggtaccctgatggatgatgccggacaggccgtaggtggccagcatggtctcgttggtgaaggaactgccgatgcccagcagcagaccggctaccgggagcagggcaatggggagcataaaagagcgtcccacgcgctgcaacacgccgaaaattttgtctttcattccgattcctccttgtgaatcatgacaatgatagaaaaacagggatttatataaagatagacctatacacacctgccccggatccgctgggcaaggtatgtacaggtctagcctacataacaaggatgaagtaactatcccgaactattcggttttcagaaaagcatcaggtggggacttctctcagatcgccgctgacccgcttgagatggatggtcaggtaaatcagctcttcctgggagagtgtacggtgccaggtgtttttgatatattcggcaacgcactgcgcgcatttgtaatgctgcttgcagttgcgtgcaatcaaggcacggaaagcggcttcgctttcgtccgggctgtcggtcatcagcttgtcctggaacagacgctgggcaaagtaccgcaaatgaacaacaaagcggttgaaggccagggactcacggtcaaagctgccgagatcccggtagaagtactccaccacttcgatcacaccctcgatcaggcgggtgatatcgtacatctcgctcatgctggtgttgagctcggcgttgacgatgtgcaatgcgataaacgcggcttcatcgggattgagctctacgccgcagcgctcccggaccagagccagacagcgctgtcccagctgatactcggtggggtagtagcagaggatgctgccgcttaaaggatttttgaactcgactccctgggattttcgctggatggcaaaactgatatgatctgccagagtgatcagcagggattcgttcaggggctggtgaatgacggacttgatctcggcgatcattgcctcggtcagatccaggtgctccagcgggatctgttcgaccagttcgcgcaggcggcgttgctcggctttgtcctccatacggtaaactttttcgacgctggagggttccacgcgctgaccgaccttgcgcccgaacccgagccctcggccggttacgatgagttcggaccctttgtcatcaacgacgcacaggatgttgttattgatgacctttttgatccgcatcctgaaagcctcctcacgtacagcggcaaaaaaaatagccagccccatcaaataccattcctgtatcaagaaggtcccgacggagttggtctagcccgcataaccggtaacaatccaactgaatttcactgatgcaatcatagcacgcacgtatgtggaagtcaatcggttttgcgcggagaaagtttattttcgtcaagctgctcaaacgcagcggagtgcattttggcaaaatgaacagtggaagggtagtgaaaacggctgcggccaaaaaagaaaattacgggcatatacgggcaaacaccgggacttgacgggcaatacagcaaactcttatacttacagcagattgaaataacctaagctgcagcggcaagacgcccggcgggcattgcaattcgttttgagccgccatcgcgcctgccattgcagatcacaaaagaaaggaaatgattctggtatgttggaagttggaatcaaagccccggattttactttgccggatcagaacggcaatatggtcagcctgtctgattttgcaggcaagcgtgttgtactgtacttttaccccaaggacaacacccccggctgcacgcggcaggcctgtgcctttgccggaacgtatgcagagttccaaaagcgggatatccaggtgatcggcgtcagcaaggactcggttgcttcccacctcaaattcgcgcaaaaatatgatctgccctttgtgctgttggccgatcccgagctgcaggccatccaggcttacgatgtctggaaagaaaagaagctgtacgggaaagtcagcatgggtgtcgtgcgcaccacgtatatcatcggtgccgatggcaaaatcgaagctgtgatgcctaaagtcaaaccggataccaacgcccaggagatcctcgaccgtctgggctgagtaagtaaagaaaacgccctctgtccgcgggcagaaagggggaggttcaaatatgaggatcatcatatcaccggccaaaaagatgaatgtggataccgacagcctcccgtggaaggacctgccgtgctttctggaaaaaagtgaacggctttgttccgtgctccgcggcatgtcggaagcggagctgaaacgtctgtggaagtgcaacgacaacattgccgctttgaacatcgacaggctgagcaagatgaatctgcaccgtagcctgacaccggcgatcctgagctatgaaggcatccagtaccgcagcatggcaccgaatgttttcacttcgcaggagttcgagtatatccaggaacatctgcgcatcctgtccggattttatggtattctgcgtccttttgatggtatcacaccgtaccgtttggaaatgcaggcccgactttcggtggacggaaacaaggatctgtatgccttttggggcgacgcactggcgaagcaactgttttccgagaccgactgtgtgatcaatcttgcatccaaggaatacagcgtctgcgtgtccaagtatctgacgcccgctgttcgattcatcacctgtatttttggcgaagaaaaccatggcaaggtggtggaaaaggggaccatctgcaaaatggcgcgcggtgagatggtacgctatatggcggaaaactcggtttctcgtccggaagaactgcgtgcctttgaccggatgcagtttgcctttgcagagaagtattccgacgattctacctatgtgttcatacgcaaagcgtttccaaagcaggggaacaggcggacgcggtaatacgaaaaaattgatatgtcttaaaaagcaggaccagacacggagccattcggtcggtcctgcttttttgcgtacggaagcatcaagtactgccaaaggtagtgccaggaacttgtacggaggttagagcagataaatcccaatgttaagggcctgctgcataaaaaagaacctgcggttgacaatatcgtgacgcgatgttataatatcgacagaggatatcgcatgacgatattaaaggggggcattggcatgggaacaaaagagaggggaccgctgactgagccgatgttctatgtcctcatgtcctttttgcggcaggaaatgtgcggtatcgaaatcacggaatttgtgtctcaaaagaccgggggaagagtggttctggggcccgggaccctgtatacattgcttggaaaattccaggaggagaatctcatcgaggaaacgcaagtagaggggcgcaaacgtacctatcggcttaccgaaaaagggcgtgaggtctatctggcggagctggaacggctgaggacctgcgtccgtgacggagaggaggcacttctatgaaagtcgtccgcaaaattctgccgttgtccatatatgatgtttctggaattgaaagctggttggaaaaacaggccgatgcgggactatttcctgtgtctctgaattcctggacaacatttacgcgcaatggggttcccggaacaaggtttcggcttgtggtaaaagccgggaaaggcggcccgataacccttgagcagttggagctcttccgggaatccggctggcactatgtatgttctgtttcccggatctatgacctcttttacaccaccgacccggaagccgtggaagtttattctgactgggagagccgcggcttctctttggaacctttgaaaaaacggatcgtttcttaccggcggagaagatggattcttttcgctgctctggctgcagtggtgatatgggcggtgtttttctttgaaagtccatatgatatacagccggatcattttgcccggctcatactggtccttctgaatttgtttcagcccggtcctctgctgtttcttgcttgtgtaatctggatctggcggctcaactctcgggattggcgtttgctccagcgcatgtataaagccttgtcacagggcctgccgccgccagcctcgaaaggccccagcaaagtgatggtatgggatcagatcattttgatcgcgctgactttgatgttgatggtttcggtcgtgataagccgtttcgatatactgaacccatgggagaatatctcgttagtgcgtttctccaaaccatatatcacgattcagacgatcgaacaggaaccggtactgccgtgggaagaactgtttgaagaggagcccgttgatagcaaaccggaaaattatgcggagcaaaaattttctcttttggcgccgacctggtatcgtgtggtgcaggaggcttacagcacgcaaagcggttcacagccaaattgcttctcaccaaaacccgaaaacggagcggagcgctatgcccctgatttggatgccacgtattttgaattgctgctgccggcactggcacgcccggttgcaaaagcgcagatggatgcttaccgcctggtcaatttgaattggagttatacggaactttccgataccgggctggattttgcaatctacgctacggaaacggatggaatttggcagatgcttgccatcggaaaagaaaaccgcgtggcggtattccgctatgcgggcagggaacaactgtcggaccatttgcaggaattatccgaagctgtaaattgagataaagcactatattgacaaaagaaaaaggccatggtgtcctgcttggggacaccatggcttttgctatattacaatttgaaagttataccttggaaagccggacgaccgtctccacgtgtcttgtgcgggggaacaaatcaaacggctggactgcttctgcacggtacccggaagagcacaatatttttacatcccgggcagcagtggcggggttgcagctgaccatgacgatggtgcgcggtgccatggcacagatggcgtccagcgtgggatcgtcgcaacccttgcgcggggggtctaccacgatcacgtccgggtggctgccttcggcggcgaagcgtgccgctgcagtgccggcatccatacaaaggaatcgcgccttatcctcggtcagcccaaggcggtgtgcggtctgccgggcttcctccacagcaggggcgacgacctccacgccgatcagctgaccgcagtctggcagcatggaaaggccgatggtacccattccgcaatacagatccaacagaagatcgtcgggccgaaggacggcaaactcacgagcctttgcatacaaggcttcggccgcgggggtattgacctgataaaactcatgcacacccatctggagcggaacgccggataaagtgtcctgaatggtcccgggccccaagactgtgcgagtcttgcggccaaggatcacattggtccgctcggtgttctggttcaccaaaacggtagtcagatcaaattctttctgcagcatggagcagagcttttcttcctccggcatatggctgccgttgatcacaaaacagagcagtctctggccgctgtgccaaccctgccgcatataaatgtggcggacaagtcctgtcccggtctcctcgtcataggcaggaatgctgaattcttccaacaggcggcaggcccttgccgcaagatgattcatccactcgggctggagcagacagtcggagcagggaacgatccgatggctgcgccctgcataaaaaccggtcacaatatgtccatctgtgtctgttcctacgggaagctgtaccttgttccggtaacgcagcggatcaggggcgggaacgatgggctggaccggaagatccaatcctccgatccgggcaaaggcttcccgcacgaaagcggttttggccgagcactccgcttcataggaaaggtggcgcagtgtgcatcctccgcaaggaccataggcggggcactcgggcaatatgcggtcgggaccgcctttcaggatctgctcgattttgccgaaagcatatcgtttcaagggcttgacaatacggacattgagttcatctccgggggccgaggcgggaataaaaactgcctggccctcaaaatgacccacaccgttgccatcgctggacagggattctatggaaaggggaataatctgattttttttcagcggcatgatttcctcctcgaacggctgatttgcaaacagaaaaggcccgttttcagccgaaacaacaaaaaacgggtctgaagtcaggtgtcacagcaaattcaaagctgcggatttttttccagggcgctcaggtaacggctgggaggtactcctttgacttttttgaatacgcgggaaaaatagaactgatcaaagaagccaaccgagacagcgatctcagcaatggacaggttggagttcttgagcagatagcaggcctcgctgatgcgataatcagtcagatagtcgataggactttgaccaacattggacatgaaaacacggtagaggtggctgcggcttacgccgacggccttggcaatgtcgtccaccgaaatatcgtgagaatagttgaactggatatatttgatggcggaaagaacatactggctgctggaactgcccacactgggcatcataccccgggcttcctccatcagatacgccataaagatgtaaaggtagccggtcatcagggcttcgcactgaggttcggggccacgggccagataaatgttatacagtgcttcccggactttctgcggatttttgcagtgatggaccgggcggttatccataaacggtgcctgctgcaccagtttgttggcacaggcaccattaaaacctacccagtaatactcccagggatcggtttcgtccgctgcataggtgatcagctgattgggtttggcaaggaaaagatcgccctcttccagcgtgaaagaggctcctccgacctggtaaacgccttttccggcaacaacaagatgaatcagatagtgatcccgaacgccgggaccccaggtgtgcccgggctcacaatattcgtgcccacagttaaaaatcgacagttccacgttgtcggtgtaattctgtttgtaggattgcttggatatgctggtcatcttgttttcccccggaatcggtgcatggatgtggtagataatgtgccagcgaccatgcgcggtttgacaatttcctatatattatatcagcgtattcatcaaaagtccataaaggcgtcgtaaaaagatgtttacttcacagaaaaatttgttatactggagataagaaacgctgaaaccgtgctatttgaacggttttgccaaaactgtggtgaaatttttgttcatcttgaaggatgaccacccactaagaaaggtgagggtattatggcgaccagtaccgaactcaaacaatccattgctgcagggcagtatgacgcgacatttgaaaagctctatgcaaaagatgcggcagcggtggccgcgcagcgtgcgcgttatattcatgccatcgagcgctttgagcactatttcggcaccgaccgtaccgtgcgtctctattcggctcccggccgtaccgagatcggcggcaaccataccgaccataataatggcgtagtcatggcagctgcggtcaacctcgatgttgttgcggtcgtttctcccacggacagcaatgtggtccgcctgaagtctcatggctttgacaagatggatcatgtggacctttccaagctcactccgcagaaaggggaggaagagcattccgcggccttgattcgcggcgttgcggcaggtatcgttcaggccggcggcaaggttggcggctttgatgcatacacagccagcaatgtcctgcgcggctccggcctgtccagctctgctgcttttgaggtatgcatgggcgccattttccgcggcgagtacaataatggcgacatggagaagttcagccaggtggagattgccaagatcagccagtatgccgagaacgtgtttttcggaaaaccctccggcctgatggatcagactgccagtgccgtgggaagtgcgatcaccattgacttcaaggatccgaccagccccattgtcaataaggtggcctttgatctggcggctcatggatatgctctttgcatcagcgacaccaagggcagccatgcagatctgacggacgattacgctgcgatccgccgtgagatggaagcggttgcggcgtggttcggcaaaaaggtgctgcgagaggtggacgaagacgagttcttcaaagcaattccggaagttcgcaaagcgaccggtgaccgtgcggtgatccgtgccattcatttctttaacgactgccgtcgtgctgctgaactgtgcgacgccgtcaagcaggaccagttcgatcgtttcctgaagctgattctggaaggcggacattccagctttgaattcaaccagaatgcatacagcctcaaagccccgcaggatcagggtgtgcctctggcgctggcgatcagccagcgtgtgctgggcgagcgcggcgcatggcgtctccagggcggcggctttgccggcactatccaggcgtttgtcccgctggacctgcttgatacatataaaactgccattgattctgtgtttggagaaggcagctgctatgtcctgagtgtccgcaactacggcgcgattcccgttactcccgacctttgatctgaacagtatgccgccccggttttgcattgccggggcggcattttataattttctcttgcccgtctaccaattttatgatattggtgctataatatatcgaaatatgatgttttaagtaagagaggagcggctcatgcagcaggaaaccgtcattgttctcgacttcggcggacagtataatcagctgatcgcccgtcgtgtgcgtgaatgtaacgtctactgtgaaatctattcctatcgtaccccgttggagaagattcgtgccaaaaatcccaaaggcattattttcaccggtggccccaatagtgtctatctgccggatgcggctacgattgacccggagatttatacctggggtgtaccgattctgggaatctgctacggcagccagctgatgatgcatatgctgggcggaaaggtgtgccgggctccggagcgcgaatatggcaaaaccgttgttgacctggataccaaatctcggctgtttgaaggtctgccggagaaaaatgtctgctggatgagccataacgactatatcgagcaggcagctcccggttttgcggtgacggccagcacgccgaactgcccggttgccgcggcgcaggacccctcgcgcggattgtactgtgtgcagttccacccggaggtcatgcacaccgagaacggcgtgcagatgctgcataactttgtctataaggtctgcggctgtgcaggcacctggaagatggattcttttgtggcggcgactgtggaagaactgcgcaaaaagatcggcgatggccgtgttctgtgcgctctttctggcggcgtcgattccagtgtatgcgcggcgcttctggcaaaggcagttggccgtcagcttacctgtgtgtttgtggatcacggcctgctgcgcaaaaacgagcgtgaacaggtctgcgaggtttttggtgaaggcggcgcctttgacatcaactttatctgcgtagatgcgcgggagcgcttctatcagaaactggccggacagaccgctccggagagcaagcgtaaaatcattggtgaagagtttatccgcgtctttgaggaagaagccaaaaagattggcgctgtggatttcctggctcaaggcactatctaccccgacgtggtggagagcggcctgggcggcgagtctgcggtgatcaagagccatcataacgttggcggcctgccggaaaaggtggacttcaaggcattggttgagcctctgcgtgatctgttcaaggatgaggttcgtcaggccggtcgtgaactgggattgccggaacacctggtgtcccgccagcccttcccgggccccggccttgccattcgtatcatcggagaggttacgccggagaaggtagcaatcgttcaggatgcagatgctatctggcgtgaggaggtggataaacttcccatggcccagcgccccagtcagtattttgcggcactgaccaatatgcagagcgtcggtgttatgggcgacgagcgcacctacgattacgccattgccctgcgtgcagtaacgactaccgacttcatgaccgccgaggttacgctgctgcccaccgaaacgttgaccaccgcggccaaccgcattgtcaacgaagtcaagaatgtcaaccgcgttatgtttgactatacaaccaaaccgccggccacgattgagtttgaataaataaagccattcccggaagccttgaaacaattggcttccgggaaatttttgcctgtagagaattcgccgcaaaatgagaagtgtacagcctttcattcgttataatgcgtgatagaaatggcaatcaaactgaccgggaggattgtatgtatacgattgcagttgttgaagacgatcaggtcattgggaatatgcttcaagaggttcttcaaaaggaaggatacaaggtgttgcgggcctattcggggaccgaagcctgttatcttttggggcaaaacaaaccggatctggttttgctggatctgatgcttcccgggctttccggggaagaactgcttccgtatcttcacggaatcccagtcattgtagtgagcgccaaagcagacgtggaagataaagtggttttgctgctgaacggggcatctgactatgttacaaagccgtttgacatcaaagaactgttggcgaggattcaggtacagctgcgccagccgcggaatccttcttcctcggtgatccatgagggcgacatacggatggatctgatgtcccatgaagtgactgtaaaagggcaggctgttcacctgacaaagaccgagtacgcaattttgaagctgcttttgaacaatcctgctcaggcaatggccaagtcggcaatactggagcgcatcagtcaggataccccggactgcacggacagctcactgaagcagcacgtgagcaatctgcgcaaaaaactcagagatgtcggaggcaaagaatatatccaggcagtgtgggggatcgggttcaagatgaacgtgcaatcttgacggaatctttaccattttcttgaccgcctccttgacggttctctcgtaagatggatgcatcatgaaaaggaggcaaatgtaaaatggactgcgtattacaaacggatggcctgtgtaagaggtaccggcacggcacggcgctggatggactgaatatgaatgtccctaagggggctatctatggtcttatcggaaaaaatggcgcgggcaaaacaacattgatccgaatcgtctgcggtttgcagctgccgacctccggacactttactttgtacggggccggatatggtgaaccggaactggcgtcaccccgtcgccgcacgggggcggttgtggaaacaccctctctttatatggatatgactgccgagcaaaatctgaaactccaaaacaggacgttgggactgccggatgacgcaaatattccggagcggctttctctggtaggcctggaaaatacgggacgtaaaaaagtgcgcaacttctcgctgggtatgcgacagcgtttggggattgccgtagctctttgcgggtctccggattttctcattctggatgaacccatcaatggactggacccgcaaggcatcattgatgtacgggaactgattctgaagctgaaccgggaacatcaggtgacggttttgatctctacgcatattctggacgaattatcccgaattgctacgcattatggctttatcgacagggggcgcatggtccgggaaatcagtgcggcagaatttgcgcgtaccggacgcaagtgcacgagaataacggtgtcggacgtccagccgttcgtgcgcattctggaacggtttgaagcagaatacaaggtgatttctgaaaatacagttgacgtttacggcaagctgaatattgcccgactggccacagaactggaccgggaatgctgtgaactgctggaagtacaggagaaggatgaaagcctggaaagttacttcctgtctttggtgggaggaaatagccatgagtaatctgatttctgcaaatgtacttcggctgcggcagtaccgtgttttctggatggcgctgggcggtgtgtttttggtatcactcttttctatgtgggggacctcccgcagtgtggcggaaatggcgcagcttggtctggagcaaccggtagacaaatacttcttttccatggcttcgtatatgggactagtttatgccgccttcatcagcttgtttttgggaccggaactggcggacggggcagtgcgcaacaaactgattgcagggcacacccgcacaaaagtttatcttgcggactatctggtctgcctgggcgcatgcctggcgatcgcaattatgtggcttctgggcagtttgcccgggcttttctggatcggtccgttttccatgcagccgggaatggttgcggcgtatcttttcattatcgtggggttcacggcggcctttgcggcggtatttgtgctggttggattggcctcggacaacaaggcgatcacggtggttctttccctgattctgtgggtgggactgctgcttttggcgagtgccttttttgaccgtctccatgagccggagatgaatggcggcgtgatgtatgaaaacggtgcattcaaggaagtgaatcccgcacccaatccactatatatcaccggaatagctcgaaagatctgcacctggattttggaatttctccccacagggcaaacgcagttgatgtacagcaatgagattgtttcgccggcacggcagatcatcttttcggtgattttcacggcgatcgttttgtgggctgggatcaagatgttccaaaagaaagatatcaaatgagaggtcattatggtcgggttcctgttgtgcgtcattggcggtctggttcttgtgattttcggactttgcctgaaaatttatcttttgcaaaaatcggcacaggagatacgggcagaattcaggaacagactggcggaagataccaatactctcgtgcacatttccagccgtgacccttccatgcggcagctggcctcggatatcaatgcgcagctgcgcctgatgcgcagtcagcggcagcgctatcagaaaggcgaccgggatgtgaaagaggccataacgaacatttcccatgatctgaggactcctcttacagcgatttgcggatacctggaactgatgaaacaacaggaactttcttccgatgcagcacggtatttggctcaaatcgaagagcgtaccatggcgatgaaggatttgacggaggagttgttccgatacacattgtcggtgtcagagcagaaactgcatttggaacccgttgatctaaggcggactttggaggaagcgctcctgtctttttatggtgcgttttctaaaaaagggatcacgccagcccttgagctggcagatgatgtgggacaggcccttttggataatgcagccctgaagcgcgttttgggcaacatcctggccaatgtcctcaaatacagcgctggagatttgaaagtcgtactggatcggcaggggatgattacgtttacaaattttgccccggggctggatagcctgatatcccagaaactgtttgaccgatactatacggtaaacaccgcccggaattctaccgggttggggctctccattgccaggcacctgacggaacagatgggaggaaatatcacggcctcgtacaatcaggaatacctcaatatagtggtagacttttcgggggttctaatctcttcaaaagaaagccactgaaattgatttgagttatccctcaatcacgcaaagaaaagagtcagccgacggcgaaccgagcggctgactcttttctgtccagcgtatttatcagggactgtgcgatgttccgaaaggattacggagtaaagcgtcgctcctttcgtggacaagaccatgtcgtctcaagacagtgagcggcgcagacaaatgacgacactgtacactgagatcaggcgcgatgcagtttgcggtaataggcatcgacaaatgtgacataaatgataaagcccacaacataggcgatggcggtcagggcgaaaccgacgggcaggccaatggtttcctgcaggcagcccataagcagcgaaccgatgccgataccgatatcataggaaagcatatacgttgcatttgccacgccgcgcttgggcgccggggtgctgccggtaacaaaggactgaaacagcggctgcagaatcccgtaacccagaccaaaaaagaatcctgccagcagcagatggattccggtgtccatgaacagatagctgaccatggtaagaatcagaataacaaggctgacatataccaaaacacgatgtttgccggcatcgatccacttctgggtggaaagcttcgacaccagcatgccggccacaagagtgatgtaaaagtacggcagataggcggtcaggtttttctcctgtgcaaaaatggaagaataggcgatcacggcaccgtaagggatcatcaggaacatcatgttgaacatgaaggggagagcgggaccatagatggaatcacggatagaaaactttttgcgctccactttgggataacggatacggcagcaggagacacagatcaaagcggcaaccgtaatgccgaagatagtgaggaaagatgcctcgctgctcatgtgattctggacctgcagcccgacataggggccgacagccataccgatagagacggtgaaggcaaagcggctgatgccctcggtgattttttgcggcggcagcacatctccggccagggtcatggtggcagagccgcagaccgaatagaccgcgcccatatacaggcgaacaacgatcagcgctccaaagagcggcagggcaataaaggcagggaaagacaggcagaaaagggccagaaacagcagataaacccaataccgattgaagttatctagcagataacccgcgatggggcggaacagaatggtagccaccgacatggctgtgagtacgatacctacccgggaaccggtaatgccaatctcctgacaataaatggggatgatggggatggacgcgtaaaaagctgccagtacaagcagattggtgataaacagaagaataaatcttcgattccagattttttcattcttttccatgcaatcagaactccttttagtagcataaaacaaaaaaaagatggtggcaactgccaccatatataaaatacaacacccggaatggaatgtcaatatctggttgcatatgccaccaaaatgcggtatgatgtctaagaaggggaggcctgattttatgtacagcacagaaagcccgttcaaatccatttccatcttgtaccggaaatcccatatatggctgaacaacggctgtgccggctgtgatttgactgcggcacaggcgctggtgattttgatcgtctgtgacttcaaggcgctgacacaggatgaaatcaccaagcggctgtcactggacaaaagtgtgattgccaaaacggtcaccaaactggagatagccgggtttgtccgccgcaccacaaatgtcaaggacaagcgcacttatgatatcctgccgacggaaaaagcatgggaagtctatcctcggatcaaagaagaaatcgaccaatgtttcctgcggatgacgcagtccatgtcggaatcggagcggacagaatttgcccgccttttgaaaatagccgccgaagcctccattgcgttggaggaataaaaagaaaaaagccagccgatcaaaagaccgactggcttttattttatggggcaaaagaatgcgcaggagcgatcaatactccccggtaaaaggcttctcgacacccagggcattcaaaacggggagcatctccgcagcctcacggcgagcggcgaccgggtccatcatcagatagttcccgcattcctgtgccgatgcaccggggatctctccttcatattcagccatccaggcaaaggattcacggaccagtgccaggacctgcattttatccaggcctgttgtcagcagataaaacccggtcaggcagcccatggggccgacatagaccacatgttcagaccaggcactgttgcgggcataggtggcaaacaggtgttccagggtatgtgcagccgcaggggagaggtattgcccctgattgggacgcttcatccggatatcccaggtcagcacgtcaccgtcctgacgggaaagatagactcccggcatcagcgtggtgtgatccacacaaaagcttgcgattcttttcatcacaacatcactccgcaaccgactgtacaatgccgtgctcgcaatccatcaggacaggagcgccgtcgttgaggatacgcatggcatgggatgcgccgacgataacggccttgttcagggtgagaccgacaatggcggcatggctgttggtgccgggctcttccacgatgatgccggcggcgctgcgcatatagggcaggaaatcattgttggtgaagggggcaaccaggatgttgccgggcttgaactttttggaagcctcggcagccgtgcggcagacgcagacgttgcccttggcgttcagagtaccgatacccacaccggaaagcaggctgttgcccaccagatggaccttgatcatgttggtggtgccggaaacgcccacggggacaccggcagtcacaacgaccatctcgccgggatggatcagtccggcctgctcggcggtctcgacggacatgctgatcatttcgtcggtggaatgcgcatacggcatgatgagcggcgtgatgccccagtaggcattgagctggcggcggacgcactcatccataacgcaggcaatgatcggagtttcgggacggcagcggctcagcaggcgggcagtttcgccgctcttggaaaccgtaatgatggcgctggcgtggatgtcgctggcggtggtgcaggctgcatgggcgacagctgcgctgatattcagccggctgtcatcgctcagagcgtggtggaccaggctgttgtaattggaatcactctcggcagtgtctgcaatcttggacattgccttgagggcttctaccgggtatttgccggcagcggtttcgccgctgagcatgaccgcggaagaaccgtcataaatggcgttggccacgtcggtgatttccgcacgggtgggacgggggttggaaatcatcgagtcgagcatctgggtggcggtgatgaccagcttgccggcagacatggtgcggtcgatcagatgcttctggatagcgggaatctcggcaaagtcgatctcgacacccatatcgccgcgggcgaccatgatgccgtcggcgacgctcaggatctcgtcgatgttgtcgacaccctcctggttctcgattttggcaatgatgcggatgttgccgccgttctcattgaccaggtggcggatctccagaatatcctgggcgcagcgggtaaagctggcggagatcagatcaaagccctgctccacgccgaacagaatatccgaacggtcgcggttgctcatatacggcatggagagatgaacaccgggaacgttgacgccctttttggtcttgataacaccgtcattctccacgatgcagtggatgtcggtgtcggttacgttctcaatgcgcagagagatcaggccgtcgtccagcataatgcggccgccgggctgaacgtcgcggggaagctccttatacgtgatggaagagatctcgttggtgccctcgatatcccgggaagtcagagtaaacttctggccggcaaccaggttttcggagccgtttttgaaggtgccgagacggatctcggggcctttggtgtcgagcatagcggcaacagggcggtcgagttctttggacaaagaacgaagcgcctcgaaacggcggcgatgttcatcgtaatcgccgtgagaaaagttgaagcgtgccacattcataccgttttcgatcagtgcacgaaggacgccgtctttatcggtggaagggccaagagtacacacaattttcgtgttgcgcatggaaacctcctgtgttttttatttgtgatctttaatatgcatacatatccaattatattatcttttcccggattctacaaggggaaacacgtggatttgacagccttgtggcaatttacacaaaatcaaaaactcctgacagtgtgcatgtctctgttacgctgtgcttgcggaggaaaatctggtcaaataacggtctcagatatagaatagtaacaatgattcgggataccatttagcggaggaaggggccgcgaaatgcgtgtccaaagccggactctccgacgaatacttgaccactgcctccaacgaataaacccgcagcatatgaccggtgaagtcccggatatatgcagaaaagttctgcgttgtcggaagcgtaaacaaaataatattgcatgggcgagagagcggcagagaagcgcgatcggcctgcgagacaaggcagacgatgtaaaataaggtttcagtatgcttactctgcgtttacaaatgccccttctttcgatataatggtcctagaatcaaatgtgtattttgcccgcccgtgcggaagtttttctgtgagttttcgcaggggcaaccgggcaaaatgaaaaagaaaggaaaaaacatggcaaaacgtgtgtttttgattgttctggacagctttggcatcggtgccgagccggatgcggagcagtttggcgatgccggaaccaatacgctggcagcggttgcaaaacatcctgcgttccgcggcgagaatatggcgcggcttggtttgttcaacattgacggtgtcagttgcggtactccttgcgagcatcccgtcggcagcttcgcccgcctgcgggaggcaagcgccggcaaggatacaaccatcggtcattgggagattgccggtatggtcagcgcagaaccgctgcccactttcccggacggtttcccgaaggaacttctggatgaattcacggcaaagaccggctaccaggtcctctgcaacaaaccttattccggcacgcaggtcattcgtgattacggcgaagagcatatgcgcaccggcgcgctgatcgtttatacttctgcggacagcgttttccagatcgctgccaatgaggcgctggttcccatcgaaaagctctatcagatctgtgagcaggccagggaactgctgaagggaaaatacggtgtcggccgtgtcattgcccgtcctttcgtgggtgacaaagccgaaaactttacgcgcacttcccgccgccacgactattcgcttctgccgcctcgggagaccatgctggatgtgctgcagaaggcgggtcttgataccatcggcgtgggcaagatccatgatatttttgctggcaagggcgtcggagagaccatccgcacgtccggcaataccgaaggtatgaaagtcactctggaactggcagaccgtgattttgagggcctggcatttgtcaaccttgtggactttgacatgctgtacggccatcgccgtgatgtggagggctatgctgccgcgctggcggaattcgacgcatggctgcccgcatttatggaaaagatgcggccggacgatgtgctgatgatcacggccgatcacggctgtgacccggcatataccaagacgaccgatcacacccgggaatatgttccgtatctgatttacggtgcgcccatccgcgaaggagttgaccttggcacccggtattgctttggtaccatcgccaacaccgtgtgtgagtatctcggcgtggacacctgcctggatggctgcggcgtgatgcacgaattgaagcgctaaatgaacacagtgaggaataccgtgatattgaccatcattcggatcattgccgttgcactgaccgcttattccgttggccttgtgttcatgagcaacttcaacatgggcaatttgctggtctggctgctgactgccgcaacggtggggtattcggtctggtatagaccgatcaatcgctggttctctacgggtgtcgggcgtgtcattggcatcgttcttttggcaggagtgctggtttacgcggcgcttctggtgttcgtgtcagtgagcggctatacaaaccttgcgacaggcaatgaacaggtggtcgtggtgcttggcgcgggactgcgcggtgaccggcccagtctgcttttgcgataccggctggacaaggcgtacgagtatgcctgtgaacatccggatgcattggtcattaccaccggcggccagggaagggacgagaccgtcccggaaggtcaggccatgcgggactatctgattgaaaagggtctggacccttcccgtgttttgcaggagaccaagtcgacctctacggaggaaaactttctctttgcccggcagatcctgctggatcacggcatggcggaggataccccaattgtctatgtgaccaacgcctttcactgctaccgtgcgggggagtacgcccgtcgcgccgggtttgaacaggccaaagctcttccggcggggatctcctttttgagtgttctgccgtgctacctgcgggaagtcttggcggtgctgtactactgggtgtttaagacctcgcagtcagggcctatgcatgccatggttggcttgctgagcctgaataaaaagttcttttataaatgatccgagatgctttcgggtgttttggaacaggaataacaatagggtaaggagctgttgcagaaatgcagatccgctattataaggagtacagccggtatcttgaccgggatatggaattcaaggtgtttggccacgcgggacggccaatcctgattttcccttgccagagcgggcgtttttttgactgggaaaatttcggaatgtgcaatatcgcagcgccttggatcgatgcgggcaagctgcagattttctgtgccgacagcatcgacggagaaagctgggatgcgcctggccccgaacgtccccggatcgaaatgcaggaacgctggtacaattatatctgtgaagaactggttccccgcgttctggaaatcaaccgggaacagggaccggaccacacgggccgcattcttgtgggcggtgccagcgttggcgcgggccatgcggtcaacttctatctgcgccggccggaccttttcaacggcaccattgcgttgagtggtatttacacgaccaaagaattcttcggcgattatatggatgacctggtttaccgcaacagtccctgcgactatatgcgcaatttccccaaggatcatccctacaaagagctgtacaatcaggccgataagtttatcatgtgctgcggccagggagcatgggaggacaaactgcttgcctccacgctggaactgcgggacattctggaaagcaaggacattcatccctgggtggacatctggggcacggatgtttcccatgactggccgtggtggcagcgtcagtggccctacttcctggaaaacatcctgggcccggcgtaagaaccgtgcctgacaggggagaatacaatgaatttgtttcaagacgaggcgaccgggcagcggctgcgccgtgttctgggcgttttgatgcttgttgtgctgatcccggtttttgtggtggcactatataaccgtccttcggcggatgactatgtttatgcggcacagacttatgcggcggtaaagtcgggggccggctggggcggcgtcctgaatgcggcgcttgagacggacctctacttttacaacaactggcaggggctttatgtctcggctttccttctggcattgcagcccgcaattttcgggggacagtggtatgccgtgacaacggttctggttgtcggcttgttgtttgtaggagcatggggactttcctcggcgttcctgggacgtttttggcccggcaggcgggtgccagttctgtttgctgcgctgatgtttaccttcgccgtggtgcagggaatgcccaatcaggtggaaggcctttactggtacaacggcgcgatgaactatattccgttttttgcgctgaccatgcttcttgtttcactgctggtgcggacatataccgccaagtcccgcggcgttaaagtcctgtttacactgcttggctgcgtgttgtgcgctttgattgcaggcggccatcatgtggtgatcctgctggccctgatgctgcttgcttttgccgtggttgcctttgcgcgcaaaagaatggcctggcccgttgcacctctgctggtctgtttgggcgggctgtatctgaacatgacctcgccgggaacgcaggttcgcatgtccggtttttcttctgcctccatgccggaagcaatcgtcaaaagctttattctggcggcgctttccatccttcgttggatggatcttccgctgatttgcctgctgctgttgtttacccctctgtttctgcgacttgtccggaatccggagattcccccggagacatttcgctgtccgtggcttcccgcagcactcacttttttgctggtctggggcatgatctggctgccttcttacaccatgggcggcatcggaccgggacgcctcatcaatgtggtgtggatcaccttcctgatcggtttgctggtcagctgggcggtattcctggggtggatggtacgcatcagaaaagcgggggagcagttcgctttttcggggctgactttcaaacagggggcggtcatcggttctgcgctggttctgtgcatcgcctgtatcggcggccatactgtaaaagaaggtctggacaaccgcttcgcaaccagcctggaagcggcgtgggaactggccaatggcacaccccaggcttatgccgcggcattggatgaacgggaagcaatcttggctgacccggaggtcaccgatgcggtgatccggccattgacggaggaggaacgcccggcgctcctgttcttcagtgatgtgactcccggcccagacaactgggggctgacggaatactacggcaaagaatcggtgtacgtggaagagcctcagcaataacaccataacgcataaaacccgcccggaaggtttgagcacggccttccgggcgggttttcgtttggatggaaaaggatctgttatgcgcgttccagcacatagtggataaaggcgtcgcggtcctcggcggtggctacgttgacaacgtacatctggttgcccatgtccatggcaagagcttcgggcatacggtcgcacattttcatggcggcgccgtagcgggcctggatctcggcgtgcgtgtgcttgtactgaaccccgtcacggcgtccggcatagacacagaagaacttgggaccgttcatgtcctcgtgaatgacctggtcgtagcagatcatatcggcccagacctgatagcaatctaccgagttggcaaagttgatcatgtcgggagtatagccgccggccggccgcatgttgacctccagggcgacaaagtcgccttttttgccaaggccgggtttgtcgctgttgagctggaaaaactcacagtggaagaaacggcttttggctccaaaggccttgatggtgcggaagccgacatctttcagggcttccggaacttcgcgctggacccagtaagccaggtcaccgccggtgttcacgatgtccatgatgggggtggggaagtagttgctggtatagaacagcggtacacagtggctgtcagctacgccgtcaaagctgacgatggtgccgtcaatgaactcttccataatatactgtacctgcggaagatgcgcataaaaagctttgaggtcttcaagatttttcagcttgtaagtggcttctgcgccgcatccgttatccggcttgacgatgacagggtatcccacttccgcaatgaatttcttggcggcatccagcgtggataccatatgatgacgggccaccggaacgcctgcggcgcggtagctgtccttcatgcggcttttgtacttgatgcgggcaataaaatcattctgtgcgccggtggtgatattgaaatcggtgcgcagctgggcatccatctcgagccagtattcgttgttgctctccagccaatcaatcttgccgtaccggaaagtaaaatatcccacggcgcggaccatggcgtcgtagtcggacaggtcgtccacacgataatactcggtcaggctggctttcagttcctcggggatggtatcgtacggggcatcgccaatgcccagcacgttcactccgttgcggcgcagacggtcacagaaattccaataactttttggaaaatgcggagacacaaaaataaagttcatgattcttccctcacttcaagaatgtaccgacaccccggaatgcggaagtgccggtacagctcagacaaactgcccgcggttgctgtcgtaggtgtaaccgatctccgccaggcgttcgcacaaagccgacggatcgacatcctcaaatgagcagaagttctcaagagtatggtcgcggtcacgcagtttggtgttgacgtaactcaatagaataacagggtcctgcggcaacatggcaaagcagctcctttccttaataaaacgacctggggatggttttgcctttgggatacatgcaaaagcgcacagaaaaagccggtcacctttgtgaccggcatttcttccatccagatcagacagcgcgggtaaccttacccgaacgcaggcagcgggtgcaggcgtagatatacttcggggaaccatccacgatagcttttacgcgcttgacattgggattccaggtacgattgctccgacgatgggagtgggataccttgataccgaacgtgacacccttgccacagcatgcacatttggccattctgcttgcacctcctttaagtagctgtactatcatagcaaatccgaaagaaaaatgcaagaggttttttatatttactaaaaagtttgtcaaaaaattgtgcggacggcgcatttgcgggctgaaatcccgccaaactcccatattttgtggccggaaacggccaagtgtcttgtacgtccgagcaaattacgatataataaactgattatctatgatctaaatacggaggaaaaagatatgggagggctgttggggccgagcgttttggttgcgtatcttctgcgcgcggtggtcatgctcattgcaattccgttccatgaagctgcgcatgcactggtcagctggcgtcttggagaccccactgcaaaaaatgcggggcggctgtccctggaccctcgccggcattttgacctgatgggcggcatctgtatgatttttgcaggagttggttgggcacgtccggtaggcattcgtccggaccgcttcaaaaatccgaaaacaggcatggccatctctgctgcggcgggaccgattgccaatctgctgctggcgtttgtgtctatggtggtttacaaactgcttgccgtatggtttgggctttcgttgccggtactgttgtaccgccttctatattatatgatatccatgaacgtcagtctggcggtattcaatctgctgccgatccctccgtttgacggcagccggatcgtgctgctgtttttgccgcagaagtactattttaaggcaatgcggtatgaacggcagattatgattgttgttttgctggctgcggttttcggcgtgctgaattatccgttgtcggttgtgggcaatgccgtatggcagattctggatgcggcaacggcgtttatcgcctgatcgggcacacaatgcccatactgaaggaataggggagcattacatggaggcattgaccttcaaactggaagattttgaaggcccgctggatcttttgctgtatctggtgagcaaaaataaaatgaacctgtatgacatcaatatcatgcagctgatcgatcagtataccgcggttatcaatacactgcaaagtgaccgtatggatgtggccagcgaatttattgatatggcggccaagctggtccagatgaagagcgcgctgctcttgccgcgcagcccggaagccgagcgcatgaaggctgagctgacaggccgattgatcgagtacagtacctgcaaggcggttgctgctcagctgggcggccgcgcacgggatgtttttaccgcggtgcgtcagccgcaacctttggttggggcggcggagtatacccgccgtcatgacccggagcgtctggtacaggcatggtataatttgatgggccgcagccagcgcaagcgcaaacctacgcaggaacgctttgaaccgctggtgaccgcgccgttcgtctcggtgtcgagccgggtcattcatatgctgcggggactgatccgcggctctttgtccaaaatgggacagctgtttgacaagacacaaacccgcagcaccaacgtggctacgttcctggcgctgttggaactgatccgtgccggccgtgtacaggtggggggagaaggcgacctgcatgttgaccgcacccaccgcagagatcgaaaggggaagatgcaaaatgaatgagaaacagcgtatcggcgcattggaagccatgctgtttgctcatggcgaaccggtggagctggaacgccttgcggacgcactgcacgccgaacccattcagacccagatactgctggaaaagctgcagaaacaatatgatgagcgcgacagcggcatggttcttttgaactttgaggaccgttggcagatggccacccgcccttattatggtgaggtcgtcaaacgcattctggatacccggcgcaatgcgccgctttctcccgcggccctggaagtgctggcggtcattgcctacaatcagccggtttctcgcagcttcattgaacaggtccgcggcgtggattcttcgtccacggtggcaaagctcctggataaaggactgatcgaggaagcaggacgtttggacttgccgggaaaaccggtcagtttccgcgttacggacacattcctgcgggtattcggactggggagcctggcggatttgccgcccctgcatgaggaagagccctccggcccggaaccgaacgccgaggaaccgcaggacgaaaccgtggctgagcagttggagatccatccatgaacatccttttgttgattctgcaaatcctgggcatcgtgatcctggcagtaattgtcattatctgcgggattctgctgctgccggcgggggtccaaatttcctggaaggaaaagatgacagaggtctggctgactgtgggacctttgcgcagacgtttttatccgccgcgccccaaaaaagaaaagccggaaagcggtacggccaaaccggacgaaccctcccgaacggaggtcaatggaccggaaaaagaggaagcggaaaagcaaggtgaacccaaaacagacgtggagcagccgacgaaaccttctcccaaagagccgcagcctgacgagggcgacagcctgtatgagaacatcatggggaatccggcaaaatacatccgtgtcctgacggactgggccaaggggccgggaaaactccttctcagccggatcaaagtccgcaaggtcaggatcgtctggacagtcacagctgatgatgccgcggcgactgccatcgcatacggtgcgctagcgggggcatgcaacacagcatgggcggtattggaggatcttgtggatgttaaggcggaagaactccgcctggaaccggattttaccggggaacgcaggaaagaacgctgtttctcttgccaaatcacagcaagaatgtatataatagttgcatcgatcgttctgacgctgtggcgcagggtcaaacgtacgtctgcaccgcgcaaaagaaagaatacggcagcgacagccgatgcaaaataattcataaaatccaaaccagtttacagcggcagccgcgagggcggccgttttctgaaggaggagacttatatggcagaacatcctgtccagggcctgatgggggctaccgtcgaaaagatccgtgagatggcggatgccaatacgatcatcggtacgccgatcactcttgatggcagcaccaccatcattccggtttccaaagtgaccatgggcttcgcttccggcggttccgatgtcggcgccaagtccaccaaggaaatgttcggcggcggttccggcgcaggcgtgtccattacgcccattgcgttccttattgtcaaggacggtacggtgcgcacggtgcagctggcggagcatgtctcgcctatcgacaatgccatcaacgcactgccggagctggtggacaagctggccgctcttgtcaagaaggacggcgccgatcaggaagaaaagaaagaaacggcacagtaatctggccgcgcaatacacggaatgaacgggcgcggcccggcttacaggccggacagcgtccgttttctctatcaggaggaataacatgtcagaacagcgtattcagaaagtcctttccgatcagggatactgctcccgccgtgcagcggagcagctgattgcggaaggccgggtcaaggtcaacggacatccggtcggccttggagataaaatggaccccgattatgataaggtgtcggtggatggaaagaatctccgcattgtccgcaagcgtcagtacatttatctgatgctccataaacctcggggctatatcaccactgcgtccgatgagcgcggccgcaagacggtaatggacctgctgaccgatgtgccgcgccgtgtttacccggtggggcgtctggataaggacagcgagggccttttgctcttgacggatgacggcgcctttgccaacctgctgacccatccctcgggcggagtcggcaagctgtaccgcgttaccgtgcgtccccgcgccaccgaacagcagatcgtgcagatgtcctccggtgttgtgctggatgacggtgtgcgcaccgcgccggcagtcattcatgttgtgacggacgagcccggccgtactgtgctggaaattaccctgcatgaaggccgcaaccggcagatccgccgcatgtgcgaagcggtagggctggaggtcgtccgcctgaagcgcagtgcggaaggccccgtcaagctgggaatgctgcagcccgggcagtaccgcgaactgaaaaaatccgaggtctcggccctgcgtgcagccgccagacagagcaaatcctctgcggcgaaagaagaatcttcccgaaaaggtcctttcccgcataaataatatgtcggaatacctgtcagatgatgtcacgcaagccaaaaaaacttatacaccgtgcacaattttgtgacaaaagcacttgtttgacagaaatttacgtagtataatctatacatatggcataacgcaaccatcttgcactatcacaacagggaggttcatatatggcagcaaaaaaggcgggcaaggaacagatccttgcacatttttttgacgacggtgtctatacgccgctgttccaggagggggctgtgagcgctgcttacggctgcgccaacggtcagaccgcatatgtggtttgccaggacggcaccccgctgggcgtcaatgacatcaacaagaccatccgcgtgctggaaatggccgccgagaccggcaacccggtcgtgacgttctacgattccaccggcgcaaagctggacgggggactggagcttctgaccgcgaatgcccgtctgatgagtgagatttcccgcatctcgggcgtggttcctcagatcgccgttgtgaccggcgtctgcgccggtacttccgcaatccatgccgctgcggcggatatctgcatcgtgtcggaagaggcggagctgttcctgaccgctcccttcaacagtgacgacaaagtggcggatgccggtagcgaagcttttgccgcacgcgccggtgtcgaggctgttcatgccaaggacgcgctggatgctgccaagcaggcttccaccctggtgggcatgctgccgggcaataacctggccggccccgctgtgtttgattttgctgctcccaaggctgctctggacctggctaagtatgatcccaagcaggctgctgcatccattgccgatgccgacagcctgatcgagctgtacgctggctacggcgccaatgtgtacaccgctctgggcaccatcaacggcatggctgcaggcatcatggctaccgccaaggccgggctggatcaccactgcaccgccaaggctgcccgctttgtccgtatgtgcgatgcttacagcatcccggtggttaccgtggtcaataccgacggcttcgtcaagagcgaatccgacgatcaggctggcggcatccgtcaggctgcccgtatggctggcgtgtatgcagaagctaccacggtgaaggttgccgttcttgccggtgaggcagtcggccctgtttacaccgtgtttgccgcccccgcggactggcgcattgcagtggaaggctgcactgtcgctccgctggcacccgaagcagcggtgagcgttctgtacaaggacgagatttatgcttcggacaacattaccaaggctaccaaagataaggccgctgcttaccgcagcgaagtctgctccgccaaggctgcagccgcagccggtgctgctgacacggcttctgccgctgccaacgtccgcaatgaagttgcacaggcactggatatgctggcaacgaaacgtgcggttcgcctgtccaagaaacacggcaatatcgcgctttgattatcggagacttctgaactttgaaggaggattatccctatgaaaaatcttaccgttaccgtaaacggcgttgcctaccaggtcactgttgaagagaataccggcgcaccggttgctcctgctgcgcctgccgctccggccgcaccggctcctgcagcagcccctgctcccgctgctgctcctgcacctgccgcacctcagggcgctgccggcgctgtttccgttgccgctcccatgcccggcaacatcctggacgttcgcgtcaagcccggcgattccgtcaaggccggttccgttatgatgatcctggaagccatgaagatggagaacgagatctccgcccctcaggacggcaccatcgccaccgtcaatgtccgtaagggcgacaccgtcagctccggcgacctgctggtcacgatgaactgagaacacaacacatataaagtgaccgcaacgcggttctaaacgaggtgaacgagattggctaagaaaccgataaagattaccgaagttgtgcttcgcgacgcgcaccagtctttgctggcgacccgtatgaccatggacgaaatgcgtcccatcctgcccgaaatggacaagatcccgtatttctccgttgagtgctggggcggcgcaacgtttgactcctgcatccgcttcctggacgaagatccgtgggaccgtctgcgcatcctgcgcaaagagctgccccaccagaagctgcagatgctgttccgcggccagaacatgctgggctaccgtccctatgcggacgacgccgtcgagtactttgttcagaagtctgtggccaacggcatcgacgtgatccgtatttttgacgctctgaacgatccccgcaacctccagactgccatcaaggcagccaacaaggaaggcgcgcatgtgcagggctgcatcagctatacgctgagccctgtccataacaacgagtatttcgccgagtacgccaagaccctggaagagatgggcgcaaactccatctgcatcaaggatatggccggcctgctcaagccctatacctgctacgatctcgtcaaaaaactgaaggagaccgtcagcattcccatcgatatccatagccattacaccgccggtctggcttccatgtccattctgaagggcatcgaggctggcgctgatattgtcgatactgctatgagcccgctggctctgggcacttctcatatgcccaccgaaagcctggtcgctgctctgcaggataccgactatgacaccggccttgacctggctcagctgaacattgtgcgtgcatactttgccaagctgcgcgagaagtatatcgccaatggtcagatcagccccaagagcctgggcgtcgacgccaacaccctgctgtatcaggtcccgggtggcatgttctccaacatgctcaagcagctcaaggacgccggcaaggaagacaagctcgacgaagttctgaaggaaatcccgcgtgtccgcgaggatgccggttatccgccgctggtcaccccgaccagccagatcgttggtactcaggcggtcttcaatgtcattatgggcgagcgctacaagatggtcaccaaggagttcaagggcctggtccatggcgattacggcaagactcccgctcccatcaagcccgagttccaggctatgatcctgaagggcgagactcccattacctgccgttttgccgatacgcttgagccggaaatggacaagctgaaggctgaagctgccaagtacgcgattcaggaagaggatgtcctgacctacgctatgttcccgcaggttgcgcccaagttctttgaaaagcgcaatgcacgcatccagggggttgacgctctccatgcggactacgagaacaagagccatcccgtttgatggacttgcgttttcacctgaacaaaaagcaataaactgaaaaccgccccgatgcagaattgtctgcaccggggcggtttgttttttgaagttcaagattggatagggcgctggaatcgaacggaaataagacggaaagtcttgttctaggaaataaatctaccgatttgccggcaaaaggggagcgcgaggaagttgctgccaaatgccaatccaatacattcggtgcagcatacgctatcggttttaggagaggccttcgctttcggcctcagcgctttcttcgtagccggcttcataagccgcgttggtgtgtccggggaagggataggtgcggacctcgtcggcagtcagctccgcgacgccgtaccacttggcccgtgccagtgcaatggaatcttctccgttctcacgaatatcaggcagatcataggcaccgcaccatttagtatacggctcgattccataggtgacgatgggggctccttcattttcggaggcttcggaaacgatcagcgcttcccgggtacggtacatcatccaatagctcgcaatgtcgtaggttgcgccgcaaatatcaaacaggcagatgacggatacgcaggcggtaccggcagcgaacagcgcgcgaagctgcttgccttccaactggatcaggcaggcagcacaggcggcagtcaggagactgaaaactccatgggaagagcgatcataataaaacgggctcaggatcatggcgaagtttgctcccaggccgcccaacagcaagatgacaggccacgccagatcggccggcgatttcttttgcatccagagcaggacataaagtgccgcaaataccaagagcagaggtagggcgttgtcccacagcatattcacgcagtccagaaaacggacggcatacttggtcaaaaacggcgttgtgtcagcaaaatcgtcggcgcgattgtaatttccgggggcagcgatcagaatcacaaatccaagcagagcgccgccaaatccggtatacatccaggtggggactttctgtttttgccacagcaggaaggcgatgcacaataccaggcagacgagcataccggcgctggtattttcgctgagccatccggcaaacaatcccgcaacagccataccaatgcacatctttttgccgcttgcaaaaggcttttgcaggtaatatcgccacggcagcaaaaaggcaagacagcccaaggaggcccacaagtagttacatgcgccgcacatccaaagattggtctgaccaaacgcagggctgatttcccaaagcgcagcctggatcaagatgaaagcgataacatcgtaccggccgctgctgcgtccgcgggcaaggcggtagatgacgagaccaaggcccagataggcggcagcattgaaaatgttgaacacaattttggggaacatggtaaagccctgagcaaagaactttacgatgacccgcccggtccattccatataatgaaacgcaaggctttggatcagctgcggcagactttgcagccgcaaccccgtgtcaaaggcataagcgaaagtgaagtcatcggcaatatacggcgtcaggcagttgtacaacagcatcagcacaaagaccaatacggccaaaaggcgaaagcatattttgcgatgctttgtcccgaggggcatggcagatacctccattcaggcccgtagaaaaatgagccgggattcaaaggaaaatcaaaatacggttacgattctaaaggaattcggaatcaaaatcaagttcgcacggatcataccccttcaaaatcaaaggggggagtgtattcttcccgggcgctgcttttttgctgcatgtaaccgtcagtcagaccgaaacgaatggcagcgtccacaactttccggtactcgtagctggtgactcggcgtcccagcccctgctcggcggcgtggtagaagggagtgaactggcacatcagactggtgacaaaaggaatacctgtctcatcccgcagagcggccatacgttcaataacgcgcagagaatcctccgcgtgtcccggcagcacaaggtgccgtaaaataaccccgcgagtcatgtatccgtcgctgtcataccggggcgcgcctgtctgaaccagcatctgccggatggcttcctcacagacatcggcatagtcgggggcattggaaagctgagcggccaattccggatcggcatatttgtagtccgccagccagatgtccacatcattggtcaaggcgcggaccgtctcaacgcgctcatatccgccggtattgtatacaacgggaatcgtcagaccctgttcccgcgcatcccggagtgccgtgcggacccagggcagccactgggtcgctgtgaccagattgagattcttggcaccttttttctgcagttccaaaaagatatcggtaaggcgcgcgacatcgatttccttgcccagaccttcctgactgatggcatagttctggcaatagcagcatttgagggggcatccggtaaaaaatacggtaccgctgcctgtctccgcatcggcggggccgctcagacagggctcttcccaatggtgcagtgcggcgcgtgccaccagcaatttgctgcctgcgccgcactggccggtttctcctgccagacggttggcgccgcactgacgcgggcataaacggcaacaggtgggaagattcatgatacgcatcctttccgggcattaaaatcgtgaagaactcaaggaatctttgtatcagtttaccacaaagcggcaaaatgtggtatactgaattcacaacaaaagaggccgcgtgcggcggcaatgtaaagagaaaaggagagatgtaatatgtctaccccgcataaccgcgcacaaaaaggagatttcgcggcgaccgtgctgatgcccggcgatccgctgcgtgcaaaatttattgccgatacgtttttggagaatccgcgccttgtcaccgacgttcgcggaatgtacggatttaccggaacctaccagggacgccccgtcagcgtgatgggtagcggaatgggaatgccttccatcggcatttattcctatgaactgtatacccagtatggtgtagagaacattatccgcatcggttcggccggttcgtataccgaaaaagcacgtctgtttgacgtggttctggctaccggtgcctattcggaaagcagctttgccctcacccagtccggggacccggatgacatccagctgcccaatgcggagctgaacgacgcactgcgtgccagcgccgcggcgcagaacatccctctgattgaaggcgtcatccattccagcgatgtattctatcgggaaccgtccgacgaaaagccggtgtattgggagcggctgcgggacgaaaagggctgcgttgcagttgagatggaaagcttcgcacttttccataatgcaaaagtcctgggcaaacgtgccgcctgcctgctgaccatttccgacagctttgtctctcccgaggccactacccccgagcagcgccagaccagctttaccgccatgatgaaagtcgcactgggggtgactctttgatggacgaccggacgttgatccgtgcggccttcgccgtgcgtgaaaacgcctatacaccatattctcacttcaaggtgggggcggctcttctgggcaaaagcggcaaggtttattgcggctgcaatattgagaacgcggcgttttcaccgactatctgtgcggaacgcgcggcactttcccaggcagtgagcagcggagagcaggaatttgaggccatcgctgttgtgggaagcctggagaaccagaagaatactctgcctaccagcccctgcggagtctgccgtcaggctttgttcgagtttggcggaaatgatctgcgggtgatcctggccaaaagcgaggatgattatcaggtctgcacgctgggagatcttctgcccatagggttcggccccaaaaatattgagcaccgatcaagcggatgccgttggcgcatgtcgtggcctcgccggatcgatcctcccggttgacaggtggcacgggatagggcatactaaagactcagccgtacgcggcgacgcgatgtgcggccccggcgcttttttgcagcaaagtttaaggagatatacgttttgatcaaaaaagttttgtccgtcatactttgcggagctatggcggtgtcgctctgtgcctgtaatacgcaggatgcaggggataccacatctcttgcattgcaggatgacgcaaattatgttttgcaggtcgaagaaaacgaagagacggcgctggacggcggcggggcaacgattgcccttgctgtcgattctgacggcgtggagaccggcatgaatgcaatgctttggctgggcgtccagcagttttgcacaacgttcaatttctctgcgcagctgtttgaagcggaaggggaaggcgttgaagccaacgaggaagttctccgcaaggctgccgaaagcggcgcggagctgatcgtttgcgccgggcaggatatggaagtgccgctgtacgagctgcagaacaattatcccaccatcagctacctgatgattgacggcgaacctcacagcgaggactacgccagctacagcacggcgtccaacgctcattgcgttttgttcagcgaagaacaggccggatacctggcaggttatgcggcagtggccgacggatacacgagcctcggctttttgggcgcggatatgctgcccggtatcgttcgttatggcacgggctttttgcaaggagcccaggctgctgccgagcagaacggcgtggaagtttatctgaagatctggtacagcggtcagtacgatgcctctgaggagatcacggcccggatgagcggatggtattccgatggtacgcagctgatctttgcctgcggcggaactctggcacagagctgtgtcgatgcggcacaggaaagcggcgggcatgtgattgcggcggactggaatcagaacacgttggggagtcaggtggtcggttcggcggtcaaacgttattcgactgtggttcagaatcaactttacgggttctattccgatggtgtgggctggaacaacgatcaggccggccagacggaacgggtcggagtgtccaccggtgcgctgggactggccactgcgcagtggaactttatggacttctctcaggaggaatacgagcgcctttattcggggctcatctccggttccgtcaaggtggaacgctattccgatcccaacccgtccaacttgccgcagacgcctaatgtggcctgtgattaccaaaactgagaatttttataatgcgtgtcaaaagtttgttatgcttttgtaatggccgtattgattgcaaaaagagagaaaaaccgctatacttctagtagtatggcagggatattttgtctctgatcacccgaaaacaaaggagaatacaagtcatgaaaaagatttttgctttgatcatggcggcaagcatggcgttctcgctggttgcctgcagcaatgattcctccaattccagctccggtgcttccacctccactggttccaccagtgaagctgctgccaccgattccgatgccaagaccgatgtggcgttcatcaccgacgtcggcaacatcgacgaccagtccttcaaccagtacacctggcagggcgttcaggatttctgcgacgccaacagcctgaaggctaactactaccgtcccaccgaggactccgacgctgctcgtctggagcaggtcgacaacgctgtcaatgacggtgccaaggctgttgtcatggccggctacctgttcgccaacactctgtacgaggctcagaccaagtatcctgatgtcaccttcctggctctggacgttgccgtagccgatatgctcggtgccggtggcgttgacaccagcgcggctgacttcaacatggatgactacgatctgtcccagtacatcaccagcaacactgctctggtcacctacaaggaagagcaggctggctatctggccggttacgctgccgttgctgacggctacaccgagctgggcttcctgggtggcattgccgttcccgcagttatccgttacggctatggctttgtccagggcgctaacgaggctgctgccgagatgggcgtttccgatgtcaacatcaagtactggtactccggcaccttcagcgccagcgacgaagtcaagaccaagatggacagctggtacaccgagggcacccaggttgtctttgcctgcggcggccagatcggcaactcctgcgctgctgcggctgaggccaacggcggcaagatgatcggtgttgacgttgaccagtccaacctgggcgatttcgtcatcacctctgctatgaaggctctggccaactccgtcaacgttgctctgaccgactgcatgagcaatgactggacctggagcgagacctactccggcgtcgaggctaagctgggcgctgctgaggattgcgtcggcctgcccatggaaagctccaagttcaccaacttcactcaggagcagtatgacgagatgttcgcctccatcgtggacggcactctggtcatcgacgacagctctgacgctgctgttcatcccgagaccgccaacatcactgttaactaccagggctgatttcacgtcggaatcactgatctgaaataaaaaccgggccgctctcttaaagagtggcccggtttttatgctgtgagagataagaaaaggcaccggctgtttgccggtgcctttattatttcaggaaaatggaaaatgtcagatcaatgcggcggtgatcagagccatcttgtagacttcctcagcattgcagccgcgggacaggtcgttgatgggggcattcaggccctgcaggatggggccgtaagcctcgtatccgccaagacgctgggcaatcttgtaaccgatgttgccggcgttgatgttggggaagatgaaggtgttggcgtagccggcaaccttgctgccgggagccttgagctgaccgacttcaggagcaacggcagcgtcaaactgcagctcaccgtcgaccttgaggtcgggggcctgagccttgacacgggcagttgcgttgcgcatcttgtcaacggtctcgcccttgccggaaccgaaggtagaatagctcagcagagcaacgcggggatcaatgccgaagatctctgcggtatgagcggtctcgatggtagactcgacgatctcgtcctcggaaggatcgatgttgatggcgcagtcgcccatggcaatgcactcatcgccgcgcatcagaatgaagcaggagctgaccgacttgatgccgggcttgcacttgatcagctgcagcgcaggacgaacggtatctgcggtggagtaggtggcgccgcccagcaggcagtcggccttgcccatcttgacaagcatggtgccgaagtaattgctgtggctcagggcatcgcggcactgttcttcggtcatcttgcctttacgcagggcaaccatctgtgcgaccatttcgtccatctcggggtaattgagaggatcaatcacagtggctttgctgacatcgaaaccagcctcggcagaagctttctccacatcagcgggagcagccagcagaacaacattcagtgtatcgttggcgagcagccggcttgccgcgctgagaatacgcgggtccgtaccttcggtaaaaacgatcgtacgaggattttgcttcaaacgggtttcaaatgtttcaaaaatgtccatatatgtacctccgatcagattgcggcgcaacccataacgcgacgcccattcattacattctcattatagcatcgccaatttccctttgcaaagagaatgttcgaaaacaggcactttttgcatataaaaaacagtccgaaggcacgatttgcaaggatttctgcccggttcaggcaaagaaatcaaagtccgtacatcagggccgggatacagaagggaagctgtttctcccaactggcctcacagtgctctccgccggggacgatccgggtgttgagcagaatccgtctgcgcaaaagcaagtcggaaattttagagaattccgccctcatggcctcgtggtgggaaaactcccgggcgccgtaatccatgtatacgacacttccggcagtgatatcggaacttgtgatggtatcggccagaccggcaggggagacccacagcgacggcgagagcgccgctgcacgggaaaacgtgcggttataggcagtgaccgcatacaggctcatcagaccgcccatggagctgcctgcaatcattgtgtgtttgcggtcggggagcgtgcgatagcgccggtcgatctccggtttgaactgattgacaaaccattccattgttatgtctcccgcagccttgacgctcccaaaacgcgggttgcggaaatcatagggcgagtattccgacagccgctcgttattggcgccatggttgcattcgacagccgcaacgatcagcggggtatcggtataatccaggtattcctgcatgccccagcacttgccgtaggttgcatcgctgtcaaagaaaacattatgcccgtcaaacatatacagaaccggaaaccgcctctgcggttcacggtcgtagcaggtgggaagatatacatacgcagtgcggggctgatctccggtcagttcaggaatcgtcacattccaacggatcaccatatcgtcggaaccctccaatcaaattgtacttgcatatccgagtctatcacagctttcgcgggaatgcaatttgaattgggaggttttgccccatcaagggccaaatgaggtacacagttcacgcagcgactccagttcctgctgcgccagttcgggccatgcagcattctcaaacagagagtcaaagcgatacaaggcaaagccgtttatctgattccgctgcagacattcagcctgatctgtcagggcgtgtccggaattccactcggcatccgaggcatcggatccgtctccgtcaccgatgcgataagcaccaagcccgacatacaaggccactgtatccaggcgcggtaaatccagccactgacggacgcaattttcaaaggccaaagagttgcttccgccgtaataggtaagcccccaatagacttgcggcatcaggtagtccacaaagccgggctcgttcagccagcgggcaacatcgctgtattgagagtcgtaattgttttgcaggtttccttgcggggagatcccaaaccggacgccgtattcatgggcagcgtcgtagcatccggacacaagggcactgacattttcacgccgccagtcatcccgctccaacgtaccgccggcgtttcgataggcaccatattgttcagcgtcgaaattggtatctgttgtagggtaaaaataatcatcaaaatggatgccgtctacatcgtagttgcggcacagttcccgaataccgtcggcaatataggcctgtacgtcctcattggccgggtccagccacagcccgttgttggccgatttgacccagtccggatggagctctgccacactgttgtcggcaagctcggatggaacagccgaactctgaatacggtaaggattgatccacgtttcaacttccaggccccggctgtgagcttgttctatcaaaatggtaagcggatcaaatcccggatcctgtccctgcgtaccggtacagaggtggctgaacgggaacagctcgctgggatacagtgcgtcgccaaaaggcctgacctgcacaatggccacattcaaaccgagatcggcacattcctgcatccagcccgagacttgtgaggtgaaagcatcttccgaagaaaaatcggcatgctgccactccagataggagatccatacggcacggtagggaagagcggagcccggttcagctgacacggcaggggaggcagtatcttcgcttgaggagggaagaggcgtttggaaagcatctccttcgccggaaaaggatgtccgcggcagcagggccagtggcaacagaatccacagtcccagaagcaaaagaatcaggaaaagctttattatgcgcgacaaaaagaacacctcctccgcatcgcagtatatgcaatacgggggaggtgttatggctcaaagatatgctgaatcctgcagcgaggcccggcaaagccgccggataagcggaataaatcaaaacattgaagattatgcttccgacttggcgcaatccgcacacaggccaaagacagtgagggcataattttcgattttgacatcggggcaggccattacaagacgttccagctggtcggcgggaatgggcagactgatgacagagcggcatttgcggcagaacatatgctggtgactgcccagctcgccgtcaaagcggtctgcctcgccgggaatggagacgcggcgaatcttaccgatctctaccagagtattcaggtcacgataaaccgtgcccagactgaggcgcgggcacactgcccgcagagaagtgcagatctgttctgccgtggggtggtcggaacgggacaagacttctttcaaaatcaattcgcgctgatgtgaataccgcatagggattctccttttgtcaatgatttctgatacctttttatattccactttccctgccgatgcctggaaatttgggcagaattatgattttagaataataaataaaataaatctaattgcattgtaataaccggatacgtatttgtcaacattgtgtgatgtgataatattgtgaaaacgaattttaattcctgattacttgacgaaataacgtgaatctgattggaagtgaagcttttgtaaaatgtatgaagtgtacaattgtatgtattttagttgaatttcaggactgggtcttagacagtaacttttagaaaaatacgcctttgcaatatccaaaattttacaactctaaagcagagaaatgtttgcctctgattttctttcaatcgaggtaaagcgcatagatatcggggttttgcgtaaatcggcatgacaatgatttcacagcttttgttccgccaaaaagaaaagacccgaagcagaatttctctcgaaaaagaacctgcttcgggtaaatgtatgctttgtatggagataaaaaatacaatgtatagattttttacaacttggatttgattctggaccaatatgctgccgcggcctgctcagttttattgtctccaaaagtgtagtagtgggcgtttttcaatacgtcgggcagatactgctgctccacccagtgattcgggaaatcgtgagcatatttatagttctgtccttttaccagggcatcttcgccgtcgtagtgcttgttctgcagctggcgggggatgggcccactgcggccagcctttacatcagcaatggcctggttgatcccgttgtatgccgagttggatttggggctggtcgctaccagcacgaccgcatcggccaggggaatgcgggcttccggcaagcccagcatattggcggcgtccaccgccgctttgacaatgggaataatttgcggataggcaagtcccacatcctcacaggcgcagaccatcaggcgacggcaggcggataccaggtccccggcctccaacagccgggcaagataatgtagcgcggcatccgggtcagaaccgcgcatggatttctggtaggcagaaacaatatcatagtggtcgtcgcccatcttgtcataacgcatggcggtatgcttggcaacctgctggaccatgtccagcgtgacggtacgtacaccgtcctctccggaaggggcggccgtcacggcaaactccagatttcccaaagccttgcgcatgtccccaccagcgctttgtgccaggtagctcaaagcgtcaggttcgatctccagcgcctgcccttgctgctcggcaatgcgctgggcggcgtttttcagtccctgctcaatatcgctgtgtgtcagctgcttgaattcaaacacggtgcagcgggacagcagtgcattgtaaatatagaaataggggttttccgtggtagaggcgattagcgttacggtaccctgctcaatgcactccagcaggctttgctgctggcgcttgttgaagtactggatctcgtccagatacaggagaatcccgccggctccggccagtgttccgatatctgccaatacagccttgatgtcgctggtggaggcggtcgtcccgttcagtttatgcagatgcattccgctgttttgtgcgatgatccctgccactgtggttttcccaactccggacggcccatagaaaatcatattcggaatacgcccgctgtctatggtgcggcggaaaaccttgtctttgcccaaaagatgctgctgcccgcagacttcgtccagcgtacggggcctgaggcgctgtgctaacggttcgattatggccacctcccggtagttgtgacggtggccgcaatttgggccgacctttacttgcattatagcgcagcggcatggtagaatcaaccaagaaggaatcggataaaatagggcggattctaggaaaagcatcttccagtaacccgcaaattaccaaatatttgcaaagcaccatgcagtcggcaaaacagattgcatggcagcaggacttttataagcctgccccgccaaaatccatagagatcaccagaatggactgaacagagaatagagaggaacgtgaaagcagaaatgacaaaaaaagaactggcacagatctgcattgaacgcctgaaagaacagtatccccttgcagagtgcacgttggattacgaccacgcctggcagctccttgtagaagtgcgcctggctgcgcagtgcaccgatgcgcgggtcaatgtagtagtgcaggatttgtttgccaagtatccttccgtagcagctcttgcagcagccacgccggaggaaatcgaagaaattgtccgtccctgcggtctggggcggagcaaggcacgggatatctcggcctgtatgcgtatgctgcgggacgagtatgactgcggaattccccagacctttgaggaacttttgaaactgccgggtgtgggtagaaaaagcgcgaaccttattatgggggacgtattcggcaagccggccatcgttacggatacccattgcatccgcctgagcaaccggatcggcctggtggatggcatcaaagaccctcgccgcgtggaaatggcgctgtggaagatcattccgcccgaagaaggaagcgatttctgccaccggctggtatatcacggccgggaagtctgtaccgcaagaacaacgccctattgcgaaaaatgctgcctggcagacgtgtgccgttacgcagtggaaaacggtatggcacagtcaagtgaaaataccttgccggaaaaggtagaaaaataaaattagtgtgatataataagtcggacccacggcgaaaggaactgcacgcaatgaaacatcaaaccgaatcaaacggcagcaccagactgggcggagagctgatctcggcccgggtggtggagcgccttgcgcaggaaatgcgcagcggactttatgcgggacatgaccgcctgcccgccgaaacagaactggctaccgcactgggagtcagccgtactgttgtgcgcgatgccctgagtgaactcgagcgcgaaggttttattgagcgtgtgcgcgggatcgggacggtcgtcaaccgggatgtggtgatgctgcagagccggatggatcataagctggaattttacagcatgatctatgccaaaggcaagcagcctcgctctgataatctggaagtgacccgggaggaagcggacgagcgtctggccaaaagcctcggcattgctccgggggatatcgtggtgcgcatctgccgcagagtgttggcaaacgacacgccggtactgtattccaacgatatcatcccgctggccctgtttggaggccgcaagctggataaggcggatttttcccgcccggtgtttgagcttttgtatgagatcacaggtcagcaggcgaccagtacggtcgcccatattcacgcagtggaaggcggcgctgcagtccggcgcctgctccgcctgcgggaaggtcaggcacttttgatgcttgacgagacctgttactcccggttgtgccagcccattctgcggtgttatacctattacacaagtttcttcgattttgcgatggtccgcaagatgatgtaaaacataaagaagggaagcagccaaatgagacatttgatcgatccgctggatttcaccatggaggaatcgcttcgcctgatggatctggccgacaggatacgccagaaccccaccgcctaccaggatgtagcccaacgcaaaaagcttgctacgttgttttacgagccttcgaccagaacccgtctttcttttgaagcagcaatgctgaacctgggtggcaaggtgctgggcttcccggatgccggcgtttccagcgcttccaagggagagactgtgaccgataccattcgggtcatcagctgctatgcggacattgcggcaatgcgtcatcccaaagaaggcgccccgctgcgtgcgtcccggtattcccgcatcccggtcatcaatgcgggcgatggcggacacagccatcccacccagacgctgctggatatgctgaccatccgccgccgcaagggacgcctggatcatctgaccatcggtttctgcggcgatttgaagtttggccgcacggtgcattctctgatcaagagcctggcgcgctgcgaaggaatgaagttcgttctgatctctccggaagagctgcgtgttcccgattacatcattcacgagttcctggaacccaagaacaccccctatgtggaagtccgcagcctggaagatgcaatgcctgaactcgacatcctgtatatgacccgtgttcagcgggagcgcttctttaacgaggaagactacgtccgccttaagaacagctatgtgctgaccgaggcgaagatggctcttgcccgggaagatatggcggtcctgcacccgttgccccgcgtgaatgagatcacgctggacgtggatgacgatccgcgcgcagcgtactttgaacaggtccagaacggcgtatatatccgtatggccctgattatgactttgctgggcttaaaggacccgctgactggggaggttgcgttcgaatgctgaaagttgatgaaattcaaaacggtgtagtcatcgatcatatcactgccggaaccggcatggcgctgtacaatttgatggagctggaaaaactgccggatgccagcgtggctcttttgcagaatgtccgcagccagaaaagcggcaaaaaggacatcatcaagattgaaggcgacatcagcaagatcaattttgatgttctcggctatctggacccccagatcagcattacctgcattgaaaacggacatatcgcaagaaagatccgtcccgatcttcccaagcgtcttgtgaatgtcatcaaatgcaaaaatccccgctgcattactgccatcgaggaaggctgcgaccatatttttgaactcactcccagcggtcgttatcgctgcatttattgcgaggaagagttccgggtcaaaccgtaatgacaagaacaaagagagcggccctgttgccgctctctttttgtatgtcccgttcccgaaaggcacaggctttctcaatctgccgggacgttccgcgctatgccgggcaagagaaaaggaaccgctgttatttggttgacattgtggtcccggcgatatattatttatatgggttttatacagtatgtcgtctgtgtttgcatgaatatgcgttttgcgatgaaatgcatcagaaaacgtgcagcgagggagtgtgggacatatctgcccaaaagacgtttggaaaggttgagtgcaaatgagcttttcatttctgaaaaaactgccgacaccggctgagatccgggcacagtacccgctgtccgaacacgccaaagaggtcaagaaggcgaaagaccaggccgtccgcgatatcattaccgggaagtccgataaatttctggtcgtgatcggcccttgctcggcagacaatgaggatgccgtctgcgattacgtcagccgtctggcccgcgttcaggaaaaggtcaaggaccgtattgagatcgttccccgcatttatacctacaaaccccgtaccaacggcgacggctataaaggcatcgcatttcagccgaacccggaggagcgcccggacctggttgccggcctgatcgccatgcgtcgtctgcagatgcgctccattgaggagttcggccttcccccggcagatgagatgctgtatcccgaaaactggggctatgtggaagatctgctttcctatgttgccatcggtgcacgctcggtggaggaccagcatcaccgtcagactgccagcggttttgacgttgctaccggcatgaaaaaccccaccagcggcgacttctccgttatgctcaactccatttatgcggcgcagcacccgcagcactttgcctatgcgggcagcgaagtggagacctccggaaacccggtggcccatgccatcttgcgcggtggcgtcaacaagcgcggcgtcagccagcccaactaccattacgaggatatccagcgcctgctggaaatgtatgccaagatgggcctgcagaatcccgcggtcattgtggacgcaaaccactccaactccgataagcagtatcaggagcaggtccgcattgtcaaggaagtcatgcataaccgcgaactgtctcccgagatccgcaagctggtcaagggcgtcatgatcgaaagctacattgagccgggccgccaggatgtttccgaacatatctacggcaagtccattacagacccctgcctgggctgggatgcatccgagaagcttttgtatcagatcgccgagatgtgctgatgtagttttctcctgacataaaaatcaaaaagctgtacggtgttataatgaccgtacagcttttttgtatttctaacacttcgcgccgggagaggaaactcttgcgggtatgaaaaaactcgcccccggcaacataccggaggcgagtttggagctactggccggacttgaaccggcggcctgctgattacgaatcagctgctctaccaactgagccacagtagcatatccgcgatattataccttatcgcacacagcagtaacggcaaacgcgacaacatatagtataacggatttttaagagaagtcaagggaaaaaacaaaaaacagcaaaaatgacatcaggaattatcctgcggaagttcgggggttgcggtgtcctgtgagacttcgctgctctcatcgttgcggatcacggggataaaacggcgagcgaaacgcccctgaccgcggctgcggacatagaagtaaccgatgatggaaaaaacgaatgcgccgacaaaattaacgaacaggtcctccatggtatccagcagaccgatatccaggtatccgcccagtcccagagcggtctgggttccgtctgcctggacgatgatcacatcggtgatgtccttcatcatcgtgggatgattgccgccggcggggtccagcataatggaaccgatggcgttgacgatggtgtctttttgcatatcaaagtagaaaaaggcatccatcgttccctcaaagaactcccatacaacgcctaccgtcatggaaaagcagaaggccacaatggccagataaagcggcgacagagaaaacttgacgttttcattccggtttaggatgtccagcagggaaaagccgatggcagcacacaggaatccgttcatggtatgcagcatggtatcccagttgggaatgtgcacatagaacgcctggatctcacccaggatctcggccgcatagataaacagaaggacaatgatttccagcgtaccgggcagttcgatgctcaggcggcgctccagaatggcagggaccgtaaacagaacgagcgtcaatacgcagagaaagacgttttcaaaatttcggttaaagatttgcgcgaccatcaccaggatgaccgagatgcgcagcagaagggcaacggctgcaacaagtcccttgcgctgcgggggcggaatcagaatcggtttgtggttattcattttgctgcatcctttgctgtgttttgatcaatccaaagtaaaatcgctgaggtccagctgcggcagttcctgacggcggggtacccgcatcagaggatcataccggaacttccggcaggaataataaggtgagacgacacctcgccgccggcaaaaaatcattttgcggtcagatgcgggggtcccgtaaatacagtatgaacaagcgggcgcgattttagtgccgtacagtttctttttgaacatctctcgcgtcctttccccgggcgttgcctgcaaaattccagaaaacattacttacaattataattttttccgtagagtttgtaaagcacggcacagagaaaacaaagcagtaagaacgcgctgtcccagggcagacgattggtcacgatcaccctctcggacaaagaggagtataccggtgcagtgcccggcaaaacagccatgcaaagccgaagccccatacacaaaaacagcgtgccgcacagcctggacaacgcaaaccaacgcagaggaatcccactccccacaagataccggatctgcgaaaagacagaggcgctgaggatgcccaggcagcagcaaatgccgtaaaccgccgccgcaccctccagccgcgcaaatgcatagcaccccgaggagatttccatcactgtgcacagacaggctgtgacaagatcatttattgggatgactgccttgatcgccgataccgttacacaaaagaacagcacgcatccgcaaacggacaaactgctgtccaatgcggatgaaattgcctgaggaagcgaaaccggtgttatacaggcggcctttaagccggttgcagagctgctctcctcaggacggatctttgcccacagcagggcggcagcaaacagattggaagccaactgcaaaaaataaagcaaaatcccaagccggagattccccagcatgaatccgccgacacttccaatcacaaaacccggacttgaacagcaacccaaaatcagaagtgcctgtgcctcgctgcgccggatgcgttttgtacgtaaggcgtcgccaatcagtttggcacagaccgcgtatcctcccagccaggaaagcatcaggagtacggctgtatcttcagaccgcagaccacaggcgcggacaaaaggccgcagcggacggcccaggatctgatttcccggggtatgaatcatcagactgctgacaacaaaaaacgggaacagagcaggcagaacgctgccaacacataatctcatgccggtttcaaacccctcggctgccgcttttgggacatagagcagcaaaataccgtatattagtgcgaatggcaaggtcaaccgatgcaaaagatttgtggttatcatatcctgacctccgaagtactatattttgaatgtgtgatcccatgcaatcattctcgcgggaaggagggccgtatgatgaaacgttaccgcctgcggtccacgtcacagaaaaaagcggccggagttccgatcaaaagcctcttcgaacagccggaagatgatttttaccgtttgccggagctgcagatccgcggcggatgtatcctgacggacggatgccgccgtgttctggatttttctccggaaaaactgtgtcttgatatggggcatttcgttattacattttatggcgcgcaattacggatagaatctttatccgggcgaaggctcagcgtcgcgggaaaagtctaccggatcgaatttgcgcggaaatgggaggggcagaatggctcggcatgaatttcgtgcactggattggctccgtgtctctgtcaccgggaaacagcctcagcgcttgctttccgcagccgcacaggccggtattcgtatgcgcggaattcgcagtgatgacacgggattctttgcgtcgctgccgggacgggatctgcggcgtttgtccgtacttgcgcaaaatcacgggctggagcttgccgttctgcaaaatcgcggccccggcagcctgctgcaaaggctctggctgcgtccgggtctggcagcgggaacaatcttgttttttgtgcttgtacattttctgtcaggctttgtatggtcgatcaatttcggtacactggatcaggcgcaggcggagaccgtacgagcattcctgaacgagaacgggctccgggaaggaacttatgtgtcccaggaacttctggctcaaatgcagaaagccctggaagggcaaaccgggcttttcggatgggtggggctcaactttgccgggggctgtctttttgtggagtctacaccgatggaagagcagcagatccggcagccgcaggagcaaatcgccttgtattcggcggcggatgccgagatcgtgctgacccaggtggaaagcggcttctcacaggtggagccgggacagttggtggcagaggggcagcttctggctgctgcggaacgcttcgaccgggaaggcaattcggtattccagtcggcagcgggtcatgtgatcggccgaatccgccgcgagtatacggcggagcagccctatgaagagacagcatctgttttgacggaccgtacatcctcagtcaaaaccctgtaccttttgggaactgaaatccccctgggggaagaaacggttctgcccaatgcacaaattatggaaaactgggaaccacttgttttagggcgtattgcattgccggggtgtatccataccaaggaataccgtgcacaggaaaacgtgagtttgacctattccgaacagaccgcacaggctatggcacgccgggaatgtgtacttgccttgctggacgaatacccggatgcagagatcgaacagcagagctttgcttttgaaagcagcgatgggggagttgtctgccgtgcaagctttgttttttgcgctgatattgccgtgccgggtcaggcccagccgctggaaaagccggcgacctgattgcatatttgatattgaacacatgaaacgcaaaaattttgtgaataatacacagtttcttttggcaaaagttgtgctataattctgattaagagtaatatgctaggagtgatatgcctgttggaaaaggggatcgatttggacagcattgagctggccgctgcgatttttggaagctgcgatgaaaacatccgtatgctcgaaaatgcttttcacgtcactgcggtgtgccgcggatcgacgctgaaattcagcggtgatcccgaagatgtggaagccgcgatccatgcggtggacggaatggccaccctgctgcaaaaccatactccgttggaggaacagaccgtccggtactgcatcagcctggcccgcggcggggaagaaaagcgtctccgggagcttacggatgattttgttgcagtcaccgcaaaggggcgccccatccatcccaagacactgggacaaaaagagtatcttgcagcgattcgtacccatgccattaccttcggcgtcggaccggccggtaccggcaagacgtatctggccgtggccatggcggtgaaagctttcaaaagcaaggatgtcagccgcatcattttgacccgtcctgccgtggaagcaggggaaaagctcggctttttgccgggcgatttgcaaacgaaggtcgatccctatctgcgcccgctgtatgacggactgtttgatcttttgggcgcggaaacgttccagaaactggtagagaagcagatgatcgaggtcgcgccgctggcatatatgcgcggccgaaccttggacgatgcctttattattctggatgaggcccaaaacacaagccccgaacagatgaagatgtttttgacccgtatgggtgtgggcagcaaagtggtggtgacaggtgacgtcactcagatcgacctgccggataaagcacgcagcggcctcgtggacgccttgcaggtgctgaaggatgtggacggcatcgctcaggtccgcctaaccgagaaagacgtcgtccgccaccgcctggtccagcagatcgtcaaagcgtatgaaaaggctgcgcagaaacagcctgtgaaagataacggaagataaaattcaatcaaaggaggaactttgccttatgtccaataaagtgctgatcaccaattcgcagaatacggtcaagatcccgtccggtcttcgcatcctgatccgccgcagctgcaatgctgttttggaatttgaaaaatttgagggttccgcagagatcagcgtgacctttgtcgataacgcccgcattgcggaactcaacgctcagtaccgcaacaagaatatgcccaccgacgtacttagcttccccatgggagaaaacggcgtctatgacattgacgaggacaacggctgcaagatcctgggcgatattgtgatctccatggagcgcgccatggaacaggcggagctgtatggtcactctttgcagcgcgaagtcgcttatctgacggtccattccatgctgcatctgctgggctatgaccacgaagccagcggactggaagccgtccgtatgcgggaaaaggaagaagccgttctggtacagctgggcctgccccgtaccgtgtcttataccagcgatgaagtctgatctcaagcgtttcggacgcggcttcatttatgcctggaacgggatctgggcggccatccgggaagagcgcaacttccgcttccacctgtgcactgcggtctacgcctatgcactgtccgcaatcgccgggctggaggccatggaatttgcgctggtttctttatgcgttttttcggtcatacaagccgagttgatgaactccgccgttgaacgtgcggtggacaagccggatacctcccactggtggagcgccggtgctgccaaagatatggcggcgggcggtgtgctcatgtctgctgtgggagcgctgtgcgtgggcggttttctgtttttgagatctgaccgtctgtcccgtatttgggcggctgtaacggttgccccttgggcgactgttgccgttttgatttcctttgtgattgcatatctgtttattttccgcttcggcggttcttcaaagaaaggtttacccgatgccgacaaaaaagattgaacctgtatcgaccagcagcgtatttgttgcgctggtcggccgtcccaacgtgggcaaatccagcctgaccaaccgcctggtgggggaaaaggtggctatcgtgactcaaaagccccagaccacccgtaatcgtatcatgggtatcgtgaccaaaggtccggtacagtatgtcctgatggacacgcccggcattcacaagccccgcaacaaactggatgcacgcatgacgcagacagcgtctgccagcctggcggatgtggacatcacactgatgctgtttgaacctgcgggggagtttaccgagtccgagctgaccatgatcgaagccttgcgcaaagctggacctgccattgccgtggtgaacaaggtcgaccttttgtctgattttgcttctctggaagcgcgcaaaaagcagatcgaggacttcggggtctttgagcgagtcttggcgctttccgcccgggacggcaccggctgcgatgagatcttttccatcctggagccctacggcagccccggacctcactattttgacgacgatgcctataccgacctgccggaaaaggaactggtggcggaactggtgcgtgaaaaagccctgctctttttgcgggatgagattccccacggaatcgcagtgacggtagagtcctttaaggagcgtgccgacaaggatctgatcgacatctcggtggagatctactgcgagcgcaaaagccacaaaggcatgatcatcggtaagggcggacagatgctcaaaaagatcgcgtcggccgcccgtgtggattgcgaagaacttctgggaacgcgggtcaacctgcaatgctgggtgaaaatccgcgaagattggcgtgacaatgagcgccagcttgataatctgggattcgcaaaaccgtgattttcaaaatattccaataatgtaatatatttcctatgacccggttggacaacatttccatcgtcttggccttacaatgagaagcacaagtttcgatggaaagaagggccgggtatgcatttcaggagcgaagcggacgatccgtggaaattgtttgccgaaacaggcagcatctattattatttggattacaaaacgcatcagcgcgccggcgatgtgttgtccggaaaggaaatttatgcagcagactgcaacgacgggacttgtgctgcggcaagtcaaagtgggggaagcggaccagatcctgacgatcctgacgcctgatctgggggtcgtgtccgcttccgcacgtggcagtctgcggctcaaaaacaagctgttcagcgcatgcgggctgttttgttattcggagtttgtcatcacacagggacggtccagcaatttcattgacagcgcccaggttaagcgggtgttccacggcctttcgcaaagtgtggagggaatggcccttgccatgtacctggcggagatcgccacatcgctgtcaccggcaccgccggaggccaatgagcatttgcgccttttgctgaactgcctgtatatgatcagcgaaaacaagcgcccgctgtcccagatcaaagtgatctacgagcttcgggccatgaccctttccggatatatgccgcagctgctggcatgtgcttcctgcgggaaatatgagggcggcgggttttaccttgacccggaagaaggaattcttctgtgcagtgactgctcagaaaaggtccgccgtacgcccaacctggataccggggcgctgtatgcgctgcggcatatttgtcttgcagaagacaaaaaactgtttggctttacactgtctcccgcaagcctgcgtttgcttggcggggtaggggaacggtacctgctggcccatttgggacaggggttgaaaagcctggaattcttaaaatcagtcatatcggagtaactacatggaaactgcttaccgcaccacattggagctggataaagtcattgcgcgggctgtgcagctttgtgcctgccgcgagaccaaagagatgatgcaggaaatcgagccttatctctccccggaagaggagcgctgggcgctctcccagaccaatgccatcaattcactgtatatcaaaaacggaagtccgcgcttcggcgcggtttcagacgtccgccgcattgcggcccacgcagtcaaaggcggcatcctgtccatgggagaactgctggaagttgccgctgccctgcgcaattttgctggcctgacccagtggtacggcatgtccgaccacgacatgctgccggtggacgacctgttttattcgctgcatcccgaaccggtgctggagcgccagatcaccgattccattatttccccggaggagatggcagacaccgccagctccactttgcgggagcttcgacgtaaaatccgcgccaccgaggactctatccgcaccaaactggacaacatcataaagaactctaccaccaataaattcttgcaggatgcggtcgtctcgctgcgaaatggccgttatgtcgtgccggtccgggcagaataccgcggcgagatcggcggcgtgatccatgacgtgtcgtccaccggtgcaacgatttttgttgagcctaccgccgttgtggaagccaatgctaagatcatgcagctgcgtgcccaggagcaggaggaaatcacccgaattctgtcggccttttcctcccaggtcgcccagatggaaccccagttctcccacagctacgaggcgatgctccaaatcgatttgctgcttgccaaagcacgactggctgtggagcagaacgcctttatgccggaggtcaatgatacccaccgcttttccatcaaacgtgcccgccacccgctgatcgacaagaaaaaggtggttcctgtcgatattgagctggggtatgattacgatactctcgtgatcaccggccccaacaccggcggtaaaacggtatccctgaaaacggccggcctgctgaacgccatggcgcagcacggatttttgatccctgcccacgagagcagcaaggtatgctgctttgaagagtatcttgtggacatcggcgacgaacagagcatcgagcagagtctttccactttctccggccacatgaagcgtattaccgggattctggaactggccggtgcgggaactctggttttgctggacgagcttggagccggcaccgaccctgcggagggcgcggcattggctgtcagcattctggaacggctgcgccgtcagggagcgctgctcatggccacgacacactatgccgagctcaaagtctatgctctggagacgcccggcgtggtcaatgccagctgtgagtttgatgtggacagcctgatgcccacctataagctgagcgtcggcgtccccggcaaatccaacgcgtttctcatcagcgcaaaactgggaattccccaggaaatcattgatgcagcccgggcgcatatgtccaatgacgacaaacggctggacagcgtgcttgcccagctggatgatttgaaactccagctcaaggcggcccaggcagatgcagagcaagcccgtttcgaggcacagaatgccctggccagtgccgaacagcaacgcgacgaactgatccgcaaaggcgagagcgaactggctgaagcccgcaggaaagcccacgatttgatgcagaacgtccagaacgaggcgtatgccctcacagatgagctgcgcaagctccaaaaagaggaaaagctcagcgcttctcagcgtgctctgcgcgcgcgtgagattgcacgcaaggacaccgagcgaatcctatcccgcacggaaaaagctcccgctgccgagaagaattatgtgccgctcaaagaggtctctatcggtcaggaagtcgtgattgccgagctcaaccagcttgccacggttacggcccgtcccgaccgcgacgacctggtggaagtccgcgccggcattctgaaaacgaaagtccctctgaatgggctgcgcgcccccgacaaaatgcagaaaacgcccaagcgccagccgccgcgggcacatacccgtctgcagcttgaccatgaccggaaagccagtatggaactgaacctgcttggctatacggtagaagaagctcttgcggagacggacaaattcattgacggtgcagttctgcgtggccagcagaccgtttacattatccacggcaaggggaccggtgccctgcgtgccgcgatccagaaacatctgcgtacacacaggaacgtcaaaagtttccgccttggccgttacggagaaggggagaccggcgtcacggttgtggaactgaaataaacaggaaagaaggcggtatccttgagcctggactatagcagtatgcgcatttttgcgctgaccctcagccaccgcgccatcgatgacattcgccgcgacgggcttcgtcagcttcgcaattatgtggacatgtgtgcgatcttggcaaagcatcccttggctcagcgcttttttgagtatgcccagacgctgtttgaagacccggaacctccgtactacacgctggcccagcgtttgatcggttcggtttcggaagatacactctgcacccttggcgttaacttcgggtttggcagtatgctgtacggctcagagaagctggccgaaaatctcaaggagggccatccgatttcctgggtcactttctcgaccagtgacgatcctcgccttgcggccgaaattgagacaggggaacgcctcggcagccttctgtgggggatatatctcaaaggcccggtcagcactgcgcttttgtcactgattgagcagcatccgcaaagtacatttcagcttgcggttgagccggaatacctgaacaagtccgccgtctgccagctcagcaagctgtccaatgtcgtccttgcggtgtgcctgcccaacatggaacttacttccgcagccaaagacgcctttgagtggcttgcggccaaacggatgttctatgccgcattcctgcgctttggagatgcggaagtcaacatcgtatttcattcgaaatggctggaagatcttgccgtttacactccgttctgtgtctgttcccgtaaacctgggatgtcagagcagtgctcggaggcattgcgcaaagagatatggagcaatcgacttcgtgccgggggacggctattcctcgttgactgggaaagcgatttgagtgttatcggcgatcatatgccgctgcaggttggcagccgtttttctcccacgttgacaccggatatgcccatgtatttttgagcaatcattttagctcctgacacaaaacagaaaaccgcccgcttttccgcttatgcggagaggtcgggcggttttgttttatgaattgttttcttccggaggaaccgagaaaaagatttgggtcatgcgtccggaacacaggcagcgcagacaattataacagtcgccgatatgccctttcataccgctttgtacccagggcagcagaatccccatcagtgcgccggaaaggaaattgccggcgaaacggagttcttcctcgctcagttcttctttttggccttgaattgcctgggcctcgcgcagacgctggatcaatatggcacacaaaaactgctggatgtactcgcgcaaattgttttggcctgtatagctcagtgcattggtataaaagacctggttttcccggaaatattgctccagctgctcggcgatggtctgccagttgccgggagtggggttttcggtcagaaattgcatgatgcctttttgaaaacaccagttgaccaaatcatatttatcggaaaagtgataatagaatgtattacgccccacgcccgcgtgatccacgatatcattgaccgagatcttttccaggggatgggttcgcatcagatcctgcaggctctgtgccagtaacgttttggtgttgtttgatccgctcatggaacggtattcctccgcacactgtgactttgtgcgggcagggattctgcccgggggggcgtctctttctttttgagaggcaaaacgcacatacaagacatatgaggatattatagcataatcttacacatttttgcacccgaaacaactgcaaacgccagattccagagcaaaatgcgaaagaactttcatcagctgcaggcatttcacaaaaaatccacgattgtttttgaacaaaagtcgatttttgcacatggtaatcttttggcgtcgaaactataattgtggtcatagattcggcgcctttcggtgccggtccttaacggaatagtgaggtaataagtatgtcagtcaatccgattgtgcattccgctcagcgtgctgctttcagcgcggctgtcgacgccaccatccatgctgtgcgtggcaaaggcaccgaaaaaatgtctgaaaacgcgcgccgactgatcgaccttgcccagccgcttcttcagaatcgctatgatgcgtcggtgtttgacgctgcccgcgagtttgtttctgattcggacggcaagtggatgcggtatgcatatcgtgccatcaatgaaatcgatccacatattttgaagatgaatgccctcaatctcgtctatgagggaatgcttctgggttacaaccaggtctgtgagctgcgcgagaaatatcagtgcaatatgccctggatcctgctgtttgaccctacctcggcctgcaatctccactgcaagggctgctgggctgcggaatacggcaatcgtctgaacctcagttatgaggatatggaccgcattgtcaccgagggtgaagagctgggcatccactggtacatgatgaccggcggcgaacccatgtgcagaaaagcggacatcctcaaactggccgccaagcatcaggagtcggtgttccatctgtttaccaacggtacgctgatcgatcaggaattctgtgacgaagtgaaaaaggtcggcaacatggccttcttcctgagcatcgagggcagtgaggaatccaacgacgaccgccgcggtgaaggcatctaccgcaaggtcctgaacgccatggacctgatgaagaaaaacggtctgctgttcggcacttccatctgctatacctctgccaactacaaggccgtcaccagcgacgagttcatcgatatgctgatcgagcatggcgtccgcttcaactggtacttccactatatgcccatcggcgatggcgccaacgtggatctgatgctcaataaggatcagcgtgaatatatggtgcatcgcatccgtgagatccgcggtctgacgggcggtaaggaaatcttctgcatcgatttccagaacgacggcgagtatatcgacggctgcattgccggcggccgccagtacgcccatatcaaccccaacggcgatgtggagccctgtgtctttatccattactccaatgccaatatccatgaaaagagcctgctggaatgcctgcagcagccgttgttccgggaatatcacaagggtcagccgttcaacaagaatcacctgcgcccctgtcccatgctggaaaatccggagctgctgggcgagatggtaaagcgcagtggcgcccacagcaccgatctgcagcgcccggaatccaccgatgatgttttccgccgctgcaaaccgtatgcggatcagtggacgcccacggcagaccgtctctgggcggaggagcaccccgcggcctgctccggttgtgcatcgaaagagtaaccacgcaatagtgtaagtttcccatacatcaaacaaataaaacaggagcctgcccggcacaacgggaaggctcctgttttattgcttacagttcaaatgctgcattgagcgctgccagcgcggcatcctcatcctgctgacggatcagcagggagatgtccaggtcgctggtggtgatcaatgcaatgtcaatgttttccctggccaaggctgtcaacgcacgggaggctacgccacagctggtgaccatctcctcgccatagaggttgaccttggaatagccgcccgaaatcagcgggggatggactttggcggcttcgggaagcgccttcatcacatcagcaaaatttttgtaactggtggtgaagctgaaatccacggaatcacctttcggagcactctggcagatcatgtccactacaatgcctgcacgcgcaaaaacatccagatgttccgcaaggctctgcgtgctgtaataagcagcggggaaggtggtgagcatgatattttgctcgctggtgattttgctgactccatacatgatagattcctcctttttcatggaacgcgtcaggccaaaaattcttcgccgacggattcgttcaaaacggattggatgtagtcgcgggaaagactgaaatttccgtgtgcggcacccagctcattagtataatcatcaaacagatatacacggatattggagtaggcgttttcatattgggtgacggtaggatgcagtttaggggccagcagctccactgtcacggtcccgtcgggctgcgtcgtcttttggaaagtgatatccaaaagaacaccgatcatgttgtcggcctccgactgtgcactgataaagttgcccagagaatacgccacaaaggcctgccgtccatcctgagcagtcagccattcggcggtctgggtcacatgggggtgagtgccgatgatcaggtcggctccctggtcagccagccattgagccatctgccgttgggcatccgtcacggtgtggctgccttccacaccccagtggcagctcaccacaagaacgtcgcagttggggcgcattgcagcgatctgctgctcaatgatgtctgtctggctcagatacacaacgccgtattgggaaccgctgggagtattgagtccgttggtatgctcggtataggacagatacccaatcgtaatgccgttgaccgtctggtaagaaagattgtcatagctttccaggtcataaaatcctgcggtcaccacatcatccggcatggcgtcccagtgcgtcatagaggattcgatgccgcctgcacctttgtcatagctgtggttgttggaaaggctgtacacccggaacccaatgtcatacaaggcattggtaatgtcaccgggggtagaaaagcagggatagcccgacggcgcatagtcatcattgaccagcgtttcctggttgagccagttcacatcaaactgggcgtaaaagtcccgcatgttctcgtatgcgtaggtgaagtcatagccttctccgcctgcccgggcttttgcctgattataaaggccctcatggatcaggttgtcgcccgttgcagagaagcgcacagtctcaacaaccggagtaggctccggggttggggttggctgcggcgttgcggtgggagctgccgtggctgccggtcccgagaccggaacaggggaacgatccatagagaattccccgctgcctacgagcagcgccagcatgacaccggctgcaatgcaggcacaggccgcgatctcgttttttctcagatgcattgcattttgcctctcagcatgtcggtcatggtgtaataaccgggctgtgcgccgtcaacaaacagcgccgcctgaatggcgccatcggcaaaaacgccgcggctctgggccgtgtgggacagcgtgacgacctcctccgggccgcagaacagcacatcatgctcaccgacgataccgccgccgcgtaccgcgctgatgccaagttcctgcttgccgcgcttgcggcggacatcatggcggtcgtacacatactcgtaagcgttgtcggcctcctcgttgatggcatccgcaatcataagcgcagtgccgctgggggcatccagtttgttatggtggtgcttctcgatgatctcaatgtcaaactcaccgtcaaacaggcgggtggcgcggcgggcaagctcgatcaggacattgacacccaccgacatgttggcgcttcggaaaaccgggaccttggccgaggcttcttccagaatggcctcatcctccttggtcagaccggtggaacagatcacgcagggcattccatgctccgcgcagtacttcgccgcattgacagctccctgaggggaggaaaagtcgatcacgacaccgcggacattcaggtcctggaacgacgccgcaacgggaatgccgttgatttcaccggcagcctgatcaacgcccgcaacaatgcggcagtcatcgcgctggctggctttttcgatcaatgcacggcccatgcggccgcagatgccctgaataataagatccgtcatatgacataagtcctttcaaaatttacttcatacctgcaaaataacaaacaggcccgcggcggccgcattgcggttacacctgcgggcctgttccttactcaaagcaagccgttgcgtttcatttcggtttccagcatttcctgaacagcaggggatgcctcaaccagcggcaggcgaacaccgccggccttccagcccagacggttcatcgcccatttgacggggatgggattggactccttgaacagtgcacgaaccagccccatgacctgcatctgcagtgaaaggctctcctcgtgcttgccgtcgaaccacagcgcgcagatgtcgtgagccatctcgggcgcaacgttggacaggacgctgatgacgcccttgccgcccagcgccagaatgggaacgatctgattgtcgttgccggagtagatgttcagattgtcgccgcacagttcggcgatctcggcaatctgcacgatatcgctgctggcttccttgaccgcgttgatgttcggaattttggaaagctcagcaagcgttgccggcgtcagattcatgctggtgcgggaaggcacgttgtacaggatgcagggcagcgagaccgagtttgcaatcgcggtatagtgcgcgatcaggccggcctgggtcgtcttgttgtagtagggagtgaccagaagcagcgcatctgcaccggcctcctccgcctgacgggagagtttgatggcaaaggccgtgtcgttggagccggttccggcaacaacggggatgcggcccgcgaccttgcgcacggtatagcggatgcactcgatgtgctcctcatgggtcagagtggcggattcgccggtggtgccgcagataatgatagcgtccgtatgacgggcgatctgatcgtccagaatatggcccagttcctcataattgacgctgccgtccggcagcatgggggtaatgatcgccacaccggcaccggtgaatacaggctttttcatagctggaatacctccttagcgatgctgttccagataccgccggaggcagggaattgccccggcataaaaatcaatcgaagtagcccttcttggccagaagttctgccagcaggacgccgccgccggctgcgccgcgcagggtgttgtgggacaggcagacgaacttgtagtcatactgggtatcctcgcgcagacggccgatgctcacggccatgccgttctccagcatgcggtccagtttgggctgcggacggtcgtcctgctcgaagtaatgcaggaactgcttgggagcgctgggcagctccaggtcctgtgcagggccgtggaactctgcccaatccttgaggatctcctccttggacggggtgtgatcaaagctcacaaagacggcgcccatatgaccgtcggagacgggcacacgcaggcactgagcagtaaaggacggagtggtcgcgttgacgatctcatcgccctcgatgtggccccacagcttgaggggttcgcgctcgctcttttcctcctcgccgccgatataggggatgacattgtccagaatgtcggggaaggtctcaaaggtcttgcctgcgccggagatcgcctgataggtgcagaccaggcacttggtgatgccgtacttgcgcagaggatgcagcgcagggacatagctctgcaggctgcagttggacttaacggcaatgaagccgcgtttggtgcccagacggcggcgctgcgcggggatgatctcaatgtggtcggcattgatctcgggcacgaccatcgggacatcgggggtgaagcggtgagcgctgttgttggacacaaccgggcattccgccttggcgtaggcttcttccagggccttgatctcatccttcttcatgttgactgcgcagaaaacgaaatcaacctgagaggccacttcctccacgtgggaagcatccagaacgaccatatccttgaccttttcaggcatcggggtctgcatgagccagcggccgcccacagcctcggcgtaaggtttgcctgccgaacgggcagaggctgccagagccgtgatctcaaaccagggatgctctgccaggagggtcacaaagcgctgaccaaccatgccggtcgcgccgaccacgccaactttgtactttttctccatttgaaaaaccgtcctttcctgcgccggccatgccggctccccatgtagtatccatgtatgcggcaaacactctctttgtgacaaaaggggagagacgtttcccacattgcggtgcggtttgattgagggcggcgcaaaaaagctccgaacaacaaaaaaaccggcttgaaaaccggcacacaatgcaatataatacaatattgcatatcacacagcgcaacataccgtacagacggtatgacagtcccgagccttttcggccgcgggcccaggaacgatgcgtgccgtgcatcgccttcggcggttgtccctttctccgtgggcaaccgccctggcagactttacagaccctacggatactaatgaaaaccgcgcctctgtgcttgggtacatcatagcattgcgccgggcgcttgtcaatgttaaagaaggacaaagaatatgctaaaaaaagatttttggtacgatcttcccaaagaactcatcgctcaggaacctgccgacccgcgggactctgcccgactgatggtattgaaccgcaaggacgactccatcggccatgccgtattccgggatctgccggattatctggaaccgggcgatctgctggtggtcaacaattccaaggtcctgcctgcccgcctgatgggcgtcaaagtccccaccggtgccgtctgtgaggtccttttgctccgtcaggtccacggggacacctgggagtgccttgcccgtcccggcaagcgaatgcaggccggaacgaagctgaccttcggtgacggcagcctgaccgcagtggtggatgaaacgctggcagacggcaacaagcatatcacattcacttacgacaccgagactctctatgaaaagctggatgagttcggcaaaatgcctctgcctccctatatcaccaaacagcttgaggatcagagtcagtatcagacggtctatgccaaggagctgggcagcgcagcagcccccacggccggactgcattttacgccggaactgatggaccgtatccgcgccatgggcgtaggcattgcggagatcaccctccacgtcggcttgggaacgttccgccctgtcagtgaggatgaaattgaggatcacgagatgcacagcgaatggtactgcatcgacaacgaggctgcagaagcaatccgcaagaccaaagctgccgggcaccgtgtcatcgctgtgggaacgaccagctgccgcacgctggaagcggtgtgggcgcgttatggtgagatccgcgcctgcagcggcaataccgacatctttttgtatcccggtgtcgagctccatgccattgacggcctgatcaccaacttccatctgccggaaagtacccttatcatgctgatctccgccttttacggatatgaaaagaccatgcacgtataccaggttgcggtacaggaacgttaccgctttttcagcttcggcgatgccatgctgatccagtgacccgccgcttgattttgccacagcaaacaggtataataaacccacggcgtcgcccgacggcgccgtgtgctgtgtctccgtagctcagttggatagagcaaccgcctcctaagcggtaggccggaggttcgactcctctcggggacgccatacgggattggtcgatcccttttgaaagctcaggcttggcctgggcttttctttgtataactgtttcctgggcggaatcacaccgataacggcggaacatcaatcggtcatgagctggcagctttttactgcggttgccacttcgccggaaatcgcaatattcctatatattaatgaaaggagaagaatcgtgaagtatcccgttttgccaactctgttaccgggagatgcggttggtatcgttgcctgttccaatgcgccgaacccgcagcaagtcatagaggccaaacagcttttgtccgtgctggaaggtatgtctctgcggcctgtgtgtagcgacagtcttttgtcggcaccggacgcgccggagcgcagcccccgccgccgtgcagaacagcttctgcaactgtatgccaatccggaagtcaaggcgattttcgatctttccggcggcgatcttgccaacgagatcctgccctttctggattatgagctgattcgacgcaatccgaaaccgttctggggatacagcgaccttaccactgtcctcaatgcgctgctgcaaaaatccggctgtagttctatgctgtatcagcttcggaatctggtcaaagaaaacggcaaggcccaacgcctgctgttttgttccgctgccttcgatggcaagaacgatttgtgggatgtcaattggaagtttttacaaggcaggcggatgcaggggaaattgattggaggaaacctgcgctgcctgctgaagctggccggcacaccatatttccctgattgccatgggaatctcctgtttttggagagcctaggcggcggccccgaactggttacgacccacctctgccaattaaagcagatgggcgtgttttctcagatcagcgggcttttgcttggcacctttacgacgttggaacagcagatcggaacggatgctgcgtctgctatgattggttccgttgtaggatgccgggagcttcccattgccaaaactcaggagatcggtcatgctcctgacagcaaagcgcttctcattggttctgaatatggaatcgaggaagtctgaccggccgacggttgacttgaagcaatggtatgctaaactagatacagagattttttcgcaaagaaacagccctgactacagtgttccggtcaccctatacacaccggcacgccaaccagtgctttacgagagaaaaagagggaagtcattttgcaacggatcgtcaaaacgcgcggcgtcaaaggtgcggcctctctgtgcgcctttgccgcagtgctttatttgttgtgcaaacagcttttacaggccgcagcatcttttgtgatgaaccttttggtggaaggttcctctctggatgaaccgacgggattttcggcggtaagtgtcgatgtgatcctgcttgtgaccggaatcgtgtcgatcattctgccgattttctggttgctgcgtaccacacgcttggaaacggaggacctgcgcctgacccgtccgcctcagtggtcgccgctgttctgcatcgtattgttcttgggcgtggcaaacctgggcaacctgtttggcggattgctcggcaggctgtttcactggcaaggcggaacgaccgttttgccggcttccggcgcggagctggttttgtccgttctgacactttgtgtactgcctgcggtgggggaggaactccttttccgcggcgccttacagggactgatgcgcccctgcggaagcgccgcggccgtgtttggtcccgcactgctttttgcccttctgcatatgaatctgtcgcagggaatcaccgcttttttgtgcgggattttcctgggctggctgactgagcgtaccggcagcgttttgcccggtatgatgctgcacttgatcaataactgcattgcctttgcggatatttatctgcaaatgtatgcaccaaacaacattgccatggggatcgaactttttgtgctgctgttcttcccgcttgccgccgcatggctcctctggcgagcggtcacccggcagggcttttcctttggtgccgggatgcatccgggcgtagatgcgctgtctgtttttacaagccccgcctacacgttggcaattttgttcctggcagttgcaagcgtctatttctcaatcactaccggataagaggtatctatgacagatctggaattgatgcaggcagctctggacgaagcgaggatcgcggccgatttgggagaagtcccggtcggtgccgtgatcgccaaggatgggaaaatcgtagcccgggcccacaatctgcgggaaaacgggaaaaatgccacttaccatgctgagctgcttgccattgatgccgcatgccatgcgttgggcggctggcggctttggcagtgcgagctgtttgtcaccctggaaccctgcccaatgtgcagcggtgcgatcatcaacagccggctgcgccgcgtggtatacggtgcctccgatcccaaggcggggtgctgcggttccctgaccgatttgtttgcgctcccgttcaaccatcatccggcgattgagcacggcttgctggaggacgaggcccaggcccttttgcaggagttttttgtccgcctgcgggagaaacgaaaggccggtaaactttcgtcacacaaaaaggaggaatgacaaatgccccagaaaattctgatcaccggcggcagccggggaatcggcgcggccgccgtgcaggcgtttgccaaaaacggagacgacgttgcctttgtgtggcactccaacagtgaagcagcggagaaggtccttcgcagtgcagcggcctgtgcaccccatggacgatttctggctctgcgggcagacgtgtccgattccgctcagatcaccgaggccgtgcgggaagcggaggaaacgctgggcggcattgacgttcttgtctgcaacgccggaattgcacagcagaaattgtttaccgacctgacagacgaagattggcgccgggtcatgggcgtggatctggatggtgcgttttatacctgccgtgccgttctgccgggcatgatccatcgaaaatacgggcgaatccttttggtgtccagcatgtggggccagaccggtgccagctgtgaggtccattattccgctgcaaaagcgggagtgatcggcctttgcaagggccttgccaaggaggaggctccttccggcatcacggtcaactgcatcgcaccgggtgtcatcgatactgatatgatgtccggcttttccaaggaagaccgggatgctctcgcggaggaaaccccggtcgggcgtctgggcagcgcagaggagatcgccagaacactggtgtttcttgcctcaccggatgccggatacattaccggacaggtcattggtcaaaacggcggcctggttatttgagcgtccgtcatcgctctgcttccaaacgataagatacgacaaaaatagaattggcaatctcccgtcccgctgcatacaatgcagacagggaagggggatttttctatggctgttttccaatccgggatcgacgtatcccgttaccagggcagtgtgaactggtcccgtgtggccgctgccggcaaacagtttgcaatcgtaagactgggatcgtccaacagcaatggcttgtatgtggacccctactttttacagaacgtcaacggtgcgcatgccgcaggcctgagggtcggtgcctattactatacctatgccaaaacgcaggccgaagtcaccaacgaactcacgctttttctgggggcgctggaaggcctgcagctggaatatccggtctttgtggacgtggaggccaacagcctgacttctttgagccgagcccagctgaccggacttgtcaaatacgcgatggatatcctttatcagcggaaatggtatgccggatggtattcctataccaacttcatcaattcctatctgaacccgaaagatcttgaagggtatccgctttgggttgcagattaccgttccagcctgggatataccgggtcctacaccatgtggcagtacagcggttccggaacctgcgacggcatttccggtgcggtagacctcaattacagctacacggattttctgcccaccatccgctccggcggcttcaataactacggcgcttccggccccaacatggtggacgtcaaaggatacaccctcaatgtatttggcagtcggacggagtatttctataccgcgaacgtcaatgacatcgtcggatacctgcccctgggcaattacgaggtcgtcaagatcagctccaacaaatatgcggggtatgactgggtcattttccgctacaatggaggggagtactggacggcactgatcgatgaccgcaaccgcctgcagcccagcagtgcgggggatggaaccggtcaggatgactgtgccgaactgctggccaaggccaacgaagagttggaccgcctgcgcagcgacctgaacggcagcacctaaacacgactaattttgtcgaagtgattgacaatctctaccggttgcgttagaataatattcaccgatgcgggtttagctcatccggtagagtgactgcttcccaagcagtaggtggcgagttcgagactcgtaacccgctccaatacgcgcatagaaccgtttctgcctggttctatgcgcttttttgttgctccccggtcgctttacgggcacggggatactgttgcaaaagcaacacgaaaaagtataatgatttgtatatagagaaaaagaaagccccgccgggcagcagggctttccattatatattgaccgtaaagggggacgttttatgctttccggttttcctttgtatcactattttcactgcggcaatccgttttccggctccgaaggcgggatgcgctatctgatcgcacctgccaagcgggctgatcctgcggatgaaagcggcaagaaaaaaatcgaatatctgattgcaacggtatggcccgaaccctggagtctggaacataccgcagacgagaaaaagaccacccaggaatttgaaggcacccaggaaggcctggacagcgccgcggcctggctttcggaaatgtatcaaacacagccggaacgctggaaggaccgtccctctattctggactgtgaaccggaccaataaaggccatcgacacaaaaagaaaatgcccaacggctgtgcggaccgtcaggcatcttagagggaagagatcgaatatcttggcgtttccgccttgactttcttgtattatcatagtacagtatcatcgataagtaaaattcattattttcacacgtagaatgaaactgattcaccacggaatgcgtgcattgaaagggatactgctatgacattgctggcctgtcagatcttttttaccgtcgcccatgaaggcagttttgcgcgtaccgccgagcagcttcatctgacgccctcggcaatcagccatgcagttgccacaatggaagccgaatgtggttttccgcttttcacccgcaccaaagcaggtgtcaccatgacggctgccgcggaaaatctgctcccggatatccagcgcctgcttgccagcagcgaaaccctggaccagtccattgccaggatcaatggcatggacaaaggcgttttgcgtcttgccgtgttcaacagcgcctgcgtgacgtggattcctaatcttctcccgctgtacgaggaacaataccccggcattgcagtgcagctctaccagggcagttacgcagatattgctgcctggctcaaaagcggtacggcagaaatcggattgatgtccaattccagtgcgccggacctggatttcgagccgctgtacaccgatcctttggtctgcatcgctccggccggttttgtgacccaacggcccggcatagtcggtgcggaagaactccgcggccaaacctttgtcagccagcgcccggacaccgacgccgatatccagagttacctcaaaaagcacgacctgcgcgtcaaaacacgctgctacgtcaacgacgacgaatccacgatcgccatggtggcctgcgggcagggcgtcgctatcatgcccaagctcattctggaccgatacaaccaccgggcaggggagtttgaaattttgaatcttgaaccgtccgcaagccgcaccatcggtcttgcttgcctggataaaaacggcctttcgcccgccgcacggcagttctgccaaagagcccgcgattacgcgcgggacctgtaaaaccgaaggcttttcaaatattgccgaaaggtgtataataatttaatgagtcaatttgatgagttgcgccttgggctgcaagttttttgaaaggggagttgtgctttggccggagatctgcatacgcatacaacattttccgacggctccactcccgccgcaaagctgccgtttctggcacgctgcgctggtctggaacatctggccatttccgaccacgattccattcaaagcgtacgatacgcctatgcccacccggtacaaaacggggttcatctgattcccgccactgagttgacggcctacgactatgagcgcgcccaccgggtccatctgctttgctactggccggatgactgtgccgccctggaggactttgccgacatgatggcccagcggcgcaaggatgccatgctgcaaagctgccgggagctggaagccctctacccgcagttttctaccgaggaagccctcgagtttgcccgggacagcaaaaccttatataaggcgcatatcatgcgggtactgtggcaatacggcctgtctgacggaatgtacaacgatgtttaccggtctctgttcgggctgcgcccggtacgtggcaaagtcctgcacaccccgcgctatgagccagtggacacggtgcttgacctcatccgggcctgccgcggtgtggtgattctggcgcaccccagcgtctatcatagcatggaactggcaagagaactgattcggcagggaaggctggacggtgtcgagatcgaacacccgcgcaatactgccgaggacaaggcggaactgaaagaactggcccgggaatatgacctgatcgtgaccggcggcaccgactaccacggcatgaacgccaacacgccgcggccggtgggcacctgcaccaccacggtggatcagatccgccgcattgaagcattggcaagaaagcggaaatcccgctgatcccatataacgaagtgaaacaaaaaggagatatgctgttatggtacacattcgcaataatcagggaacctgctcggttcgtactttggttgaactcaacgacgatcacaccatcgcccgtgttgaagtactgggcggctgcaacggcaacctgaaaggtatttcgcagctgttgaccggcatgaaggcagaggatgccatccagcgcatggccggcaccacctgcggccgcaagcccacttcctgcccggatcagatcgccaaggcactggaagaagccctcgccgagatgtgagtctttctgacccttataagccccgtttcataaacgagaggagtctgcaatggattgttttcagtacccgctggacaccgaacagcttttgcgcaaaaagcgccgcatccgccgcgagctgacggcgcagaacccgcatccgctcaaaaagaaaattgcgatcctcggcgggtccaccaccaacgaagtggcggaccagttggggctttttttgctgcagtacggcatcgaggctgaattctatcagtcggagtacggccagtactggcaggacgccatgttcggctctccggaactggatgaatttgcgcccgacgtcatctatatccatacgacctggcgcaacatcacccaatttcccaccacgaagaacaccccgcaggaaatcaacgatatgctggacggggagtacgcgcattttgagacgatgtggcacgccatcgccgaaaagttccattgcccggtgattcagaataactttgatcgtcccaactaccgcctgatgggcaaccgggacatctacgatccctgcgggcgcagcaattttatctcccgcctcaatcagaagttctatcagtatgccgccgcgcatcaggacttctatatcaacgacatcgactacctttcggccgactacggcctgactgcctggggcgacgccttctactggcacatgtacaagtatgccatgtgccttgacgccatcccgtctttggccaacagcatcgccaacatcatcaagtcgatctacggcaagaacaagaaagccctcgtccttgacctggacaataccctgtggggcggcgttgtgggcgacgacggagtggacggcattgccatcggtccggaagttcccgagggtcaggtctatgccgagttccagagctactgcaaggcgctgcgttccatcggcgtgattttggcagtggactccaaaaacgacgaggccaacgcactggccggtcttaaccacccggacggcgttctgcgcccggatgatttcgtttccattaaggcaaactgggacaacaaggatctgaacctgaaccgcatcgctcaggaactttccctgggtgtggacagctttgtctttgccgatgacaaccccgccgaacgtgccatcgtttcggcgcagatccccggcgttgcggtgccgccgctggatggagcggaaaactatatcaaaatgctggatcacggcggttatttcgaggtcacagccctctccggcgaggacctgaaaaagaccgagctgtaccatgccaacgcccagcgccgcaaggccgaggccgccttcaccgattatgcggattatctgcgcagcctggaaatgaaggccaccatccgcaactttgagaatatttacatccagcgtattgctcagctcaccaacaaatccaatcagttcaacctgaccaccttgcgctgttccgaagatgatatccgcgccatggcggaaaatcccgcctggctgtgcctatacggcaagctggtggacaagttcggcgacaacggcgtggtcacggtggttgcaggcgaacagcaggaggatacgctccatctgcgtctgtggctgatgagctgccgcgtcctcaagcgtgggatggaagacgccatgatggactgcctggtccgggatgccgctgcgcgcggcgttgccaagatggtgggatattattatcccacggccaagaatgccatggtaaaagatttctatgagcagatgggctttacccggacttccgctgacgaggccggcaacaccacctgggagttgaccgtggccgattacgcggaaaagcatccgcaaatggagatcgaacgctgattttacccgaagggagattgcccatgaagtccaaagcacagcccgcccgctggggcggccgtttgggaaaagctgtcgcttttgccgccatcacggtggtattgtgccttgcgttcaacttcctgctggtggacgatgtgcattcttactcgcgggtcatgcttgacgagctgtatgctcaaagcggtcagatcgatacgctgtttctgggagcttcccactgttaccggagttttgaccctgccattgtagacgaggaactggggacgcacagcttcaatgccggaacttcccagcagcttccggacggttcctattatcttcttctggaagccgcagagcacaacgatctggataccgtatatctggaaatgttctacaccggctataaccagcagaaatccagtgacgttccgcttgcctgttatctgcttaccgattatatgccggccacctccgtcaaccggtatgagtacctgtgggagatgggggggccggctgcctttgcggacttgattttcccggcacggcataccatcgcaagcccggacgagatccccgaattgtggattgcaaagctgaccgatggctatgatgcaggcaactacaaatatgtgacctaccctaacgaggaagagtaccggggcaacggctttgtgtatacctacggcgttacgccatacgggtatgatcccattttggaagtcgatcctcaggctccgatgtctgatttcgggtttacttacctcgagcgtatcaccgaattctgcgcggaaaatgagatccggctggtacttgtgacggctccggttccgaatgctttctgcgcaaataccgccaattatcaggcatacctatccgccgtgcaggactatgctgacacccacggacttgaattctgggatttcacgctttatcgcgatgcagaaagcatcaatatggacgtagatgcttttgccgatgcccaccacttgaacggggaaggcgccgagcgttttacgcctgtcttttgcgatgttgtcaaggcaagagagaacggcgttcctgtggaagaactgttctttgattctttggaggaaaagctggcatccgcaccggacggcacctacggtctgtaaggggtaacgtcagaaaacgcgaaccatatcccgcaacaattttgcggaagctgctttacaaataaaagctgctgtgtccgctttgcgttcagagttttgcggctttggtacggaatggaatcgcgcagaataggggagctctatgttttcagtcaacgcgcctggattttttgtctttatggcggtccttttgctgatctggtatcggctgccggcttccaaacgctggtatgctatgctcggcgcagggatcgtgttttacctgtctctggatattcccggctttttcgtgctgcttgcctcggcgctggtcgtctggttctgcgcaaggcaggcagggccgaaggcccccggcaactctcggctatggttcggtttgggccttgccgctgcgctgggaccgctgcttttgctgaaatactacgccatgatggccgggaccatcaacgacctgtttgggttccggctttggagtggaagccttcttcagcctcttggtcttgcatattacagtctgcagctgaccggttatctgctggatgtccgccgcggagacatagaagcggaaccccggtttgccaggcttttttgctacgcatcctttttcctttccatcacgcaggggcccttcaatcgctatcacgacctgatgccccgtctggatgcaacaccggattttgacgtaagccgcctgcagtacggcgccatgcgctgtgcctgggggtatttcaagaaatacgccatcgccgagcgggcggccaccgttgtggataccgccttttcccggcccgcagacatggatatctcccagttgattttcggcgtcgtggtgtttgcgttccagctctacgcagacttttccggatacactgatattgtactgggcgccggagaaatgctgggtttgaaactgcccgaaaacttccggcagccctattttgcctccaccatcggcgagttttgggagcgctggcatatttctctgtcctcctggttgcgggattatatctttgaaccgctggcatggaacggctggtttgcacgtctgccggttgtgggcaggatcttcaccaagccgccggtcaacatcagtctgctgctgacttttctggtcagcggattctggcacggggcggcctggacctatgttgtctggggtctgctgaacggcgcctatcaggtcgtcagcggtttgacccggcgctggcgcaaaaagacctggaagcgtctgaaagttcccgccaaaagcaaggcacaccatgtgttccgtgtggtgttcgtgtttgtattcatctgcatcggatatgtctttttccgggcggagagccttggcgcggcactcaactactttgcctgcatgggggcgcgggtggaatttacggtgttctcccgttattgggaactgggaatttccagccgtctggatctgcttttgctccttgccggcattgcggcccttatcgttgtcgacgttctgcatgaacgcggctggcagatccgcaaaaagatcctttccagtccgcttcccgtacgctggtgcatttatgaatgcgcgatttttgctttcctgctcatgggacgtttcttgtcggaaggttctttcctgtacgcccgcttctgagagatctcaagtacacaattcaatctgatcggctccctgccatgcagttacgcacggcagggagcttttttgctgcctggccgccaggacaggcagttctatctttcccgcagtggacatacagtgttggtgtaaaccccaatgcgaggtgagaacaatggacgagtattatactctgatcaaaaagctcccggaacctttccggaccgagttgtccgggctcaatgcccaaatcgccccttttgttcaggagatccgcctgcgtgcgggacaacctgtcatgttcaccatgaaagggaaactgtctccctgcatcaaatatctgccccgggcagggcattgccagcgtgtaccgcaggagtcaatccaggcctgctttctggccctctgccgccactccgcctatgcgtatgaggaggagctatcccaagggttctttaccattcccggaggcagccgcgtgggagtggcgggaacaaaaggcgcctccggctttgcggtggtgacgtctctcaatctgcgtgttgcacgctggatcacctgtgagatcccgccccaggtactgcggcctctttccgctttgtcggggggaatcctggtggccggggtcccgggcagcggaaagactacttttctgcgcagcatgatccagtatctgagccagagcgaccgtgttttctgtgtggtggatgagcggggagaactgctgtggggcagttccgaagggctgcccaaagatcgtaacattgcgtgtgacgtttatacccagcaccgcaaatcccaggccatctgcatggctctgcgctgcatgaatccccaggccattatctgtgatgagcttggcacggaggacgatgccgccgcactggaagctggtttggcgtccggggtcgtgtttctggcatcggtccactgcgaccgcatggaaaacctggagaaaaagcctcagctagcccggctgctgcacacgggggcgttcgacacggcggtctttctggacgggcgtttccaccccggtgtggtggaacgggtggtgcagctgtgacggccgcactgtgtctgacgggcggcctgcttcttgtagtgtgcggtgcaggagtcggttttgtactggcgcaggcggagcgggaaaagtggcgcagcgcccatgctttttcccggctgcttcaatacgcggaggactccatccggtataaaggtgtccctgccgaagaagtgctgcgcgcagctgcggcttatcccgaatttgctcgtcttgggctgggcagctgttcgcgctttggagaacttgcggtgccgcggtccttcggcgacgccatgggcggggagttgcgggacaatctgctttctctggaagcctgcggccgggaatccgcctgcaaaacaatagaaggcatgatccttctgtgccgctcccgcgaagacattctggaacagaacgctcaaaatgccatgcggctgtatcccaggctgggcgtctgcatcggcgcattggcagcgattctgctgatatgaccataaaagaataggagcggccggttatggacattgatctggtgtttaagatcgccgccacggggattattgtggctgtgctcaatcagcttttgatccgttccggacgggaggatcaggccatgatgaccaccctggccggattgatcgttgtgctgacaatgctggtggggcagatcagcgatctgttcgtcctcatcaaagcactgtttgatctgtaagattactgcgatggtttgttatgttgatcataaaagttgccgcactggcgcttgtgacctgcgcgatcacgctggttttgaaaaaagaacagcccgcatatgcatttttggcatccacctgcggcgccgtctgccttatgcttctggcggcggaacacataacgccactgctggactggatacataccctgtcggattacggcatcgccgaaaatgcttcatgtcttcttcaggtactgggcattgcattggtcgcgcaatttgcggcggacctctgccgggaatcagggctgtcggcggccgcatccgcggtcgacctgtgcgggcggctgctggcactgatgcaggcggttccgatgctgcaaagcctgttatcctctttttctggcttcttgcaataatgaccgcgctggtattgctggcccctccggcccatgccgcagagattccggacaccgcgcaggacattctggaagaaggcggcctggacggcagcgagaccgggcaggactgggaatttggtgatattctggacagcgccgtcagccttttccgcaacgaatccggcaaacctctgcgttttgctgcccaggctttattctatctttccattgcctgcggtgtcggacttgtggcacagggcgggtcatggaaaaaatgtatcgacgcagtttccgttttgggatttggagcgctggggctttctgccatgatggatctgatcggacgcgtcggcaataccgcggcggaaagtcagacttacctggtagggttcatcccggtatattccgccgttttgtccctgtgcggacagacaacgggcgctgcggtgtacagcggtatgttcttttccatgtcgacttttttatccatggccattgagaagttccttttgcccgtcatgcagatttacttctgcttttccgtatccgcagcactgtggggaaatcccggaattgaggacgccgcaaaactgttctcccgctgtatgtcctggctgctcaaaggctgcgggacgctgttctcctttgtgctgggattgcaggggattctggccggcaacagtgactccgccgcattgcgcattgggaaaagcgttctgtcgggagccctgcctgttgtaggagacgccgcagccgccgcgttggaaagcacagtggcaacggtgcgcctgctcaaaggctcgcttgccctggcggcagtcatcgttctggctgcatcttttttgccggtgctgctgcactgtacactctactttctggccttttctgtctccggcattctggcgtcagccagcgggcagcggcaatgcggtcagctctgccggttgtttgctgacggcacccgcctgtgcggctcaatcctgacactgtacttttttatggttcttctctctacgcttctgcttttacttttgggaaacgggggatgatgtgtggataccctgaaaaaccttgccctgggcatttgcatcctatgcgcagccgggggcgtgattcaaatattttggccggacaattcctacaaaccggtcataaataccgttttagtgctgtatattataacgtcggtgcttcaaatgcgcggtgtcggaacgtggcaggttcccgagctgaactggcaagacccaaacagcgacaatgcggattacagagaatatgccgctcagctcgcccaggaagcgtcggtacaggctttgcaggatatcttgcaggaacaggacattgatgcccgggtcgaactgcagggcgatgtctgccgggtatatctgccggacggcactgacacgcagcaggccgaacgcatcctggaagaaaacagcggcactatgccttacgaaatcgtcgagggaggtgaggagccgtgatttcttcgctatgcaagacgctgcgggagagattgggcggcgacaaccggctgctcaactggatcgttcttgccggtattgcggggatggtgctcattgcgctctcggaatggctgcccgatccgcagacagaagcagtcaccgagcaagaggagcccgctgcgtctaccgcatccgattatgagacagatctggaacagcggctggaagcgctgatctgccaggtggcgggagcaggggaggcccgtgtgatggtcactctgtccacatcggagtatatcgtttatgccaccgacagcgagactcatgccgacggaagcagccgccaggagcacctgcttctggatgaagcggcaacagagccggcgcttgtagaaacgacccggacaccggagatacagggcgtcgccgtactgtgtaccggcgcagaaagtcccgatgtccaggccaaagtcacgcaaatcgtacaggtcctgaccgggatcggtgccaaccgaatcacggtggaacgcatggcacagcagggatgactctgccgcgccggaagccattgatcttaccgacataaggaggaaaccgttatgaaagtcaaacaggcggggcggggcatgaccatgctggcactgacggcggcattgggggccgccgtatatctgaactggtctttttcccaacagacaccccagacgatctcagccgacgacaccgcgcgggatgcggtctcggtctccgccgaggctgatgcggagacccaggccgtccagggcaaagcggaagataccgtggccgtatatgaccccctgaccgctgaagacgagactgtaagccaggagaccgcagacaaaaactacggggaagcccagctcgtcagcgtcagcgaggataccggcgacgaattctttgaatccgcacgcctgtcccgcgaaaagagccgggatgaggcactggataccatcgagaaaacactgaaaaactcttcgctttccgacgaggaaaagcagacgatgaccgataccctgaaagcgcagatcaccaacatcgaaaccgagagcgagctggagactttgatcaaggccaagggctttgtagactgtgtcgtgatgctggacgggacctccgccaacgtgactgtcatgacggaaaacgacgccctgaccgctgccgaggtcaccaagatccgggacatcattctgtccaaatgcagtgagatcaaggcccaggacattaccgtggtggaagtcaaataactgccgcggaaaaccgcgcagaccggcgtttggatttggttgcaaagccgtgcaatttgtggtacactaatttatactttgataccgcaatacggcaaccaaaatgtgcagggcgcggcgtttgacagccgcgaacatcctgcggctaggaggcaactggaaatggatgtacgcaataccgcgggcggcagcctgcaaatttccctggaggtcgttgccaagatcgcgcgccttgctgcgcttgaagtggacgatgtagccgaggtttccagtggcagcaatcaaagcgtgcgcggtcttttgagcaagaccagcctgcagaaggacgttgacgttgagatgaaagacggcgtcgcggttgttaccatccacgtgatcccggtgtacggcagcaaggttatgcgcgtttgccagaaggtacaggaaaacgtcaagcagacgatccagaacatgaccggcattacggtgtcccgcgtcaatgttgtggccgccgggcttgccgagcctgcgccggtcgaagaataaagataaagaagaggaattatggaaggaaatgcagtgacccgccgcgaagcgcgggaaagcgcttttcttgctgcgttctcggcgacgttccagccggaagagcggcaggaggctatccgcgattgcagcgagatgcaggaagtaactcaggacgcctttaccgtgcagctcctgcgagcaatggagcagcatgcagaggaaattgatgaaaccattaccgcacatctgaaagggtggacgctcagccgcctgccccgtgtcagcctgacggctcttcgtctggcgctggcggaaatgctttacggcaatgagcaaaagcccgccgtcgccatcaatgaagcggttgaacttgtaaaaaaatacggcgacgaaaacgattaccagtttgtcaacggactgcttggcacagtggcccgtgagcaggccggggcggaggaagccgccgcacccgatccggaaacatgctgacgctcgggatcgataccagcaattacgcaacctctctggccgtgttcgacacggatgccggagaggttgtttgcgatgccaagaaatttctaccggtccgccccgggcaactcggtctgcgccaaagcgatgcggtatttcatcacaccgccgccctgcctgctatgctggaagaactttctgaaaaagttgatcttaccgccattggtgcggtgggcgtttccacccgcccccgcccggtagagaagtcttatatgccttgttttctgagcggcgtcagcgcggctaccgccttttctcttgcccgtggcattcctttgatccaatcgacccatcaggaagggcatattgcggcggctttgttcgccgcttccggcagtgagctgtttgccggtccggttcttgttttccatatttccggcggcacgacggaccttctgtactgtgaagatgcacgtcctttgcaatgtcttggaacaagcggcgatttgtacgccggtcaggcggtggaccgcctgggcgtgaagctcgggtacgctttccctgccggagccaaggtgagcgagctggccgccaaatgcacggaggacatccgccccaaagttagtgtcaaggatatgacctgcagcttttccgggctggaaaatcagtgcaccaagctgttgaacgagggaaaatcgcccgaatacgtatgcaaatactgcctcctgtgtgttgcggaaacgcttcgccgcatggccaatgccgcacgcaagcagtattccgaactgcctgtcgtctttgccggcggcgtcatgagcagcgagatcgtcagagactatcttgtcgcccggatgcataacgtgagttttgttcccgggagatttgccagtgacaacgcgatcggcatttctatcctcgccgccaagggggtatcggcatggccgactacatcgatgtaacggcgctcaatcgcctggcacgccaggtcctggcccagtgtgagcccctgaacaacctgatcgtctgcggggaaatctccaactttacccggcattacaaaagcggtcatctgtattttacgctgaaagatgccaacagctctgtcaaagccgttatgttccgggataaagctcgccttttgaattttgaaccgcaaaacggcatgttggtgcttgcttatggcaatgccaccctgtatgagagggacggcgctttccaggtatatgcggactatatgcgcccctttggtgccggcgctgctcagatggccttcgatgccctgaagaaaaagctggaatccgaagggctttttgcgcctgaacacaaacgtccgctccccgcaatgccgaaatgcatcggtatcgtcacttcaaagaccggggctgcactcaaagacgtctgtcaggtaatggggcgtcgctggccgctgaccaggcttttgcttgctcctgtcagcgtacagggactggaagcggaagcaagcattctggatggcatccgcactttggatgcccgccgggatgtggatctcatccttgtcacccgcggcggcggaagcaaagaagatttgtgggtgttcaacagtgagcgcattgcccgtgcggtgtatgcctgccggaagccggtcgtttctgcagtgggacacgagatcgactataccattctggactacgtggcggatcttcgcgccccaacgccctctgctgcagcggagttgtgcgtgcctgaccaggcgcagctgcgaaacgaaatatacaatattggacaaaatattcaaaatagtatacagtccacgtggcagatgtgctataataaattagatactgtgcgtcctgaacaagccatgcgggtgcagcgcactgctctgactgcacgccgacgtcaggttatggactgcgctattcaaacaacacgttgcgccaatgataatctggaccagaaaaaggcttctttgggagccgcagctggagttgctgcctcgctgaatccttatgcggttttgtcccgcggatacgctatggtcctgaatgaagcctcggactgtctggcggtacgggatttgcatccgggccagaacattattttgaaaggggacggtgcacaggccgaatgtatggtcaacaccgtctgttccgatcgtgaggatcaaacatgaaaaaagcacccaaaagtttcgaggagggccttgagcgtctgcgttctgttctcgctgccatgcaggggccggatacgcctttggctgaggcggtcaagctgtatgctgaggccgcagagctgatccggtattgcaacaaaacgctggatgacgccgaactccaaatcaaagagatcgacacccgtctgaacaatgcggattccgcagcaggggagaccgatgatggacaataacgcctataaagcactctatgattcctatgtcaaattaacagaggatcgtctgctgactttgtgtgacaggtatctgcctgccacagctgaaatctcccgcgcggcgcgatacagccttctaagcggcggcaaacgtgtccgtgcggtccttgtgctctctgcctgcgaactggcgggcggcgacgtcaatgcagcggcagactacgccgctgcgcttgagatgctgcactgctattcgctgatccatgacgatctgccttgcatggacaatgatgattttcgccgtggtcagcccagctgccaccgaaagtacggggaatccacggcactgctggctgccgatgcgctggtcactgccgcctttgaggtcattgccaatgcaccgctcagcgctgaaagccgggtccgggcagcttctatcctttccaaaggcgcaggcgcccgcgggatgctgtacggccaggaactggataaatactttgagcagcaccgcgcggatgccgaccagcttttgaatcttcaccgccataagaccggtgctttgattctggccggcgtgcaactgggctgcgctgcctgcgataccgcacccgaatgttccgacgctttggaaacctacgcccaggaaatcggcctggcattccagattgttgacgatatgctggatgtgacctccagcaccgaaacgctgggcaagccggtgggcagtgacgcggaaaacgacaagacaacttttgttacgctctacggcctggatggagcccattccatggcagagcagcacaacaacgccgcgctggccgcattggagcccttgggcgaaaaggcagattttttgcgctgccttgcccggagcctgctggtgcgcaacaagtaaaaacaggaacgggggatgtgaatgcgttggctgatgatgccgcttcaatggaattttgttctggtcacagcgctgctggcgtcgatctgcgcccagctgaccaaggtcatcttgaacctgatcgtggttggccgctttattcctgaacgtgtctggggcgcgggcggtatgcccagttcccattccgccaccgtatgcgccatgctggtggcgaccggacgctactgcggtccggattcctccttgtttgccgtggcggtggtggtctccattatcgtcatgtatgacgccatgggtgtgcgccgtgaaaccggcgaacaggccaaagtcctcaaccagatgctgaacgaatggatggacgaaggcgcgcagaatttcccttggcttgccgataagcgcctgaaagaaatggttggccatacacccatccaggtgttggcaggtgcgattctgggtgtttttgtcggtttcgtcgtgcctatgccgtgaccgccgtatggtttctgtgccctgatgcaaagcaaggatcgtgaaacgaagaggtgtaccacatgaggtattcattgctgagccgtatcaatcggccgggtgatgtaaaaaaacttatgcctgaggaactgccgcttctctgcgatgagatccgcagcttcctgatcgagagtgtttccgctacgggcggtcatctctcttccaacctcggtgtagttgaactgacggttgctctccataaagctcttgtactgccccgcgacaaaattgtctttgacgtcgggcatcagtgctatacccacaagctgctcaccggacggcgggacggctttgctcatttacgtcagaaagacggcatttccggttttccctgtccggccgaaagcgactgcgacgcctttattgcagggcacggcagcactgcactgtcggtggctatcggcattgcccgtgcaaagaaactcaaaaacgaacccggcaaggtcgtcgccgtgatcggtgacggtgcctttaccggcggcatggtatacgagggcatgaacaatgtagggatgctcaacaatctcattgtcatcctcaacgacaacaaaatgtccatctccaaaaacgtcggcgagattgccaactacctgacccgccttcgcaccgaccccaaatatttccatgccaaggcgcagatggagaccgctcttgagagcatcccggttttgggaaccggcatggtccgtgttctgcagggcggcaaacagatcatccgccgcgggatctatcactccaccatgtttgaggaaatgggcttccagtacgtcgggccggtggatggtcacgacgttatccagcttagccagatgctgaccaacctgcaggagcaggccgcccctcttttcatccatatcgtcacccaaaaaggcaagggcctgaaacccgccgaggaaaatcccggtgagttccatagcgtctccgcttttgatttgaatcatcttaccaaccccgaggtttcccccaaagacagcttctccagctattttgggaccaagctctcggaacttggcggggagtgcagcaagctgtgcgccattaccgccgccatgaaatacggcacaggcctgcagtttttcaagcacgatcatcccgaccgtttctttgatgtgggcatggctgaacagcatgccgtgacctttgctgcgggacttgctagccagggattgctgcctgtcgtcgccatttattctactttcttccagcgtgcctacgatcagatgatccatgatgtctgcctgctgcgcctgaatgttttgtttgctgtagaccgcgccggtcttgtcccgggtgacggcgagacccaccagggaatctatgacccggcctttttcagccagatgcaggtggagacctactctccggcaaactacgccgaactggagtattggctgagttatcttgtccgggaaggcaccggtccccgggcgatccggtatccccgcggggaagagaagccgtctcttgccgctctgggctgtaccggtaatccctttgacatgatcgaacagcgcgacggcgccaaaatcgttctggtcagctacggtgccgaggccgaggaaattcttgccgcatcggatctgctgctccagaaaggcgttgctgccgactgctgcaaactagtgcggatcagtccgttgcctgacgggctgtgcgatgcactgcaaaaatacgacaccattatttttgccgaagaatgcgtcaaggacggcggaatcgggcagcagctttgttttgccatgcagcaatctggctggaccggccgctttgtactgcatgccgtcgataatcgtcatctgctgcacgccaatgtgccgcagcttcgcaaagatcagaatttggacgccgcatcgctcgccaaaagcgcgctcggcgcagaaagcgagaactgagcatgaaagtgcgtttggatcaatatctttgccaggaaggctttacccaaagtcgtgagcgggcaaaagcgctcattatgtccggcattgttttcatcaacggacagaaggccgacaaggcaggggagcccgtccccgaaggcgcgcaggtggaagtccgtggccacgacattggttacgtcagccgcggcggcctcaagctggaaaaggccatgaaggtgtttccgctcagcccggacggcaaggtctgtatggatatcggcgcatccacaggcggcttcaccgactgtatgctccaaaacggcgccacgaaagtgtatgccgtggatgtgggatacggccagcttgcctggagcctgcgcaccgatgaccgtgtcgtcaatatggagcgcaccaatatccgcaatgtcacgccggatatgctggaggatgccattgaattcttcagcgtcgacgtttcatttatttcgttaaagcatattttccccgttgccgatgccgtctgctcgcccgacgcctgcggtgtttgcctggtcaagccgcaatttgaggctggaagggaaaaggtcggcaagaaaggtgtcgtgcgggagcccgccacccatcgcgaggtcctgcatgctgccatcgaatacgcagcacagaaccattttgcagcggaagggttggatttttctcccatcaagggaccagaaggcaacattgagtttttgctgtttgtccgccataacggaacttccggtctggagccggatgccatcgaccgggtggtggccagtgcccacgaaacgctcgacggcgtatcatcccggcatcggggttgacgcctgatgcaatccatggcctaacaccggccagaaagagattgattacatgacggttcttttataccccaatccattgaaagacaccgatctttcggtcacacgccgcgctgcggcgttgctgcacagttatggtgtccgcgtccttcttccggacgaccttggccccgatgccgtttgcccggagagtgaacggatgccgttggagcaagccttgtccgctgccgatcaggtcgttaccatcggcggcgacggcaccttactgcgtgctgcgtcccagtgtctgaagcatgataaacctttgctggggatcaatctcgggcgcatgggttttcttgccacttgcgaaatggatgagatgccgcataaactcaagcggctggctcagggtgactgtcattttgagcgccgttctcttctgcaggtagagaaaaccgacggtgcctggtcagccgcagcactcaatgatgtggtgctgtatggcaaatcacgcatgcatcccatggactacaccatttactgcgatggagtatttgtctgccgctatcggagtgacggcatcatcgcagccactcccaccggatcaacggcatattctttgtcggcgggcggaccgattctggatgcttccgcatcggtatttgtgctcaacgccatttgcccgcacagtcccagacagatccccatggtattctctgatgcccgccgcgtgaccgttgtgtccgaggccgccaaccgcgacaaagtacttgcttccgcggacagccgggtatcctgtgaactggaaccgggggatcgggtcgatatttttgtggcaaaaacacagctgcgtctcgcggcttttgatgaagccgaacagtttcgcgctattgagaccaagctgatgaggagatgatagtatcaatgaaacgcgcaagacaccaggccatcctggatttgattgaaaagcaccccatcgaccgtcaggaagagctgctttcctacctgaaagatgaaggctttgacgtaacgcaggccacggtctcccgtgatattcgcgagctgcgactggtcaaaacggcgaccggcagcggcggctaccgttatatgtctgcgtcggaatccggcaaggtaagccactctcccagccgtttcgagacaattttccgggagtccgtactgaaggtggactatgccggtcacatggtactggtcaagtgtttttccggtatggccaatgctgcctgcgaagtatttgacgcccgtgcgtgggataatgttgtaggtacgctttccggcgatgacaccttcttcattctgatgcgcaccgaggaatcggccaaacaaatctgtgaggaattgcgccgtttcacgccccggcactgagtttgaacgctgaaagaggggagacacccgccctatgctgacggatctcaaaattgaaaatgtggcggttatcgagaaagctgaggtgcattttgcccccggctttaacgtgctgaccggtgagaccggcgcgggcaaatccatcctgatcgactcgatcaatgcgatcctcggcaatcgggcctcccgcgagttggtgcgcagcggtacgcaaaaggcctgcatctgggcaacttttgaaaacattccagccaacgtccgcgcccaaatggaacgctgcggttatgaggcccaggacgatctgctgctttaccgtgagatcaacgcggaaggaaagggtagctgccgtgtcaacggcatgcccgccaccgctaccgtggtgcgggacatctgcgccggactcattgccatccacggccagcatgacagtcagagcctgaccaatccggcagcgcatctctcgctgctggatcagtacgcgcaaaacagcgagctgcgggaagcctatcacaaactgtatcgagaggtcgtccgggtcaaacgggaagccgacgccctcatggcaaacgaagcggacaaacagcgccggatcgccatgttgacggaagaggtggaggaactcacagccgccaacctgtccgttgacgaggaagcccagctgacggagcgcaagcatgtgatcgttcatgcccaaagcatcctcgaccgcattaccgccgcttacgttgcccttgacggccaggaggacacggacgtccagggggcagccgatctcctgggagatgcctccaccaatctgtccgaagcagcccgcctggatgaaagcctgaacgctttgtcggagcggctgaacgaactgtattatactgcccgggaactgaccaccgacctggcagaccggctggacgggtattcctttgacggcggggaactgaatcagattgaggaacgccttgacctcatctaccgtttgaaaaagaaatatggcggcgaagtgtccgatctgctggcaaggagggatgccgccgctgccgaactggaaaacttccagtcctcttcccagcgaatcgaaaagctcaaccagctcaagcaggacctctaccgccaggcccgggaggctgccgagcgcctgacccagtcccgcctgcaggctttcgaagccatgaaccgccagatgctctcggctctggctttcctgaatatgccggggatccgctttaccttgcagcatcaccgcggtcctctggcttcggcagggcaggacaccattgaatttcttatctctaccaaccccggtgaagatcccaagccgctgtccaaggttgcgtccggcggcgagctttcccgcatcatgctggcattcaagagcgcccttgccgacaaagacgccattcccaccgtcatttacgatgagatcgataccggtgtatccggccttgctgcagggcgtatcggacagcttttgaaacagactgcggcaggacaccaggtgctgtgcatcactcacacgccgcaggtggccgcctttgcggacaatcagctgcttatccgcaaggaggtccgcgacggccggacctatacccagatccacacccttgatctggatgcacgggtccgcgctctggcggcaatgatctcgggcgacaaggtcacggaactgagccttgccaacgcccgggaaatgattgagaaatccaagtaatgcccggtgcagtgcttgacttttatctgccgatgtggtagtgtaatttttgttcaaatgcattgatgaggatcagtaaccgtcatttctgtgcgagagagaggccccggctggtgaaagggaccggcacggcggacggcgaatacccctctgagcagcaggctgaacgtcccgtccgggatcagtaggctgtgccgtgtgcgcacgttacagcgtttgggtatcggtccggtcacatctgccgcctgtacccgcgaaggtccgtcgccgtgaggggacggacgaacagaggtggtaccgcgtaatcatcgccctctgccaaatttcacgtttggcaggggcgtttttttgttccttgccgcaacacacaaggaggagtatcccatgcagatctacgaagaactgaaagcgcgcggcctgatcgcgcaggtgacggacgaggaagagatccgcgacgtcatcaacaacggcaaggccactttttatatcggctttgactgtactgccgacagcctgaccgccggacattttatggcgctgaccctgatgaagcgtctgcagatggccggaaacaaacccattgcactgatcggcggcggcacgaccatgatcggtgacccttccggccgtaccgacatgcgcaaaatgctgaccaaggaagacattgctcataatgccgagtgcttcaagcgccagatggagcgctttatcgaatttggcgagggcaaggctatgatgctcaataacgctgactggctgttgaacctcaactacgtggagctgctccgtgaagtcggtgcctgcttcagcgtcaacaacatgctgcgcgccgagtgctacaagcagcgtatggaaaagggcctgtccttccttgagttcaactacatgatcatgcagagctacgacttctactacatgttccagcattacggctgcaacatgcagttcggcggcgacgatcagtggtccaacatgctgggcggtactgagctgatccgccgcaagctcggcaaggacgcctttgccatgaccatcacgctgctgaccgactcccagggcaagaaaatgggcaagaccgccggcaatgccgtctggctcgaccccaacaagaccagccccttcgagttctaccagtactggcgcaacgtgggcgatgcggacgttctcaagtgcatccgcatgctgaccttcctgccgctggagcagatcgatgagatggatcactggcagggcgagcagctcaacaaagccaaggagatcctggcctttgagctgacccagatggttcacggcaccgaagaagcagagaaggcccaggctactgcccgcgggcttttcagcggcgcggcagatgaagccaatatgccttccacccagctggacgagagcctgctgcgcgacggcaaagccggccttctgtctgtgatggtcgcagcaaagctgtgctcttccaaccgtgaggcacgccagctcatccagcagggcggcgttctggtcgacggtgagaaggtcaccgatcccacctttgcactggccgcagaacagctccagaagggcgtcgtcatcaaaaaaggcaaaaaggtgtatcataaagttatgctgtgatttataatgcacagattctgaaaccacggcattttccggcggagagcgggcagtacgcctgctctccgctttttatgttccgcccttgctgaactgctgcctttgggctataataaagaagatacttcaaaaagcgaggatatccccatggccaaggaaaaactgaaaaccatatatgtctgcagtcaatgcggcgaaaccagtccccgctggctgggacggtgtccgtcctgcggcgcatggaacaccatgaatgaggatgttatcgcggaaccggccaagagcagttcgtcccgggcttcggctcctgtgcgcgtgaccgggcagaccagcctgacggcactgaatctgaaaagcgtcagcacgacggaagaaaagagccgcattgtgaccggtatcggtgaactggaccgcgtactgggcggcggtattgtcctgggcagcatgacattgatcggcggtgagcccggtatcggcaagtcgaccattctgctgcagctttgcgggcaggtgtcccagacacacagcgttttgtatgtcactggcgaggaatcggtccgccagatcaagctgcgcgccgtccgtctggacgttgcgcaggaaaatatttctctggtcgccgagagtgacgtggatgagatctgcggcctgatcgaacagctgaagcccggcctggtggtcattgactcggagcagaccatgcgctgtgcagacattgcttcctccgccggcaccgtctcccaggtcaaagagagcacggcgcgctttttgaacgttgccaaatccaacgacattcccatgtttatcgtaggtcatgtcaacaaggatggcgccatcgccggccccaaagtcatggagcacattgtagacaccgtgctgtattttgaaggcgataaaacgctgccttatcgtgtgctgcgcgccgtcaaaaaccgctacggttctaccaatgaaatcggcatgtttgatatgaccggcaggggactggcccagattgaaaatccctcccaggtcatgctggaaggccgcccggtgggtatcagcggcacctgtgtcgcctgtgctatggagggcacccgccccattctgagcgaggttcaggcactggttaccaaaacctcttttcccacaccgcgccggactgccagcggctttgactataaccggatgtatctgctgcttgccgttttggaaaagcgtgccggatatttcttcgggaatcaggatgtttacgtcaatattatcggcgggcttcgtttggatgagaccgcctgcgatctgccggtctgcctagccatggcctccagcctgctggatctgcccgtaggagaaaaaaccgttgccatcggtgaagtcggccttggcggagagatccgcagtgtgacgcacttggagacccgcctgcgggaggcctgccgcattggctttgacaccgccattgtcccaaaacacaacctgaaaatgattgatcccgcacagtttgaggggatgcgcctgatcggggtttcctacctgcgggaggcaatcaacagtatcaaactgaaggactgaacttgaccgcatcagggaatagacataagcggtccagaacacataaaaggagcaagaacgatgaaagattccaaaacgccgctgaccaatccggcgctgaaacaggcaatggctgcaatgaaagccgacaacaccccgcagacgcgcaacgttatgatcaacgaaatgatgcgcgccacttttcttgttccggtacaggtaggctttgcggggactccgcccaagatggacaaaaacgggaaggtcaccatcccgcccaacaccaagatttcctttgccttgcttggcaccacggataaaaaacagtattttatggcctttaccgactgggatgagctgcacaaatggcgcaaaaatcccgcacagcaaaccatgatgctgcgctttgacgattatgcctccatgatcgaaaaaaatcctcaggtttcgggttttgtcatcaatccctttgatgagaatctgcgcctggagcgtgagatggtggcatctctcaaacagcaaaaagatgcctttgccaaagccgcaaaagagcgtgcccagcagaagcgcatcaacccgggagacaaggttgttatcgtagagctgtcccattatccggaagaactgctgggtccggtctgtgatgtccttgaggccaatgctcaggtcaacgaggcctatttgcagatgatgatcgtcaacgatacgcaaaaaagctatctgctggttcttgatgcccccaaggacaacgagctttttaccgcggttatcaatgcggcgcgtccgtatcttcagcaggtcaagctggatatgaacctgaccatcgccgcatcgccgctgggacagcagggcattcgcggcagcgaaccgttctattcccgtgtgcggggccgcatctatgagcaggaagacgaggaggattgattccgtggtcaagcgccttttggattgcacctccagcgaaatttgccgttttaacaagaaagacttgctggcatccattgccggctgtgaaggccgcgtcctcgcctgcgagaccatcggcatcacgccgccgctgcttgcggatgtcaccaacgcagaatatgcagcctccctcggcgcggatattttgctgttaaacatgtttgacgtgcaaaaccccatcgtccaggctctgcccaaagtgccgccctgtgaaaccgtgcgtgaactcaaacgtctgaccggacgagtgattgcgatcaacctggaaccagtggatccggagattgccaaagccgcaaacggaggtaccatgtggcaaatgacacccgggcgcatggctactgccgaaaatgcccgtctggccgctgagatgggcgttgacatggttgttctaacgggaaatcccggaaatggcgtcaaaaatgatgccattgtgcaggctcttcgggatatcaaggatgccgccggtgatcgcttgattctggctgccggcaaaatgcatgccgccggtgtaataggggaaggcggagcctccattctgacacaccaggatgtcgcagacttcactgctgcgggcgccgatattattttgatgcctgccccggggaccgttcccggaatcacgcaggaaattgctcacgaccttgtcacgcagatccacaaaaacggcgcgttggccctgacggccattggtacctctcaggaaggcgctgatgtggataccattcgccgcattgctttgatgtgcaagatggctggcgctgatattcatcatatcggtgacaccggtgttcccggaatggcattaccgcagaatatcctggcgtattccatcgcaatccgcggagagcggcacacgtatcaccggatggccagttctgtcaatcgttgatccaattatcagatcaaaaaagcaagtgttaggcttactgcacttgctttttattgtttctgacaatgtcacgtatttttttgttgacacaacgtcattatttgtaatataatctgtacacaggcaaggctttcggcctaaaaaatggcttggcaatgcaaaagagcatatcttgtccggaaaggcttcagaatttcaaagaaagcagggaagggaagctcttgccgattgccggttttgccagggggtccatcaaattgagagccattgtccaacattccagtccgacattctaaattctcgattccttgtcggttgagaagcaataccaaagccattctcatatccatcgcaggctttttcatatagccgtactcataatgcgcctgactggatgctgtcggcttattttgaattgctccatagagtgtgcagctccggcaaatttgaactcgagtcacacagggccacagatagccacactggcctccggttgatgcaatcatgcgtggtttcgtgttttaattgtaggatgataccagataacggcataacggctccggacgtcatcttgcatatgcttggactccttggggaagggcttttacattttgtaaaagccgattgttcttatttcgctaaatgcaaatttagcgaaatataggggagtcaaaatctccattttacgccctccaaggcctctcagagctttcggtggctttctttgaattccggcccttgcgttattcgcacttggtcacgcactcttgtacgtcaccggtactttcatagtttcgcgtttatcaccattcgttttaggagtttatatatgagcagttatatcgatgtcgtacatccggaacgccatgctccgtatctggatattccggatgatgttgtagactatctgcattatctggatttcgttaagcagcgctctccacgcaccgtaaacggatactatctcgatctgcggagtttctttcggtttatggccgtacagtggcatctcgtttcagaagatgctgatccttcccaaatcgatctgcgcggtatcgacacccgtcagattgcatccatccgtaaacgagacatctttgattttttggaatatgcacgtgcgcagtccaacggttccaaagcacgcgcccgcaagctttccgcgctgcgtggcttttttggatacatgcatacgcaggtcaaccgcattcaggacgatccaaccgcaaacatcagcttaggaacaccaaaaaaggctttgcccaagtatttgaccctggacgaaagcctggaattgttaaaaaatgtacaaagtgatttttatagtcgcgatttttgcatacttacgctatttttgaattgcggcatgcgtttggcggagcttgtttccatcaacttgggcgattttcgcgacgaaacgatccgcattgtcggcaaaggccacaaggagcgccttgtttaccttaactctgcctgtctgcaggctcttgaccgttataaaaaagagcgtgcttccctgcccaacctggtcgacaaaaacgctctgttcgtctccaaacgaacaggaaaacgcctgacagcccgccgagtggaacaaatcgttgcacgctgcctgcaaagtgccggtctcagcggaatgggcttttctccgcacaagctccgtcataccgccgccaccttgatgtaccaatacggtcaggtcgatatgctggcccttaaagagatccttggacacgaaaacgtctctaccacgcaaatctacacccacattaatcaggcacagctgaaacaagctgtcgagtcctcgccactgtccaaagtcgaatatacgcccccagccgatgccgatgctgacggaattagcgaagctgattcagagcaagacaccggcaaataacccggaggaagccgcgcccaaagcgctgcataccgcgccgattcccaaagtaaccaggtatcggatcagcatcttctttgtctggcgttccagggttccacgcgtaccggcaccgcttaaaaccgtgcggaacaatgcccccgacgtttctgcggcgttcttggcaagccaaagcaacagaaccaacgtcacaacatccggcaaacaggtcattatccagtacacaaccagcccacgtgcctcggatgtcaaaaacacggacgccgcgcagattccgagcaaagcgcctttcgctccaaaaaatgccgccagtaacggaattcccaccgcattcatgccgcaaagcagcaccatcccactttgcaggaacaatgccgaaaacaaccgggcaaatagtttggcaaaagaagtatagttttgcttgtccatgtaatattgagcaaacgccgacccaatttccgtcgtttgctcacggcaaatcaaaatcccgacagtataccccaccaaaaaaagtgcgccgaatcccaatacacatcccagctcttctttgccgggattttgcagcagtttcgggacttgccgctccgtcggattgcgctgccaatgcggcaccgtttttgcagcacgcatggtcagttcctccggccggaaggcctgagtgcggtcagggttccgcccagcatgccggtcaacagcagcatgcagaccaatgcgattgcacgctgttcaaaagcaaattcgcctttcagcgcacttgcccccgcaatgcacagagaatagaaagcgccgctggccaatccgcaaagcaagcgctgacgcccgatcccttttgccatcagcattccggaaaacgctgcccctactccggcaatggtgcaggcgaccggacgtaccatgtcccccggaattggaaacctcgcaaaggctgccgcccctatcatcaacaggatcaacgtggcagcaaagcccccaaggaatgctctgaccaccacccaaacaagattccgcccgccattggtctgacggcgaatagtcttagccacggatgaccgtttccacttcaatttctgattcataaaataacacgcccccttgcacagtaaacactatgcgagggggcgtgtcgttatgcagtttttagagcaggtctcttatttctttgcagcggtatccttgctgtctttggtccccatatccagcttctccaccgcagcaatggcggaacggcggaagcggatcttcacacggtcgctgccggtttccagaacaaaagtgtcctccttaatggcagacacgcggccaacaacaccgccgatggtagtgacttcgtcaccaatctcgatggagttacgcatagcagcgtcctttttgtcctgctttttctgcggcagatagatgatgaggtacatgaaaacgaccagaacgagcatcggcaggacgagggtcagcatgctgcccgaagccgaagtggtttccaaaaactgatacatacaaaaagctccttaattcaaacgatttgtttcattatacaaaaatatagcggataaagcaagcctttaccggcattttttgtgtatcttttcacataaaaatgcagtaaatccaagctcagatgcgcgtatccagccgctttacataagtgtcatggaattcctggtatcggccctcgtccagcgcctgacggatacgctccataagatgattgtagaaatacagattatgcatgactgccagtcgcattcccagcatctcgtccgctttctgcaggtggcgaatataagcacgggagaaattgcggcagaccgggcagtcacaggacgggtcgatggggcgctcatcccgttcgtacttgaggttcttgatattgatgatgccgtcccaggtaaagagatgtccgtgacgtgcattgcggctgggcataacacagtcaaacagatcgacgccgcgatatacgccctcaatgatgtttcccggggtgccgacccccatcaggtagcggatcttatccttgggcgcataaggctccactgcactgatgatgtcgtacataatttccgccggctcacctaccgcaagcccgccgatggcatagccgtccagatcatattccgcgatctgcttcatatgctctacgcgcagatccgcataggtgcagccctggttgatgccaaacagcagctgatccgggttcacggcacggccttcatgtttcaggcgggccagctcggttttgcagcgaagcagccagcgtgcggtccgggcacagctgtccttggcgtagctgtgctcggcagggttttccacgcactcatcaaaggccatggcaatggtggagccgaggttggcctggatctgcatgctctgttccggacccataaaaattttatgtccgtccagatgtgagtggaacgtcacgccttcttcggtaatgttgcgcagcttggcaagactgaacacctggaatccaccgctgtcggtaaggatcggcccatcccaacgggtgaatttatgcaggccgcccatatctgcaaccagctggtcacccggccgcagatgaaggtggtaggtattgcagagcatgacctgcgcacggatatccttgagatcgaacgcagacagaccgcctttaatggcggctgcagtcgcaacgttcatgaacgccggagtctgcacggtgccatgcacggtctgaaactcaccgcgccgcgcactgccctgctgtttgatcagacgatacggcataaacgccctcctctatcttttagattattcgcagtcttcgcagaaagccttgaacgtcaggtacgccatgtagacgtcgctcttggcaaccaactcatacggagaatgcatggacagcaccggcacaccgatatcgatggtatcgatgttctggttcgccacatactttgcaacggtgccgccgccgcccagatcgatcttgcccatttcgccgatctgccagacgatgttgttgcgatccatcagacgggtcagatagctcaccagctctgcgggtgcatcgttggtggaggacttgccgcgcgcaccggtatacttgtaaacggcaataccacggcctgcataggtggcgttattgggctcaaacgcatccgagaagctcggatcatatgccgcggtaacatcggcggagaggcacttggaagcctggaacgcagtgatgtagtccacattctgcgcggcgcacagctgctgcaggaaatggaaggtgtacatgctgttgagaccagtaacaccgtcggagccggtctcctccttatcggtgagcacgcagaccgtagtgtaaaccggatttttggtctcgatctcggccatcagagcaggataggcatcgacacggtcatcgtggccgtagctgccgatcatggcgcggtccagacccacgtcgcgagccttgaatgcgggcacgacctcgatctcggcacgggtaaaatctttctcggtgatgccataggtctcgttgagcaggcgcagcacgttcagcttgacacggctctccagctctttgtcctccaccggggtagacgcaatgagcacattgagattttcgccggtaatgccctcgttcagctttttctcgctctgcttggcagccagatggggcagcaggtcagtgatgcagaatacgggatcgtcgtccttctcaccgatgcagacatccacgacagaaccgtcaccacggcagatcacgccgtgcagggccagaggaatggtcggccactgatacttgcgcacaccgccgtaatagtgggtacggaaataggcgaaatcgttgctctcatacagaggcaccgggcgcagatccaggcgcggtgcgtcgatgtgcgcgatgttcaggcggaaaccatccgccaggctcttctggccgatggttgctgcgagaacgcactttttgcggttgataaagtaaatcttgtcgccgggctgcagcgcctggccgggaacaaattcacggtatccggcctgcttgagaagctgctcgctgtacgcgcaggcttcacgctcggtcttgccgttgtccaggaacaccttatacccttcgcagaaagcatctgctttctccatcatatcgggagccagatccgccaccgtttcatttttgtagagaagacttttgagagtttccttatccattttacagttcattcctttcttatctgaaagcagggcacatttctgtgtcccgcccgacatccttggtcagtctgcgtagatctcacaataccgttcataggcactggtgaccttgtagacataccggctcatctgagtgtagggaaaatcctgcagtgtaacgccgtcctgtgaatactcgctgtttttcagcagttcgtccaccgttcccacaccgctgtgatacgccgcagcggccgtcgccaggtcattgccgtaacgctgaaggcaatagctcaaatagtaggtgccaaaccggatattggtttccggatcgtacagatcctcaaaggtcaaatcctctgacggcgcaatttttgatttgatccagtcaaaggtgatctcggtgatctgcatcagaccacgggcatccacattggattgggcctcgggatcaaagttgctttcggtacggatgatggcatacagcatccgctcatccatgtcatatttgcccgcgtaatactccaccagatcggaatattttcgagggtattcccactgctcgatcttatcgtgggcagaaatgacaaatatacttccaatcgccaccaggcacagcaaaaccgctgcgatccgcagccaccataccctccagcgacattgattttcctttggtttattcttttccctgaaagtctgttgtgatcgtctcatgtgcctccttccgcagagagtccaacactcttccgcattgcagttcaaggtcggccagacttccgtcgttgtgaatcaggtaatccgctgcggcgcaaattgtttcctccggcatctgtgcatccagacgccgccgcgccatctcctcggagatatgatcccgagcgcagattcgtgcaacactttgcgcgtacggagcagtcacaacgacaagccggtcacactctttttcaaacggagtccccaggatcaccgcgccatccacaaagaataacggctccccttgcagccgggcgcactctgccgctccacggatacgcgccagaatttccggatgagtaatatccgtcagctgtctggtgccttcgggggtggcaaaagcgcggtctgcaagcagacggcgatcaaggactccattcttatctaaaatatcaaaaccaaatacattttgcaagcgcggcagacagggcgatcccggctgcagcacctgacgagaaatctgatccgcatccacgcagacgcacccttgtgccgccagataagcactgacgctggatttgccgcagccggaacgcccggtcaggccaacgatcatcatatctgcaccacccgaaaggccgcagcccgaatcagacgattgtacaccgccatggaaacgccatcccgacgcgggcaccgggcatagacggtgactgcccctcggcggtcaagctcccggagtgccgaaaacagccggtgagcctgttcttcgggatgtgtctcacgtccgtactcaatgcagggtacagggagatgctccccttcaccctcaaagcaaagtccccaaactccctctgccgcatgttcggcaaggtatttgtggtaggcatcgaagctgccttccagaatggtgacctccgccttgggcgcatagtgcttatatttcatgcccggcgaacgagccacttccccgtcggccagtttttccaaaatagcgtgggagacaagcaccggctctcccaaaacctgctccatttcctccttggtcacataaccggggcgcagcaggaccggctgatcgcccgtgagcgagacgaccgtggactccacaccgtaagtacattcgccgccgtccagaatcaaaggcaggcggccgttcatgtcggcgaaggtgtcttcagcgctggtagggctgggcttgccggaaaggttggccgacggtgcggcaaaggccacgccggagcggcggatcaccgcctgtacgaccggatgggagggcattctgacccccaccgtatccagccctgcacaggtcacctcggacacctccggtcctttgggaagcaccatggtgagaggccccggccagaaagccgccgccagcttttgggcacgttccggaacttccgagacaatgccgtgaagcatttccatcccgcagatatgaacgatcagcgggttatcctggggacggcccttggcatcaaagatttttttgacagcctcaccgttgcgggcgtctgctgcaattccatataccgtttcggtcggcaaagccactaattgaccgctgcgcagcaactctgctgcgtaggtcaggctttgttcatcgacctgcatgacttttgtctgcatagttttcgcttctttccctgaatgctgtggttttattgctgttcatcccgtgcgcggagcttttcctgctggtcggcaagtgtcagcggctccacgaccagttccagcgcaccgttcagtacgtcttccaatttgtaaatcgtcagtccgatccgatggtcggtcagccgaccttgggggaagttgtatgtccggatgcgctcactgcggtcaccggttcccacctggctgtgacgctttgcgttgtagtcggcgtcatattcggcctgtttctgctgcaaaaggcggctgcgcaggaccttgagcgcctgtccgcggttttcccgctggcttctctgatcctggcactccaccaccataccggtgggcaaatgcgtcacccggatggcactggaagtcttattgatatgctgtccgcctgcaccggatgcccggaaggtgtcgatgcgcagatccttgggatcgatggtcagttctacttcttctgcttccggcatgaccgcgacagtcacagtagaagtatggatgcgcccctgtgtctcggtctccggcacacgctggacccgatggacgccgctttcaaacttgagcttgctgtacacgccggtgccatccaccagcaggatcagttcctttacgccacccagttccgtctcgttcaggctgacgatctcacaccgccagccgcatttggaggcgtacatctggtacatccgccaaaggctgtgggcaaacaaagcggcctcttccccgccggcacctgcacggatttcgagaatgacgctcttatcgtcgttgtcgtccttgggcagcagaagaagtcgaatctttccttccagctcggttttatttcgtgcgttttcgcatatttcctgctgtaacatagctttgaactcagcgtcagggctgccgtcctgcacaagctgctgcatttcatccagttcccggcaaacgtctcggtagcggtgaaatgcttcgatcagcggttcaagctctttgtattcccgggtcagttttccgtatgccgcagggtcctgcacggcttccggcatcgtcagccgatgggcaagttcttcataatgacgctcgatctcgtgcagttcctcaaacatagcaacccttccgccgccggcaggagatcattcctgaccacgcagcacttttttgatgtttttttcgatcttgactctgggcagcatgatctctcgtccgcagccctggcagcggatcttgaaatccatgcccacacgcagtacatcaaaccgatttgcaccgcagggatgctgctttttggtctggatcacatcgccgacctgtacatccatgacgccccaccctttcctgccgcataacggcacagcaatattatataccaccttgccgtttttgcaaatatcccccgccccatccgcatacagtaaagcaccgcaaccgcggaaaccataagaaaagaggaaatgtgaaatgttggaataccgtgccgaaggcctttgccgaaacgccggccatttgcgccgcgacgaactagaacgctgcatcgcgaccggagaagtgctgcaaagcacagcactcgcctatgacacaaaccgccgccttcgttttgaattatgcggctgcaaagcttatatgccttacgaggaatgtctggacacctctcatggtgaagcacttaaggatattgcggtgctgacgcgcgtcgggcgtcccacctgctttgtcatcaccgacgtccgccaggatgaaaacggcgaaaccgtctacctgctttcccgcgcagctgcccagcgtgcctgccgtacgcagtacctcgatacgctggaatccggcagtgtcatcccctgtaccgtaacgcatatcgaaagcttcggtgccttctgtgacgtggggtgcggcatgtcggcgctgctgcccatcgactgcctttcggtgtcgcgcatttcctccccggcggaccgggtatccgtggggcagcagctgctgtgtgccatcaagacccgggacgcccagggacgcatcgtcctgaccctgcgggagcttctcggtacctggagcgaaaacgccgcctgttttgccgccggcgaaaccgtggtcggcatcgtgagaagcgtggaggactacggggtgtttgtggagattgcccccaaccttgccggtctggccgaacccgacgccaccctgcgccccggtcagtcggtcagcgtttacatcaagagcattctgccggataaaatgaagatcaagctggtgatcgtaaacaaaaacctggggcagtctctgcgctttgaaccccattactttgtaaccaaaggccggctgaaacattggacctactccaccccgcaaagccggaaacagatcgaaaccgtgttttgaccttgtatcttttcccgtggttttgtataatagattcaatacaaagtctatttgcgggaagtgatggcaatggcggaggcctttaccgccggtgtaaagcccggcggccttacaagcgataccgagatccggatcctgctgtgctaccttgtcaaaaccgctgcgccgctcacgcgggacgccatgcagggggcacttttgcaggaacaactggtaaactactttgaatttgtcaatgccctggatgaactgcaggaacagcagctgatcgaatcgacagaaaatggttttgtgatcacagagaaaggctctgttgtcgccgataccctgtccgatgatttgccgcgcagtgttcgggaaagtgccgtccgcgccgtgatccgtatccagagctgggtgcacaaggctgcccaaaacaaagcccgcgtagaacatgacggcgacgaataccgcgtcatctgtaccattgaggacatggggcgcgacagtttccaggttcagctgtccatgcccgaccagctgacggcagagatggtcaaaaaccggttcattgccaaaggcagcgaagtatactcccagctgctcaacctgctgacccagccttccccggaggatgcgccgcctgaagccgtgctgtaatccatttataaacatcaaacataaaagagagggttcgccacatgagcgttccctctcttgttttattgcaatgtttttgccgtcgagcgcttttcagcagccgaggtaagccttgcggacctcgatattgttggcaagctcgtgggcatcgccttccattttaatggtgccggtctcaaggacataggcacgattggcgatttccagagccatcttggcgttctgttccaccagcagcaccgtcacgccgttgcggttgacgtcgcggatgatcttaaagatctccttgaccagaagcggagacaagcccatggaaggctcgtccagcagcagcattttgggcttgcacatcagtgcacggccaatggccagcatctgctgctcaccgccggacagcgttcccgcaggctggctgcgacgctctttcaggcggggcagcagctcataaaccatatcgaagtcattctggatggcttctttaccgtcccggcgggtataagcgcccagcatcaggttctgctgcaccgtcaggccgctgaacacacggcggccttccggcacctgggagagccccagacggatgattttatgggcttccatcttgctgatgatctcaccgcagtaggtgatctcgccgctcttcagtttgagcaggccggagatggcgtgcatggtggtggtcttgcctgcgccgttggcaccgatcagtgtgacgatctcgccgtcatcgacgtggaaagagacatcacgaatggcgtggatcgagccgtaaaacacattgatgttcttgaccgaaagcatctcccccatcgtcaatcacctcccagatatgccgcaatgaccttggggttattgcggatggatttgccgtcaccgcgggcaatcacacggccatagtccaaaaccgtgatttcctcgcagatacccataacaaaattcatgtcatgttcaatgagcaaaatagcaataccgaactgatcccggacactgcggaccgtctgcatcagctcctcagtctcattggggttcataccggcagccggctcgtccagcagcagcagtttcggattggttccgagcgcacgggcaatttccagctttctctgcttgccgtaaggcagctgagatgccttgagattgcactcgccatccaggtcgaaaatctgaagcagcttatgtgcccgacggttcatctcgtgttccttttccttaaaggaaggcaggcgcagaatgccggtggccatgctgtaccgcacctgattgtgcagtgcgaccttgacgttatccagaacgctcatttcgctgaacagacggatattctggaacgtacgggcaatgcccgccttgctgatgacctcagggcttttgccggtgatgtccttaccatccagcacgatattgccctcggtggggcggtagacgccggtcagcatattgaacactgtggttttgcccgcgccattggggccgatcagaccgtacaaatggcctttttcaatagaaaggtccagctgcgaaactgcctggaggccgccgaaggcaatgcccaggttgctaacttccaacaaagccattcaggccacctccttctttttggcgtccgacttacggaagcctttgaaacgttccgcaacgcgctttctccaggcgatcatctgcgggctctggttaaagatcatcatgacgatcagaaccaccgcatagatcagcatacggtaatcatccagaccgcgcagcatctcgggcagaacggtcagcagcgcggcggcaatgatggaaccgcgcaggttgcccataccgcccagaaccacaaagaccaagatttggatcgaggtattgtagtcgaaccggcgcgcaaccagagaggagtaattgagtccgtaaagaacacccgcaagaccggcaaacacagccgaggtaacaaaggccatcagcttgtacttggtcaggttgataccgacactctgcgctgcgatctcgttgtcacggatggcggtaattgcacggccggcacgggagttgatgaggttgatgatgacaaacagggacagcagcaccagcacaatgccgatggtgaacgtcgagactgtcttgatgcgggtaatgcccatcgcgccattgatgagcgtggtcccgtccgcttccagtcccatggaagcggcatctttcaaagagaaatggattcccttggagtcatagccaaggtagcaggcattgatgacgtttttgatgatttcaccgaacgccagggtaacgatggccagatagtcgcccgaaaggcgcaggaccgggatgccaatcaggaaaccgaacaaaccggccacgcatccgcctacgatgaacgccagcaaaaccgccagccaagtgggagtattctggttcagcaccgtccagaccagaacgccggaaaaggcaccggcactcataaaaccggcatggcccaggctcagttctcccagaaaaccgaccgtcaggttcagagacactgccaacaccacataggcacagatgggtaccagctgtccctcaaaggagctgctggtcagtcccgcgccggaaaggatctggacaaccaggtagaacacgatgacaataccataggtaatgatattgctcttggtggattttttcatgtttttcaatcttgtcagcggcactggtatcacctcacactttcacgttgactttcttgccgagcaggccggtgggtttcaccagaagcacaacgatcaggaccgcaaaaacgatcgcgtccgaaagctgggtggaaatgtacgccttgctcaggttttcaatgacaccaagcagaatgccgccgataaaagcgccgggaatggagccgattccgccaaaaactgccgcaacaaaggccttgataccgggcatggcaccggtggtcggagacagcgacggataggtggagcacagcagcgcgccggccactgcagccagggcggaaccaatggcaaaggtcaacgaaatggtcgcgttgacattgacgcccatgagctgtgctgcaccgcggtcctcactgaccgccagcatggcatggccgggaaccgtatggttgacaaacaaggtcaggaacaccatgatcacgatgcaaaccagaatggtcacgatagtctcgcccgaaatcgtcagctgcccgtcaaacagagtaactttctgcaggccgacgaccgaggtgaagctcttggtgtttgaggtccagagcagctgcgccacctgctgcagcaggtagctgacgccgatggccgtgatcagcacagccagcgacggcgcatcgcgcaaaggacggtaagccacgcgctcaatgacaatgcccaggatcaggcagaccaccatcgaaaacagcaccgccacaatggggttccagccaaaggaaccaaaggcaaaaaagatcacgtagctgccgatcatgatgatatcgccgtgtgcaaagttcagcattttggcaatgccgtagaccattgtgtagcccaaggcgatcaatgcatacacactgcccaggctgatcccgctgatcaggtaagacaaaaactgcattgcgaaacacacctcacaattttcttttcccaacttcgcccctatgaattcttcaaaggtgcaaaccgaatagcattatggtatcacaaaaaatgcgtcgaaacaatgcaaacacggcaaaaatggccgtttcacagcagattattgtctgtttttctcgaaaaagcactgtttgccacgcaaaaaacaaaagggggctgccgaaacagcgttcggtcagccccctttggcatgcagaatctgggtcagatcaaattagtcggccagaacataagcgccggactcgatgatgtagaccttcggctccttggagatcatgccgttctcatcccaggtctgaccctcgccagtggtgccattaaaggtcatggaggtgaacgcagtggtcagagcatcgcacatctcgctggaagacatatccggagagattgcgccgtcctgcagagcctggtagatggcgtaaacgcagtcgtaagcgtccgcagcaaactggttgggagtctcgtcgttgtaagcagccttgtaagagctgacaaaggtagtggtggtctcgtcatcgccgaaagcggagaacgggcacagcatcatcaggccgtcagccaagctggtgtcaaagccctcaacgcccaggatgccgtccatgccgtcgcagccgaagaaggtcggctcgtagccgatgcggtcggcagcgatcaggacctggctggcctcgttgtagtagataggcaggaagaccagatcagcgccggcctcctggcacttggtgacctgggtggacaggtcgctcttgttgtcggcggtaaaggaagcatcgctgacaacaatgttcagccccagctcctgagcctgggccataaacgcggtgtagataccggtggagtacggatcggaagagtcgtagatgataccgatcttggtgcccaggttgttatcggcaatatagttggcagaaacaacgccctggttggggtcggtgaagcacatctggaaaatgttgctgccggtcagagccacgtcctccgcggaagcggaaggagtcagcataaacatattatcattgacacactcggaggcgacgttcaggctggggtcgctggtaacggggccgaccagaacctgcatgccccagtccttcagggcattgtaggcgttgagggcggtctcgggatcactctcatcgtcctcaaacttcagttcaaagaccgtgtagccggcagcggcgttgatctcgtcaacagccagctgctcaccgttcttgacagcattgccgtactgggcattgccgccggtggtggggccgatgccgccaagcttaatggtagcctgggaagcgccctcagacgtggaagcctgagaatcctgtgcggaagaagtgtccgacgaattgttgccggagcaggcagcgaggctcaacgccataacagctgccagcataccactgacaaactttttcatgttatatccctcctagatctttacagcgtaccctcctttttgacgatgccaaaaaagaaaatgcacaaatacactgtaatatgctcattattataccgccgtcccccagggacttcaatacatcaaatcgccatagtttgtttacgatttattcatctttgtggacattttacataaatattagttacaaaacaatatcagtttgtcaaaacgcagaaagcgtctttcaaaatagggattgcaaacattggcgttttttggcataataaaggttaaatcttatcgccgcggtgtgcggctaaaaggacacaaggccttttgcgacaggccgaaaggggttatcatgaaactgctggaagagcgcatcctgcgcgagggtcaggtacgacccggaaacgtactgaaagtcgattgttttttgaaccaccagcttgatgttgcgcttttggatcaaatcggtcaggaattttaccggatctttggccaggatggaatcaccaaaattctgaccattgaagcttccggtattgcgatcgcctgcatgacggcccgccatttcggtgttcccgttgtctttgccaagaaggccaaaagtaaaaatattgacggcgaagtctacacctccgttgtgcattcttatacatatggcaaagactatgacatcactctggccaaaaaattccttacgcccgaggacaaggtcctgatcgtggatgactttctggccaacggcaaagccatgcgcggtctcctggatgtttgcagccaggccggcgtgaccgtgggcggcatcggcatctgcatcgaaaagggcttccagtccggcggtgccgagctgcgtgcggccggctacaaactggccagccttgccattgtggatcacatggatgacacttccctcaccttccgacagcaataaaatcatgcggcgtgttttatcgctgtgtccggacgtccaaacttgcacaaagacgatgtctagtgtaaaatgaattattccttttataaaaatggattgtggagtggaattatggctgacgaaaagttttctaattttctgactgagatcattgacgctgatcttgccgagggcaaggtcaaggagatccatacccggttcccgcccgagcctaacggctacctgcacatcggttctgccaaggcgatcttcatcaactatatgatcgccaaggtttacggcggcaagttcaacctgcgctacgatgacaccaaccccgcccgcgaggacgacgagtacgtccagagcattctggccgacctgaaatggctgggtgccgatcccaacggcggaattttctacggcagcgactactttgaaaagtgctatgaatacgccgagaagctgatcctggaaggcaaagcttacgtggacgatctcccgcgcgaaaagatgcaggaataccgcggcaacgacgcaggcaagcccagccgtcccagcccctaccgcgaccgcactccggaagagaacctggacctcttccgccgtatgcgtgccggcgaattcggcgacggcgaaaagaccctgcgcgccaagatcgaccttgccagccccaatatgaacatgcgcgacccggcgatctaccgcatcaagcatgtgacccaccatcgccagggcgacaaatggtgcatctatcccctgtacgattttgctcatcccattcaggacgccattgaggggatcacccattctctgtgcagccttgaatttgaaaaccatcgtcccctgtatgagtgggtcatccgcaacacggtgggcggcgagttccccaaacagagagagttcgcccgtctgaatgtgaccaacaccgtcatgagcaagcgctacctccgtgagctggtggagaaaggtatcgtggacggctgggacgatccccgcatgcccaccctgtccggtctgcgccgccgcggctacacccccagcagcattttcacctttgtgcagcaggcaggcatttccaaggcggacagccttgtggatatgcgccagctggaagcggtcctgcgcgccgagcttgagctgggtgcacagcgtcggattgccgtgctcgatcccatcaagctgatcatcgacaactatcccgctgatcagtgtgagtacttcgatctgcccaacaaccccaaccgcgacgccaatgacacctccacccgcccggcggccttcacccgggagctttggatcgaccgcagcgacttctttgaggtcccgccgccgaagttcaagcgtcttaccattggcagcgaggtccgcctgatgggtgcttacctggtacgctgcaccggcgttgacaaggacgctgacggcaatatcgttgcggttcatgccgaggccgatcttgagacccgcaacggcaatcctgccgatggccgcaaagttcgcggcaccatccactggctcagctgcgaacactgcatcgacgcagaagtccgtctgtacgacaagctgtttaccgagcagaatatggtcgtacttcctgacggcgccgactttaaggattacctcaatccggaaagcgttgtctccgtcccccatgccaagctggaagaatgcctgaaagacgccaaacccggcgatcgattccagttcgtccgtaccggctacttcacccccgacagccgtgttcccggcgtgtacaaccgtattgtcacgctgaaagacagcttcaagctgtaatgcaatcgtaaaatcaaagagcccgcttctcattcgatcggcgaatgaagaagcgggctctttttattctttctttttcgattgttcaggacatctgtgccgcagcctgctgcgccgcaatccggcgcttgagccagccgccggcaaaataatatccgataaagcacagcgaagccggaatccaggaaatcgggtagctgcactccaccatccatacagccggatgcatgggaacgatcaccagcagccataccagacgcagcccgcagaccaggaagcaggttatgacagtggggactgtcacatctccgcagccgcgcagcgttccggacaggatctcgatacagatataagtgatgtacatgggcgccagaacatgaagcatctcaacaccctgctgcagaactgcttcgtccggggtaaagacccggaacagcggctccgccgccagataaagcgccaggctgaggcaaacggtaatgccagccgtgattccgaggcagatggacgttccctttttcacacggtcatacaaacctgcgccaaaattctgtcccgcaaaagtcgtgaccgaaataccaagggagttgacggtcatccagaacaggaaatcgatcttgccatacacgccccacgcagcgactgccgtcgtgccgaagccgttgatactgctttggatcatgatattgctcacactgtacagtgcactctgtgccgccgtgggcaggccgatacgacagatatctgccagagcggcaggttccatgcgcagctctttccagtccagatgccagggcatctccggcgcgccggtcaggcaacgcagcgtcagcaccgcactggcaatctgactcaaaaccgtggctatggcggcgccggcgactccccagcccagccccgcaacaaataccaggtcaaacacaatattgacgatggatgcaatgatcaggaaatacagcggacgcttggagtctcccaccgcacgcagaatgctggtgcccatattatagagcatctgcggcaccatacctagaaagtagatccgcaggtacaggaccgcatcgtccagcacatcggcaggagtgttcatccaggaaagcgccgcccttgctcccgcaattccaagcaccatcagcagcacgccgcccgcaatggccaacgcaatggatgtatgcacctgaagggaaatcctgcgggtatctctggcgccgaaactttgggccaccacaacactggcgccgctgcacaatccggtaaaaataccaatcagaagctgtgtcagcgctccggtagcgccgaccgcggccagcgcctgtgttcccacacagttgccgacaatcagagtgtcggccgtattatacaactgctgaaaaaaggttccgaaccagaccggcagaaaaaacaagatcaactgggtagggatgttccccgtcaaaatatccccctggcgaaacgcccgccgcataaaaagcatcctccttttcttcccgtccccgcgctttgcgacccgcgcggattcacttgcctagcggctattttatgctataatggcagtattgtaaagggggccgacaatgaatttttctcttggctgtttgtggcagccctgccgtgacggagcaaggctgctgaaagtctatggggataccccgtgccccgtcgtccccgggcaaatcgaaggctttcccgttattgagattggcccttactgctttgcggaaaaagaaccgcaggcggggcagctttcccttccggatggcatgtccaaagacgcgctccattgcatctgcggcaattttgtggaggagatcaccctccccgacagcgtgaccgtgctggacagcgccgcgttctataactgccgcagtctgcggcggctggaacttggccccaaatgtgagtcactgggcagtgatatatttacaaactgccgcagccttacctgcctttctctgcgctgctcccctgcttccccttccgggctcaaaaagctgatcggcagcatcagcgcggacatctccgtggaattcatcgaaaaccagcagacgcaagcccgtctgtttttcccggaatactttgaatatctggacgaaaacactcccgcacatattttcaatcatagcatcgaaggagaaggctaccgctatcgccagtgctttgacggcgcagtctttcatgcggctgaatatgacgcggcctttgcgcaggcctgtgtcggagaacccaccgagaagctttgccgcatcgccctggaacggctgcgttatccttatgccctttcggaagatgccaaagaagcgtatctttcgtatctgcgcagtcacacggacacgctggtctctccatatatcaatacccgggatttggacgcgctgagatttatcagccgcctggatgttttggatcacgccgcccgtgcggcagccgccgaagcctgcgggcgggtagggtttggcgcaggagctgccctatttttgagcagcggaaccgccaaacggactgcaaagcaatacagttttgacgacctttgatggtccgggaattcaaaaggaaggaggaatcacctttgcccgacaaacacatccagacccaggccgaatgggaaaataccatggcccggaaagtctttgctgcggtgcgcggagatctctaccttgccttgccatatatgaattccgccctctgcgctcttgttcccgtatccaaacaggaactgcgaagttttgccacggacggcgccggtctttactttgccgatgcctggctgctgcgcatttaccgcagcaaccgcaggtatctcccgcgcgctttcctgcacagtatcctgcactgcgtattccggcatctgtggctgcgcggcaatcgcgaccccgccatctggaacatcgcctgcgacatctgtgtcgagaatgttctggaccgcctggacaacgatctgcttcgtcgcccggtaggctggctgcgtcaaatgacttacacagaccttgcaaagtcctgccgcattttgagcgtcggcccggtttaccgggagctttgcactcgggacgccgcggagctgacccgtttacagcacgagttttactgtgatgaccacggtttctggcccaaggaccctgactccccctctgcgcagatgcagggcaagagatgggaacagcttggacgggaaacgcagctttccatgcagcagggcggcacccgcgcttccgatgcagaagctgcgtccgctcttgccgcacaggtccaggccgggcgcgggagaaagctttaccgtgacttcctgcggcgcttttccgtctggcgggaagaaccccatcttgatctggacgagtttgatctggggtattacagttacggccttcgcacttacggcaatatgccactgattgagccgctggagacccgggaaagcaaacgtgtccgcgatcttgccattgttcttgataccagcgaatccacctccggcgatcttgtgaaagcctttttgaaagagactttctctattttgcggaccagcgaaaccttttttgcccggtgccgcattcttgtcctgcaatgcgacgatgccgtccggagcgaaacccttttatccgatttgaatgcgttggaccggtacgccgaccgttttattctgaaaggcggcggcgggacagacttccggcctgcttttcagcggatcgaagaactgcgagtccaaggcacgctgcgcaacttgcagggtgttttgtatttcaccgacggcaagggaatctatccttcccggcgtccgccctacgatgtggcatttctgtttctggacactggagaacccgtgcccgatgtaccgccctgggccatgcgcctcatgctggaaccggacgagttcatcgcaccgcaggcgcccaaactccccgattttgactttgccgcagccccggaagatctgcctcagctgtaacaatactcccgcaaacattgtcaggaaggttgataaaccatggatatcaaaagagccaaacaggagattgaaaccaccgtccgggcatatcttgccaaagacgacggcgggaactaccgcatccccgccctgcgtcagcgcccgctgctgctgatgggccctccgggtgtaggcaaaacccagatcgtggagcaggcggcccgcagctgcggcatcgccctggtagcctataccattacccatcacacccgccaaagtgcggttggtctgccttttatccgtcagcgcgacatcgacggaaagacctgcagtgtaaccgaatataccatgagcgagatcatcgccagtatctacaccaagatggaacagaccggcctgcggcaaggcattctgttcattgatgagatcaactgtgtatccgagacgctggcccccaccatgctccagtttttgcagtacaagacttttggcaatcaggccattcccgaaggctgggtcattgtcgcggcaggcaaccctcctgagtataataaatccgtgcgtgagttcgacctggtcacccttgaccgtgtccgccgcatcgacgtggagcccaacttgtctgtctggcaggaatatgcccgcgcacagcgcctgcacccggcggtgctggcatatctggaactgcgcccccagcatttttacaaggtggaacaggacgtggacggcattcagtttgttactgcccgcggatgggaggatctgtccgccatgctcgtcacctgcgacgcgctggatctgcctgtggatgaagccgttattggagaatatctgcgtcatcccgacgtaatgcgggactttgccgcctattgggcactgtacaaaaaataccgcagcgactacggcatcgaggacatcctgcgcggacgtccctccgacaaagtcgtggcccgcgctttggatgccgcttttgatgagcgactgtcccttgtcagcctgctgctggccggtcttaacgtgcgtttctcgtcagcaagagagaacgacgccgtgaccgacgcctgctatcagcagttgcggaccttcaagcgtgcgttgtcccagcctgaccaacaggaggactcccccactgctattcttgcccgtcagtgtgccgacgcacaagcccgtctggatcgcgaaaaagctgccggacgcatgacgccttatgaattgggcattcatcgccgtgccgtttccctgctgcaaaattggtctgaaaccatttctcaggaatttgatgccgatgaagctttcgatgccgtgcgtgcaggctttaaccagcaagtccgcaagcgtgaggactcggtggctgccgcatccgatgcgctggaatttgcatttgattttatggagcgctgctttgcccaacagcaggaaatggtcgtttttgtcaacgagctggcgcttggtcccgactctgcgcccttcctcgccgaaaacgaatgcgaacgttttgatatgtacagccgcacactgctgcttgattccaatcatgatgagctcttggcagagcttcagcgtgacgatatccgcagcaacgaacacagcgcagatttctgacaacatataaataacccccggcagttttcgttaggagctgccgggggttatttattgcatttcttttttcaagacacagcaggttctccgagcggacaattcatatttcggagttcggatttttacaagtgtatttcctgatttcctattgacaaaacgcattgggcgtgtattattgtattagatgcttaatacaataatacggaaaaatttctaataagaaggaggacgacttttgaattggaatattactgccgggcgtcctgtctatgtacagctgatcgaacagctggaacttgccatcgtcaccggtgattatccccttggcagccgcattcccccggtgcgggaacttgccgcggaagccggagtcaatcccaacaccatgcagcgggcccttcaggagctcgaaacgcggggattgctgcaaaccatgcgcacatccggacgcatcgtgagtgccgacgaacagacactgcatgacctgcggcagaaacgcgccgaggtttgtctttctgattttttgcttcagatgcagaaactgggctactcccgtcaggagacccttgatctgcttcagcaggcagattttccctcggaaaaccggtaaaggaggagttttgatgcaccctatttttgaaacacgcaaactaagcaagcaatataagcagatccatgccttaaataatctggaccttgttctgacatccgggaaaatggtcgggcttttgggtcccaatggaagcggcaaaaccacgttgctgaaaatcagtgccggacttctgaccccgagcagcggatgcgttctgattgacggccaggcgccgggaaccgagaccaaaaagatcgtctcctacctgcccgaccgcatgtcgctccccaccgaattgactgccgcggataccatcgccatgtatggtgactttttccaggatttcgacaaagaaaaagcgcacgacatgctgaaagccctgaagctatcccctgcgcagcgcatcggtaccatgagcaaaggcactcaggaaaaatttcagatctgcctgacgatgagccgttcggcaaagctgtatcttctagatgagcctcttggcggcgtggaccctgcggcccgggaatatatcctctccaccattctgcgcaattacagcgaaaactctacggttctgttctcgacgcatctgatcggcgacattgaaaaggccctagacgaagtcgtgatcttgcgcaatggttcgctgattttacacgacagcgtcgatcatctgcgggaagaaaaaggcatgagcgtcgacgaatattttaaggaggtatttcgatgctgagcaaacttctgaaatatgaataccgcgccacggcaaagattctgctgcccctctatctgggtgtcctttttgtcatcatgctcaatgttctggtgttccgtatcggcactcttttccctgttcttggttccggtacaccgtacacagtcattcaggttttgctgacttttctctgcggtctcggccttttggcggtccttgctgtaagcttttttatgggcatccagcgtttttacagccttttgggtacacggggatatttgatgttcagtctgcccgtaacgaccaatcagttgatcgcatccaaattgatctgcgccgtaagctggatgactgccagtttcctcctttgcaacattcttttccgtatgattggcctgcccacggagggcagcgacctggtaattgctcctatggaagaaacgctgcctttgtttgtcagcctctgccttgcagttttgtctatgttctgctgtgcgttcctgtttttctatttttgcattgccatcggcggtcaatggccgcagaaccggctgcttgccaccgtagtctgctattttgtgatttcgttccttttgcagctcctgatgatcgtcggaatgatggtccttggcacaattatctatttcagcggcatagaggcattcgggaatgccacacaggcaatcgcaaatgcggtgacatcataccagctgatcagcatcattttactgtgcatgttcttgttttttgccgtgggaagtgttattctgtggttactgatccgccactttctcactcgaaaactcaatcttgcctgaaccattggatcaaagcataggagacttttatggaaaaaagacagtacgtctgccccaaatgcggctgtaccgaatacgaagccgaccagctgcaggctaccggcggcaactttgccaagcttttcgatatccagaataagaagttcatcacggtaagctgctgcaactgcggatataccgaactgtaccgccagaccggcggtgaaggctgggatattctggacttctttatgggcggctgacccttttctttgcgcaagagtttgcccggtgctttgcaaagcaccgggcaaactgctataataaggcattataactctaaggcatctgcggaggacccgctctttcccggtgccaaaatcaaagaggagcgctttctatgctgctggccgtcgacatcggcaactccaatatctgcattggcattctggaaaaagacgaggtacgcttcacaacccggatggtcacccgtccccgctgcactgccgacgagtacacggcagagctgaaatttctactgcggcgtctgaatgttgacccgtcccgggccgacggggccattgtgtgcagcgttgtgcccggcctgacacgcccccttgccgaggcatgccgccgcctgaccgggctggagcccttgctggtcagcactgagttggataccggactcataatggatgtggacgagcctgcacgcgtggggcaggatcgccttgcagatgccgctgccgccgccgaccgttatcccctgccctgcatgactgtcgacctgggcacagcaacgacctacaacgtcattggtgtgggcggcgttttcctggggggctttattgttcccggtgtccagaccagcctgcgtgcaatcagcgccggaactgcacagctccctccgattgcaccggaaacgccgggccatctgattggaaaaaacacggttgcctgtctgaacaacggcgctatgttcggcaccgcagccatgctggacggccttgccgaccgcgtggagaaagagctggggcagccgctgacggttgtcgccacaggcgggcttgcgccttatatcatgccctgctgccggcgcaaggtccactatgacgccgatctgttgtttcacggtctggcactgttgtatcgcaaaaaccatcgcgatgttccttaaccaaagtggtcacatcgtttccctgtaaaatcattttccgaatatgcaaaaagagcctgcttcatcatcggatgaagcaggctctttgtaattgcttagttattgggagagttcttcagaatgacgtcgtggctgccgccttccacaatgctggtggaggaaacgaccgtcaggcgagctttctgctgcagttcctcaatggagagggcgccgcagttgcacatggtgctgcggaccttatacagcgtggtctgcacgccatctgccagagggccggcgtaaggcacgtagctgtccacgccttcctcgaagctgagcttctgggcgccgcccagatcataacgctgccagttgcgggcgcggttggaaccttcgccccaatactccttgacatagttgccgccgacacgcagtttgttggtcgggctctcgtcaaaacgagcaaagtagcggcccagcatcacaaagtcggcgcccatagccagggccagcgtaatgtgatagtcgtgaacaatgccgccgtcagagcagatggggacatagataccggtctgctcgtaatactcgtcacgagccttggcgacctcgatgacagcagtcgcctgaccacggccgatgcccttggtctcgcgggtaatgcagatggaaccgccgccgatgccgatcttgacgaagtcagcgccagccttggccaggaagaggaagccctcacggtcaacaacgttaccggcaccgaccttcaccttgtcgccgtaacgctcgcgaatccaggacagggtgcgggcctgccattcagagaagccctccgaagagtcaatgcacagaacgtccacaccggcatccaccagagcgggaacgcgctcggcatagtcacgggtgttgatgcccgcgcccacgacgtagctcttgttggcgtccagcagctcgttgacgttttccttgtggctgtcgtaatccttacggaaaaccatgtactgcagatgaccttcctcatccagcagcggcagcgtgttgatcttgttgtcccagataatatcgttgcagtcatgcaggctggtggtagccggagcagtaaccagcttttccagcggagtcatgaactccgtgactttcagatccgtgctcatgcgggacaggcggtagtcgcgggacgcaaccaggcccagcagtttgccgtgagcggtgccgtcatcggtgatggcaaccgtggaatgaccggtacggactttcaggtccagcacatcggccagggtcgcctccggcggcaggttggagtcgctggtgacaaagccctttttgtacgccttgacccggcggaccatattggcttcctcctgaatgctctgggaaccgtagatgaacgaaatgccgccctgcttggccagagcaatggccagattctcaccggaaaccgactgcataatggccgaaaccatcggaatattcatggaaagagggcactcctcctcccctttgcgatacttcaccagcggtgtcttgaggctgacacggtcagggacgcattccgaagaggaatagcccggaaccagaagatattcgccaaacgtgcgggaaggttcagaaaaatagtacgccatattcttctccttttcattctgagatcgaccgtctcggcaggcggcacgtcatggataaaaccctattgcttagaagaaattgtaccatattcgtgtacaaaacacaaaattctgcgcgtagaatcttttttcttctttgacgccaaagttgtgaaaactgccgtacccacgcaaggaatagtattactaactcttttccttttccaatcgagtgccttttatcgcatatggttcttatatttgtatgttgccctgcctgttttttccctttatcaatatttgaaacggaattttttgtcttcaaaaaatggaaactcggacaaatatcgatcttttcagtaggttctgggctccgcggaaagaaaattacaatttttttacaaaaagctattgacagatggtgtcaaaagggttacaatttagttgcaagttaattacaaccactttttcatgtgttcttctcctcctttcagaaatccccgcctttccctcaggcggggatttcgtcgtgtataccctccgtttccactacaacaaaccggcgccggaaatcattccggcgccggttcatatcatatagaaagcatctcggtcgatcgcaaagcccccggcccaatcgtcaatcgatcccgggattttcctcctgagaaatcggcctcatggtgatattggcctcaaaacagcaggtatcttcatgccatccgctgaagaaccatttgttttcttccatctgtgcacggcagacgcggaagctctgacccagcgggatctctttgtggtaatagatcaaaaagtcttccaccgtttgggttcggatcacttccagaggaagcaagttgaagataatatccgcatagcgggtattgttcagatgcccgttcatatcgcacagtgagtaatccgcccgcagggtcgcgaccgtctcagcatcggtcagctttttgatgcgcatgggaagcgagcgcggcagtttttccgcccaaggatgattgctgaactcctccggatgattgcgcagaatggtacgcttgtctgtatcgatcaagacccaccggctgtctacaaaaacgcattcctcaccctgctcatcatagatgcaggtcagacgtttattcactgcatgatgcaccgcttccggctgcgtcaccagggtcaggcgttcatccacccgcggcaatcgggccacatgaaacgccagacgagccagaaggtaagcggtgtgagttctggcgtataccgagtcgtcaatgcccagggcggtacactgtgccgttgcgatctgctgtgcatagcgcaggatgctgccgggctggatatttcccagaaagtctccgtcatatcggtaaacaaaatagtcctgtttaaattcgtagggctgcagctgcatgagttcgccacctctttctgtccttgcatgcggcgttacttttacttctgttcctgttccggttcgccttcggccggttcttccggctgtgtctcgggccattccgccagcagctggccaagatcgatatgatagctcttgtcacagaactggcagtgaacttccgccgtggggtcctcctgacggagtttttccacttcgctcttgccaaggctgtacagcatccgcttgacgcggtcctcgctgcaatcacaaagatactctacatattcccggtccaggatatccggtgcaaagccctgcagtgccatattcagcatatcttcaatgcttttaccctcggacagcatcgtcgtgaccggcggcatagcggcaatgtttttctccagcgcagtgatttcctcctcggtagcaccgggaagcagctgcacaataaaaccgcccgcacactgtaccgtaagatcctggttgaccagaacgcccaaagcgcatacggtgggaacctgctcgctgattgcaaaataagaagtaatatcctccgcaatctcacccgaaaccagcggcacctgaccgatatatggttcccgcatacccagatcgcgaatcacgtccagggtgccgtcgcggccgactgcggttcccacatccagatgcccgtcactccggggcggcagttccacaacagggttctgaacatagcccttgacgttgccgctgccgtcagacacggccagcaggcggcctgcgggaccgccgcccttgatttgcagcgtgatggaatcctgacggcttttcagcatcatgcccatcatggatgctgccgtcagcaggcgtcccagtgctgccgtggtgacagcactggttttatggacccgctccatctcacgaacgatattggtggagtcaacgccgtagaaaacaactccgccattttctgaaattccccgcagcagattctcgcggcgaggcgttccttccattgtcattgcttttcctcctgggtgtatcgtttgacagcggtaaagatccaccgctggctttccggccgcagttcaccgaatgtttctccatcaactgcggcgcaaagagtaaaaccataccgatccagcacctgtttgacatactccagcgtataggtgtattcgcggaatttttcttccaccacctcgccggagggcaggtctgtgatctccagccgtatgtcaacacatcctgcagccggatcatagtggttataccattcgcagcgggcatcgggagcttctatggtatactccttgtctcccagcacagtttcgtgcttgtacggcgtgttcagatcaaaaacgaaaacgccgtccttttccatgaaaaaagcagtctgcctgactgctttttcaaattgctcggccgggccgatatgattgaaggtatcaaaggtggagaccgccgcgcgcacggtgccgtacagttccataccggtgatatcctggcacagcagcagcaaccggctgtgaatgcccagctcgtctgccttttcccgcagcacgctcagcatttcaggcgagccgtccacgccgatcacatcgtatccggcctggctgagcatcagcgtgagatcgccggtaccgcatcccaggtcgaccagaatgccatcctgcacgccgtgctcacagagctggccgtgaacatagcggaacagcgcctggtaatcggcttccccgttgaactcatcataaaaataggcaaattctccgtaagccatttcttatgcctccggtgcagtcaggcaggatgcaaagtagtcccgcagctccgaaacacccattccgttctccgcactggtcagaaaaaccttgcggcagccgtactccgccaggagctgctcgaattctgcaagtgctgcggcctgctggctctttttcagcttatcccctttggtcagagccgccacaaagggaatgccgtgataccgcagatattccagcatctgccggtcatcggcgctgggcgcatggcggctgtccagaagctgcaccagaaccgtaagattgcgatccgcctcaaaatagctgttgatcaaatcatcccagcgctggcgttccgcattggaaaccttggcgtagccgtaaccgggcaggtccacaaaatagacggtatccacacggtaaaagttgatagtcgccgtcttgcccggcgtcgcgctgacacgggccagattttttcgattgcacagcttgttgataaggctggacttgcccacgttggagcgtcccgaaaacacgaattcagggcggtcactctccggcagctgactggacaggccataggatgcctggaattcactcaaattataattcatgatgatcctctgatttttatattgcttgcacagagctcacattaccggtgccgaacctttggaggaggacgggtccgccgcaatcagctgggtagccggcggcaccggatgcggttcatgctgaccggcgtgggcgggctgaatcaaagcctcgctcagcacctcggacaggtcggagaccggaataaaacggactgcctttttgacctcggagtccacatcatgcaggtcggagacgttgcctttggggatcagaatggtcttgatcccctcgctgaacgctgccatgctcttttccttcaaaccgccgatgggtagaacgttgccgtgcagcgtgatctcgccggtcatggcaatatcacagcggaccggcacgcccgacagcgccgagatcagcgccgtcgtaagcgtcacaccggcagaaggtccgtctttcgggacggctccctcgggcgcatggatgtgaacgtcggaattcttgatacgctcctgcgaaatgttgtactcatccgcatggacccgcgcataagtcaccgcaaggcgggcgctttccttcatcacatcgcccaggctgccggtcagctcgatcttgccgcttccttctggaatcacggcaacttccacaggcagcatctcgccgcccacgctggtccaagcaagtccgttagcaatgcccaccgcgttggcccgggaaataaaggacggtttgaccttttcgggaccaagcagcgtcttgaccattgcggcagacacactgatcttttccgtctcccctgccgcgatctttttggcgcacttgcgcagcacatcggtgatggtgcgctcaagattacgcacaccggcctcacgggtataaccatccaaaatcgcatacagcgcaccatttgtcagcgtcacacggcccgtcaggccgttatttttgagctgtttgggcagcagatgctttttggcaatattgaatttctcggtacgggtataactggacagctcgatcacatccatacggtccaaaagcggcgcgggaatggtctccgcgttatttgccgtggtgatgaacagaacctcgctcaagtcaaaggggatgtccagatagttgtccttgaaggtcttgttctgttccggatcgagcacttccagcagcgcgctggaaggatctcccttatagtctgccgccagcttgtcgatctcatccagcaggatcagagggttggaagattttgcggtagtgaccgcaccgatgatccggcccggcatggcaccgatgtaggtgcggcggtggccgcggatctccgcctcgtcatgtacgccgcccaggctcatgcgggcaaatttgcgtcccatgcactcggcaatggagtgcgcaatggaagtcttgcccacacccggagggccaaccaggcagacgatctgtcccttgacctcggtattcagtttgcggacagccagcagttcgagaatgcgctctttgaccttttccagaccgtaatgctctttatccagaaccttgcgggcgtgttcctggtccagattgtcctcggtggtgacatgccagggcagcgccagacaggtatccagatagctgcggatcacgctggtttcggccgcattgccctgcattcgggccagacggtcgcattccttgagaagtttttcctcactctcaggctccagcttgagggcaaggatcttctggcggtaggtgtccgcctcggcacgcgtatcctcgctatcgcccagctcctcactgatggcgtgcatctgctcacgcagatagtattcccgctgccccttgtccatctggacgttgacgcggtcgtcgatgtccttctcaatggagaggatgtcgcattcccggtgcagcaggaccagaagtttttccagccggcccagcagggtggattcgttgaggatggtctgtttatcctgatacttgaacagcagattggccggcatatactcgctcaggtacagcgggctgtcggacgaaaggatgttatagaccacatccttggaaatctgcgggctgtaagagagatactcctcaaagcactctttcaggctgcggaccagtgcctccacctgggtacgcttgtcggtattgataccgcgtacgggagcgctgcgaaccacagcctgcaggtatttgccggagccatccagctctagcagacgggcacggctcttgccctccaccagcaccttgacaaggtcgtcagagacacgcagcacctgcttgatctccgccacgacaccataggagtaaagatccttcaggttcggctcctccgtgtcggtctcacgctgggcaaccagaaaaacgctgctgttgctgtgcatggcagcgtcgatggcagcaatggattttgcgcggcccacctcgaaatgtaccacattgttcgggaacaccaccagcccacgcagcgcgatggccggcagatgcgaaacattgcgggcgattttaattttcactttcttttcggacattgttttcctccgtcggtcaggcttgtatgcccgatcctgcgcgatgatattttggtattgctttgccgctgttcccaagcactaaggtctttgcaccgccattccggcaggctcaaggttccggggcagcaaaacagtaagatttttagggcagatttcggcgtgcagcaccttgcggggcgcacactctccgtccagggtgacgatcagcggattttttcccaggttttccagcgtaacgcttttcacacggcaaaacgtcatgtaaggccggaagtccggctggacctgtccgtcttcggtcaagtgcagaccgtctttatactttgccagaaatccggggattttaaggcgcggaatcgttcgtaccaggaccacatccagccagccgtcgtccatcattgcatacggcgcagcggaatatcctccgccgtaaacccggccgttgcaaatggcagccatcaggtattcccctacctgttcgcgcccatccagaacgacccgcaggcggcttgtcagcggcccgaaaaagacttccacaatggacagtttataggccatgctcccgccgcagccgggcagccgtttgaatttggggattccatatgcaacttttgcatccagcccggcggcgcagatggccgcactgtaaccatattccgtacggatggtatcaatgcggcacggggttgcttccaactgcgcctgaatatccagaaacgcttcctgcgaaccgaagttccggacaaaatcattgccgctgccgcacgggacacagccgaccataacccagggcttccctgcggcgacctgtatcacctcgttcagcgttccgtcaccgccgcacgcatagacagccaccggctctcccgtatcggcacagcactcggcgatttcaccggcgtgcccggcgtgagtagtcaggagaacctcaacgggatcaggacacgtttttaccgccgcggcaatcatcgggcgcagcaaatcagccgaatttttcggcccggccaccggattgataataaagatccgtttcatgcccgccctctttcccgcgtcaatcattccgcgtgattttatcagggtcagaaacgctttacgccgcagcataaaaagccgctttttcccctgattataaaaatacatattacattttatcttctttcttttcaaatggcaagcggtctggataagatgttacaaacaagacacaataacggtatcgaaaaaatgattttttgcagaaaacgccggaggtatttccatgaaagtggcagcggaaattttgcaggtggcattgatgagtgtcctctcgcttgtggtactgtttatcgtgacaaggctgggcggcaagcgacagattgcccagatgagtatgttcgattacgtcaacagcattaccatcggttccattgccgccgaaatggccaccaaccttgaagaatggtacaaacctatgaccggcattattgtatatggtgtcattgcctggctggttcactacgcagcgtgcaaagggatcaaggcacggcttctggtatcggggcagtccattgttcttatggaaaacggcgtgatttacaaacacgagctcaagcgtgcctccatcgacatcaatgagtttcttgcccaaagccgtattgcaggatattttgatctgaaccaggtgcaaagcgctgttctggagaccaacggccacatcagtttcctgcccaaggcgcagtatagccctgtcaccaccggcgacatgaacctgaagcatcccgaggtgtccctctggaccgatctgattctggacggagagatcatgcgtgaaaatttaagtcgaatcgggcgtgacgaaacctggctggtcaagcagctggcacaaggcgggttcggttctcccggcgaagttttctatgctgcctgtgataatggcagcggcttttttgcctgtccgagcaaatgaaagaagtccggctttgcagcagataccctgccgcaagaccggacttttcctttttatctttttatgaagatatgcaagacaaaacagcttcggtcattcgttttctgcggccccagcttttttgccgaacctggcattctggacaaagtcgatcagccaggaagagaccgtgactgtcaccaccgaaaacaaaatctggcgcagcggaatatagcttaaagaaagcgccagtatcgtaaggtctgtggcaaggtaggacttggaaagccgccagccgctcactttggagattgccagtgccaaagcatcatcaccgccgctggaaccgccttgacggacgatcaggccaacacctatccccacaaaacagcccccaagcagagccgccatcaacggcattccagaaagatccgggagcacaggcggccactgttcccacaggaaaaagaatccggatacgctcagggtagaaacaatggagattttgatgaatctcgcccccagatggcgaaaagccagggcgtagcaggcaatatccaaaaccggcgtcacctttgaggacgggattccaaaccaatggttgatcagcagcatcatccccaggacgccgccctccgtgatattaacctgccgatgaatattgtaaagaccaaaggaagtcagcgcagcgcccaccaggatccagaacaccttacgggccgacaatcccgccgacagacggccccacacttttcgcatcatagattgcaatcgatatattatcacaagttcaaacgctccccatctctttttttatagcataaactctggtataatactaaggtcaagagttttttgaatcgcccgatcccagaggtgccattttatgaaagaccgttacaaaatcggagagatctccaagttatatggcatcggtgttgattctctgcggtattacgaaaagattggtgccttgcaccctcaccgggatgaaaacaactaccgtctgtacagtctaaaagacatctataaactcagcattatccgggatctgcttggcctggaattttccatgtcacagatcaagcaatatcttgacgatcaaacgctggacagcaccgccgaactgctctcccatgaggaagcagttctggatgaaaagctgcgccgtctgaatgagcagaaagccattctccacaaacggcgccaggatcttgaacggattcgcaaagaacagccggggctcatcacaataaaaacgttacctcagcgcagatgcgtacagctcagtgagcacatcacccgtgacgaggaaatggatttcgtcatcaaaaagctacatcgcaaatatgaaacgcagctgcggtcctttgggacgcagacgatcggcgcctgcttttccatggacgactggatgcaaggcatttccaacgtttatgaatcggtgttttttgtagtggactcggacaccgccgactgtgactttctgctgcctgccggtgactatctttgctgctgctatcagggtccgtatgaacaaaacggcgaccgtttgcgagagctgcttttatatgcaaaagaaaacggcctgactgtttccggcacaccctttgaaatttatcgaatcgacaacagggatacttccctgccccaggaattcctgaccgaaattcaggtatttgtcacaacgggaaacacgttgtgatcttcatggcagcgcggtgatcacctgtaccgccgcccgctctaaagcgttttttcactttacaggagggagccaaccatgtccgcttgtatgacaggcttttccggtgttctttgcggacgccgctatgagaaagaactggagacccatttccgagattgccttttgttttacctcgacggcaaaatccgatttgagcgatactgctatggcgaggctgccggtctcgtctttggcgtgtgggcacgcggctttgatgaagaggacaatattctgtgggacaacgttcccgactttgaaatggcacacaaagccctcccccatcgattgaccgatgtagaagaaaacggcaatgccctgcaattcgacggggctcgcaagcgctatctctttacagaagaattttcttccgacaaagccaacggttacggaacattccggacgttgcttctgcgccgccgtttcggcaagaaacgggattgattttcttccccggcatgaagaagtaagttccctgccatttcttctgaacacagcaaaatccgccgttcggatatccctcaataaataaaaaactatttttttactttttttgtgtgcagggtattgacttttgcctggtctgtatgatattattgctaacgcagcacgccccaggcaagaacaaccataggcgcccgtagctcagctggatagagcaactgccttctaagcagtgggccgggggttcgagtcccttcgggcgcaccttttcatgtggtgcctatagcgtagatggcctaacgcgccagattgtggctctggagatcgagggttcgaatccctctaggcaccccaccaaagaccgtacagtattttttaatgctgcgcggtctttttcacaatgggccgtcgccaagcggtaaggcagaggactttgactcctccatccgtcggttcaaatccggccggcccaaccaaaacgcccgaacgtatttcacgttcgggcgttttcgtttttatcataagttccttctggcgaatatctctctggaacgagcaggcagggtccaatgcttttccatcggtttattctcagcagttatcaggctgcctgctttctgctcgcaaggcattcctgtaccgcctggctcgtcgcccttcttaatagccgtactttctttgtttcacgatcaagaacacgaccgttacgaccacagccatcatttccgcaaccacaatggaaagccagatgccatcgatcccccataccagcggaagcagcaacactgcgatcacctgaagaaccagcgttctcaggaaagagatcagtgcagaggtcaggccgtcattgagagcagtaaaaaaggaggagccgaatatcgcaaatccggagaacaagaaggaaaacgaataaatcacaaatcctcttaaagtaatctccatcaattcactgtcgtatcccacaaacatcctggccagcggtttggcgaggagctccgccgacaaaaacattgccaccgcaaatactgcgatgatccaaaggcttctcttcagcaaattgcgcagctcttcctcgtttcgcccgccataatggtagctgacaatgggagcgctcccgacggcatatcccagaaatgcagcctggaagatcatattcacatacatcaaaactccatatgccgcaatgccgttctgccccgcataatgcagcagctgaacattgtacagcatcgccactagggacatggaaatattggacatcaactccgacgaaccgttggcacacaccttcagcatggtcctgccgtggaactttgctcttgtcaggcggagtttactggtattcggcctcacaaaatagatcagcggcaagattcctccgacacactggctcaatgccgttgccgcagctgcacccagaacgccccaggaaaagcctgccacaaacaccgcatccagcacgacattggtcagacccgccgcaatggtaacataaagccccagcttgggcttttccgccgttacaaacaggcattggaactcatattgaagcacataggcagggattgctgtcaaaatcacacggccataggcgatgctgtcagtgagcatctggccttccgcccccaaagctcttgccgcgggttccagaaaaatatgtcccagaacagccagaatcaagccgcacaaacaagaaaaccacaccaccatggaaaagagccgcacaaacaagaaaaccacaccaccatggaaaagatctgattggcttttttcagatctccttcccccatggttttggcgatcagtgctccgccgccggttcccatcataaagccgacacatcccaaaatcagcaaaaaaggcatgatgaaattgaccgccgcaaaggcagtcttgcccacaaaattagaaacaaaaaagccgtcaaccacaccatagatggaagtaaacaccagcatcacaatagaaggcatggtgaaccgcaaaaggctgcgataggtaaagtggtcggagagacgaataacctttttcatagcaacaaatcaaattcctcgtacatcaatgtaggccgtatcaaaactgttctaccttttcctgcaaatcgcgaagaaatttttccgtcagtgaaagataattcttgacgtcctgtcgatcccaggattgcaaaatctcattttccatttcgatgattcgcatggcggttcggtcggcaaattgtttgcctgcatcggtcaggcacacattttttgtctttttatctgctgcctccagatacacaacgccatcgttttccagcttgcggagtgctgaatttacagtctgcttgctcaaaccagtttgcctgcaaatggcatggatcgggcatttccctccggcatcacaaatcgtatacagaatgttgcttacgctgtcagaaaccccaagttttaccgatgcgtcgtgatatgctgcctgcaattcccccagcagataattgaatcttttcaattctgaagccacatgcatcgacattcttgtcaccatccccatcaaaaaatagtccgatttcgtaccagcatagtagtacgaaatcggactattgtcaagccttatattatttactgggaaagtctcatcttgtggctgatttctccgctcagtcaatggattctttcagctttatgtgactgtcaaacagtaccacttcaggcgggactgtatggccggtaatgtattgaaacagaaccatgatagcccgatgaccctgctcttccggtgactgggtgattgccgcatcaatgcttccattcagcagcagatcccgaatttccggggacaggtcataaaagaccgcatgtttgatctgggtcctatcctgcaatacaaactgcgcggattttgcattgccgcagtagatcagcgaatcaatttccgggtgcaaccgtacctgctgagatatcaattccgcatccttctcggtattgttggtcagctctaccagattgaccagctccatgggacacgccgggtttctgataaaatccagaacgccatcttttctcaaatggttgcccagcatccggtaggacggcatacacgccaagacgcggctccccggccctgccagatactgcaaaaggctggcgccgatcctgccggaacgatagtaatcacagtggatgctgcacaggcaggtaggctccggcaaaaacgccgtcaaaaagacgacgggaaaaccgctttcatgcagtctggccacacgcgcaatgacagcaggtgcatcaatgggaacgattgccaaagcgcttgccccgtctgccagtgcctgatcgatcagcgcgacctgtgcctctgcatcaaagtccgggcagggataaatctgagtctcgatcccatagtccagaatctcatttgctgcactgcgtacccctgccattacggtatcataaaagtcgtttccctggatatgcagcacaacggcaatcttatattttctgctccgattgaccagtcccttggctacaatgttgggacgatagtgcatctcctttgcaaccttgcgcaccttctccgccacttcggggttgatgcgtccctttcctttcagagcgcgctccaccgtgccgattgaaacgccgcaggctgcagcaatatcttttagtgtcgttgccatgatttcccgcctttgtgtagtacctgttctggtttttattataagcaagggaaaaagttttgtcaaaagcttccaattgcaatttcattggtaattttcgctataatatagccaaaagaattgtatacaaatacaaaaatgtagtcattttgcaaaaatatattgacattgctcccccgcggtgcaaaaatgaacgcaagatgcgttaacgttgacgcaaaataagttgaagacttgcacaacagcaaaaaggagtagaaacttatgaaaaagcatgatcattctttccgcaggatcacggctctggctaccgcaggcgttatgtgcgcagcgctgttcgccggatgcggcaagaccccctcctcgggcgaaagctcctcctccggtggcggatatgatgttctgaatgtcggcaccatggcgctgacctgcggcattcctgttctctatgcacaggagcaggggtattttgaggaagccggcctgaacgtcaacatcgaaatgttcgccaccggcgcccccatcaacgaggcgatcgccgcaaatgagcttgacattgctgtttcgggctttgcctcggtctactccctggccaacgccgactgcacctggctggccgacgtaaacaccaccggcggcatgggtctgtttgtccgtgccgacagccctcttgcccaggctgccactcagaacggcatgatcggcgacaccgaattgatccgcggccttgaagttctggaacccctgggaactgcggttcagtacatgacggaatcctacgccgctgctttcggcctgaccccgggcgatattcatcaggtcaacatggaatacgcttctgcctatcaggctttcaccaccggtgaaggcgacgcgatggccgccaatcctccctactcctaccagctggcagaccagggttatgtagaggtcaccacttttgaggctgcgaccggcgttgatatgtgcgacggctgcttcgcccgcaatgaagtcgttgagacccgttccgaagaagtccagctgtttgtggactgcctgctgaaagccatggatgacctgcaggatgacacgctgcgcagcgaatacacccgcaaagtctacgacgagaacgccgtgacctgctccgatgaggacctcgctcacgagatcgaagaccgcgcctatgtcggcaccgaagccgtcagcgccgccgactacaaactgggtgaagcttgggtcgccatcaccgacttcctggtttccgccgaaaagatcacggccgataacgctcccaacgttgccgcctccatcaatcccagctatatctccagctctgcaggggtaacggtcgccgcaggctgatctgatcgaaagtaagctgacgcaatgtgtgagtgacataagaaaataaagcttcggcaaacacggcaaagcattgcaaaatcgctgcaaagcggcaggtgcagggcaaacagatacagcatccctgaacggaatgccaaacccgatcacacagcagatgccgctttgcagcttattttcttgtgaaaccacgctaaaggacgaggttgtcaaaatgaaaaagaaaaaatcaaactattggtatttgtcgatcctttcgatcgtcgcctttctgctgatctggtggctgtgctgcgatgttctgaaaatgaccaaggaatccaccttgcccggtcctgtgaccatcgcggaaacctttatggaaaagatgaccagcacggcgcccgacggtgcaactctgccgcagcatatcatctcttccctccagattgccatgggcggctgggcattgggtgttgtcatcggaacgcccctcgggatctttatggcatggtataaaaaggtggaccttttcgcccgcccggtctttgacctgctgcgcccggtccccggcctggcctggatcccgctgatgatcattctgttcggtatcggcatcacttccaaaatcgtcaccgtatttttgtccgccttcgtcccctgcgtcctgaactcttataccggcattcgccagactcgtgacgttcatctgtgggtcggcaaaacctttggcgcaaccaacttccagatgctgcgctacatcgccattcccacggcgcttcctcttgtcatgaccggcatccgcgtagcactgggcgcctcctggacctgcatcgtggccgccgagatgctggcctcgaccaaaggcctgggatacatgatccagcaggcccgcggcatttaccgccccgacattattatttgcggcatgattgccatcggtatcatcggcgcactgttttccgctgttctgtccttgattgaaaatgccgttgtgaagggagtgcgcaaagaatgaacacacgtttccgatctgccaaaaatcatgaaaagttcatatgcgctgccatttccatctttgtattcctggtaatttggcagctggtcgtcagcttcaccaaggccggtcttgttcttgccggtcccgtagaaacactgagcgctttcttcgtcgctatcgtcgatcccatcggcacgcacaccatcgaggggcacatcctctggagcctttcccgtgttttggtcggccttgttctgggctctgcctgcggcatcatcctgggcattctgatgggctggttcaagccgttttccgcgctggtccgccccctgtttgagttgctgcgcccgattcctccgatcgcctggattcccctgtccatcgtctggtttggtctgggtgaagcctccaagtacttcctgatcttctactcggcattctgtgccgtcaccatgaacgcctattccggcgtgcgtcaggtcgatcccgaattgatgggcgccgctcgtatgctgggcgccagcaaccgtcaggtattcttcacaatcgtccttccctcctgtgttccccagatctttgctggcctgcagattgccgtaggcaccgcctgggcaaccgtggttgccgctgagatggtccgttcttctgagggtgtcggctgggtcatcatcaagggacaggacagcaacagtaccgttcagattctggtaggcatcgttgccatcggaatcgtcggctatatccttgccgtggcgatgcgcgccatcgaggcaaaactttgtaaatggagcgtgagaggaaaatgagcaaggatgtcatcgtttgccaaaatatcagcaagagtttcgatactgcccgcggcgttgtggatgtgatccgtaaaatcgatctgaacgtgcgcgaaaacgagctgttggtcctgttcggacccggacagtgcggcaaatccaccctgatcaactgcatggccgggctcgaaccggtctcgggcggcagcgtaacagttaacggaaacgttgttcatcgccctggtccggaccgcggcgtggtctatcagcggacggctttgttcccctggctgaccgttatgggcaacgtggaatacggcccccgtgtccgtggtgtccccaaaaaagaacgccgtgaactggcccagcactacattgaccttgtgggtctgaaaggctttgagaactcctatcccaaccagctgtccggcggtatgcagcagcgcgtaggcattgcgcgcgcctactgcaatgaacccgacgtccttttcatggatgagccttttggtcaccttgatgcacagacccgctatctgatgcaggaagacctgatgaagatctgggaaaaagaaaagcgtaccatcgtattcgtcaccaacaacattgaggaggccatctatctggccgaccgcattgttgtcctgactaactgccccacctccatcaagaaagaatacgagatcccccttccccgtccccgtgactatgttgatccggaattcctccgtctgcgtgaggagatcagttccgtcgtagataaagcgttgtaaggagtgtgaaccatggacaatcgcgacgttatcttgcatgtggatcacatgaccaaacgctttggtgatttgctggtcctcaatgacatttcctttgatgtccgcaaaggagaattcctctgcatcgtcggacctaccggctgcggaaaaaccacatttttgaactgcatcaccggcctgtatgagctttcggacggccagatccttgtcaacggcgagcccgttgataccagaaagcacaatatcgcctacatcttccaggaatactccacgatgtcctggctgaccgtagagcagaacgtcgctttcggcctgaagatcaaaaacgttcccaaggctgtcatcgacaaggaagtggcggaagttcttgagatggttggtctgaccaaatacaaagactattatccggtagagctgtccaccagcatgctgcagcgcgtggtcattgcccgcgcctttgccacaaagccggacattctgctgatggacgagccttatggccagctggatgtggaactgcgcttccgtctggaggatgaactgctgaacctgtggcgcaaactgggcacaacggtcattttcattacccataacattgaggaagccgtgtacctgagcgaaaacattctggtcctcaccaacaagccgaccagtatcaagcaggaactcaaaaatccgttgccccagccgcgtaatgtagtggctcccgaatttgtggagatccgcaataaagtaaccgatttgatcaaatggtggtaacaccgggaggaaacgcatgaaagcaatcatgctcatgtttgattccctgaacagggaaatgctggccccgtacggatgcgattggactcatacgcccaattttgcccgtctggccaaacatgcggtacgatttgaaaattgttatgccggcagcctcccctgtatgccggcacggcgggaactccataccggaagatacaatttcctgcaccgcagttggggaccgctggaaccttttgacgactccgttccgcagattttgaaaaaccggggcatctacacccatctggtatccgaccatattcattattgggaagatggcggtgcctcctatcacagccggtacagttcctgggaaatcgagcgcggccaggaaggcgacaagtggaagtgtctgccggaactccttgagcccgaggaaaatgcaaaactgcaaaaccgggatggagaatatttttattccacccgcgaccttcagcgccacgaccaggccaaccgttcctatatgtccaaggaacaggacaccagccttgcccggacattctccgacgggctggagtttctggacaaaaatggcagctgcgataactggtttttgcagatcgaatgtttcgatccccatgagccgttcttctcgccccaatgctaccaggcagagtatccccatgactacgatggtcctccgatggattggccgccgtatcatcacgtgaccgaggacgctgccacgcaggagcatctcaaacttcagtacgcttccctgctcagcatgtgcgatgcctacctgggccgtctgctggacaaaatggacgagttggacctctggaaagatacccttctgatcgtcaacaccgatcatggttatcttttgggtgagcatggctggtggagtaaagtcgtcatgccctgctatgacgaaattgttcatctgccgttgtttatccatgatcctcgcttccctgaagcggacggccaatgccgttcggagctggtccagactattgatctggccgcctctttgctggagttcttcggcatttctcccacgcccgatatgcagggcaaggctgtgcgccccgtcatcgagtcggatgaacaaatccgcgattacgttctgttcggtattcacggtgcacatgtcaatgtgtcggatggacggtacgtctatatgaaggcccctgctactgccgacaacgcacctctgaatgaatacacgctgatgccgatgcatatgcgaaacctgtttaacactgaggaactccgcgccgcccgttttgttgaggaaggattttcctttaccaaaggctgtcctgtgctgcagatccccaaaacagacagcagcaacggcgatttcagtgatcttttggtgcatggtaaaaacagcgagacggcacggcacatcgacaacaacagtctggtcaacgcagccaattttggcgacaaactgtttgatcttgctgccgatcccaggcaggaggacgaattgcaggactgcgaactggaagctcgcatggccaaccttctggtacgtgccatgaaagaaaacgacagcccgcaagagcagtatgcaagactcggccttcccatggaacgccccattaccgctgaggatatccggaagatgcatcagcgtgcggatgccgccatcctccccgagatcctgacggataaaaagtggtcaaaaggcggtgtcaatacttatcatgctctcatgcgttttattccgaaaaagcagcgggaaaccgtcgctggaattatggccgagaagctgtccgcagaccaccctgacgaaatccaggcctgtcatatccttgctcacctgaaagatgtggtttccccggaataccacgaaatgatctactactttgtagatctggccggacgtacaaagtaatggtaaggcgctccgcttataaaaattggttttggtcctgaaaacatcccggagatcgaggttccgcacctctgatctccgggatgttttttgccatctgcaagcaaagcatatcaaactgcaagcaaagcatatcaaatattacggcaataacaaacaaaagcgccgccagaactaatgctccggcggcgctttattggtggagtggtgtacgcagaatcctaaccttccaaattcggatttacgctttactgactatccggtgttcctgtacagtataacgcgcctgcgttacaatacaatttcgtatttataatctttcatgattctatctgttccctttttcttatatgtgctctcgctgacaatttttccgccacatttctgggcaacacgattagaagcggtatttccctgccccacataaatcgttactttctcagctccttgactacgagcatactctatcattccctgagcgatttcagttgcatagccttgacaccaaaatttcttatgtacacaataagcaatgtcgtacactttcctgtcatcacttatcataaaactacatgttcctacacgctctaatgaattcttaaaaacaggaatcaaataacaacattcctcatcctcgcccaggccttctaacattttcaaatattcgtcatcgatttcttcttttgcttcatccggcaaatattgtcccatctccggattgttccagatgctatatgcccacaaagcatcttctttcatgaagcctcttaatagaagccttgaagtttcaatatcatttatcttcataaacatcctctgtaaaattcagtatttcgccattgcttacttatgctttcatctgccacgctgattgctcttgtcaggagaatccggcgattctgatcgagtcattccatgcagactaattttagagcagcactttcgtcatctgatacgatataaacgagccgctgtttctgttttggtctgattgattgcattgataatatcaggccctccagattactcgcagaacaaataaaaccccggtcgaacccatggggttcgaccgggttatatatggtggagatgaggggagtcgaacccctgtccgaaaagaaagcggttagagtatctccgggcgcagtatacttattaggattcccgcagcatgagcgagtacacgcgctgtatgcgttggtagcttcataaattcatgacggaccgcaaagcttaagtccgttcacgttcagcacctgtcgacgccctgaccccacgcggtgctaaagtgggcaggacggctgcctttaattaggcagcgactgcaacagtattgttgtcagttaatttgtttgaggcttttatcgtgggtccccgccacggcccgctgctcacgcccctctctccccgtcgaaaccattacatccccatggtttcggggtgatagtcaccccgggaaatcaaagcggaggagtatttcagtgtctggttttcattgcgcgctcaatatcacgcttagcgtcccgctcagcggcggtagcacgcttgtcgtagagctttttgcccttgcaaaggccaagttccatctttaccctgccctgcttgaaatacagtgacaacggcaccagagtatatccctggagtttgatctgctgggcaaaacggcggatctcgcttttatgtgccagcaaacgccggggacgtctcgggtccttgttaaagatgttgcccatctcataagggctgatatgcattccctttacgatcaattccccgtcgtcgatgtccgcccaggaatccttcagcgtgacaccgccgttgcgaaggcttttgacctcggtacctacaagttcaataccagtctcaagggtttcaatcacaaaatactcgtggcgggcctcccggttctgcgcaatcaccttgcgggaatcgctctttttttctgcagccaacaggcccacctcccttacttgatgattgaatggtatatcagtatacgtctttttggtgcatccgtcaagagaaatttgtcacgcacgattcaaacaccgctttacagctcgccgcgcccctgcattgcgcggtagatcgtcgtctcgtcagcatattccaggctggaaccgaccggcaaaccataagcaagccgcgtggtcttgattcccagcggctttatcagcttggccaggtacatagccgtagcttcgccctccaccgtggggctggttgccatgatgacctctttgacaatgtccgaattcaaacgggccagcaattccttgacgcaaagctgatccgcaccaatgccatccatgggagagatcaagccatgcagaacatgatacaggccattgtactcatgggtacgctcaatcgactggatgtcccgcgggctttccaccacgcaaatacaggaacggtcccgcttattagaaacacaaattttgcagagttcgccctccgtataatcctggcacagtctgcagcgatgcagtccttttttggcatgttcaatggcctttgccagttccatggcctgttcattcgtcatggccatgacttcatacgccatacgggtagcacctttccggcccacccccgggaacctggcaaactgatcgatcagattttccagcggctcgacattatgcggcatggtttatctacctctcagccgagaccagggatattcatgccgccggtcatttttgccatttcctcgtcggcctccttatcgacggcagcagttgcgctgttcactgcagcggcgacaaggtcttccagcatttcgatatcgtcgggatccacagcctccggcttgatcttgacggcagtcacttcatgcttgccggtcatggtaaccgtgaccagctcgccgctggcagtgccggtgtactccttggcttccagttcggcctgcttttcccgaatggcgtcctgcatcttctggacctgacgcatcatggcgttgggatcgggacggccaaagcctttgggcattcttgctttcataatctgtaactccttatctgaaatcatgtgttccggcttgtcgcattgggaaaaagacttatttatcttccaccacaacatccacgccgagattttgcattgctttaagggtatcctctaccggccgcacctgctgcccttccgcattggttttgggctgctcataggggccgatattgcaccggactccgctgacttcaaaaataattgctttcagcgtcttgccagtttctttatttttgcgcatgtaatcgcggaaggtctcgttgcatgcgattaacacgcgtttgccgtcataatatgcggtgcttccccgcaaaaacgaactaagtgccgggtcccgttcctgcaaggtctggagtaccgcaccccagggttcaaaaagttgcggggcgtgtacctggacaggtgcccggttttcctgcacagctgccacaggctgtacaggggcagctgcctccggcacaaacggtgcaggagcagcgaccggtgccgacatcggttcatagcttggacttgcttctgccacaggcaccggcgcggccagctgtggatattccgcctgttgcggagccgaaacaggcgccgatacaaacggtgccggctgtgccggtcccggctgcgcagcaaccgcaggagcggcaactacgaccggcctggcttccggctgtgtcagggaaaaaatcgcaagttccagttcgatgcgctggtcggtgccgcgccccattttttccagagcttctccgaatgcctcaataccgcgcacggcctctgcctggggcatggaggtcctggccgcataagcagcttcctcctcgggagatatgccagtgagaagcgccgtcccctggggcagggatgccagcatcagattgcggtaatggcccgccagctccacgcaaagtctgcgcatatccaccgatttctggcggagttctgcgactttctggagcgcggtgaccgcatctttccgggcgatggcgtcgctgatttcaaacagatacgcgcggtccgtcacgccggccatccgccggacaagttcctcgtcaacgctggtgctgacacccgcgcaggtatccagaatggacagagcgtcgcgcatggcgccgtccgccagacgtccgatcagctttgccgcgccctgggtcaggtcaaagttttcctgttcagccacatagcgcaaacggcccgcgatatcctccgccgtgatacgggagaaatcataccgctggcagcggctcagaatggtagcgggaaccttttgcacttccgtcgtcgccaggataaaaataacgtggggcggcggctcctccattgttttgagcagcgcgttgaacgcagaggtcgacagcatgtggacctcgtcgatgatatagaccttatactggcagaccgtaggcaaaaaagctgtctcgtcgcgcaggtcacggatatcatccacgctgttgttggaagccgcgtcgatttccgacacatcaaggacggtgccgtcatcaataccgcggcaaacctcacattctccgcaggggtcgggactggaatgatccaggcagttgattgccttggcaaaaatctttgcacaggtcgttttgccggtgccgcgcgtgccggtaaacagatacgcatgtccgatacggcccgcggcgatctgattctgcagcgccgtaacaatggcatcctgcccgacgacatccgcaaatttctgcggacgccatttgcggtacaaggcatgatacatctgcacgcacctcccctgcttcacggcaaaaaataaacggaccgggtcgcgcgggggtgtgccccgcggctgcgctgctttgcatacggatgcaggcttgccgcggcgccgggtacgcactgcttaatgctgctcggttccccgcctgacatggttcacagggcacccgcgcacggggcccgcatccgtatgcaaaacagcgcaaatacagccctgtccgcttttgttattatacaataccccgcgcacaaatgcaagtagcccccggcgcggctttgtcaaaaatcaagaaaagatttgcttggcatagtctgcgctggccttggcatccttggcatagaaatccgcaccgatctggcgtgcatactccggcgtcagcaccgcgccgccgaccatcactttgcagtccaagccggcctgatgcaatgcttcaatggtctcctgcatgcttgccacggtggtcgtcatcagtgcggaaagtcctaccagcggtgcaccggtgtcacggaccgcctgcaccaccgcctccggaggaacgtcgcgccccagatccagcacatcatacccgtagttttccaggatgacccgcacgatattctttccgatgtcatggacatcccctttgaccgttgccaagacgatgcggccgcggctctccccctgggttccggaagacgcgattgcctctttcaccagatcaaaagcagcctgcgccgccgatgccgactgcaaaagctgcggcaggaagatggttcctttttcaaatccgtcgcccactgcatccagcgcagggatcaaagtctcattgacaagagtcagcggctcggtaacggccagtgcctgctgcgtggcagtccgggcttccgctttcaggccgcgacgcaccgcatcaaacaaggacatctgtccgcctgccacctgcggctgagccgtcgcctgtgttttgacagactgggtcgtttctacctgtaccccggcgtaggcttcgatatagtccgcgctcttttcatcctgggacgtcagaacacggaaggaacgcaccgcgcccatcatttccggagtgttggggttgatgatggcaaggtcaagtcctgcctgcatggccatcgtcaaaaatgccgagttcagatatccgcggcagggcattccaaaactgatgttggacacaccaagcaccgtccgcacgccaagttcgcgcttgcagcggctgagcgcttccagtgtttgcatcgccccttcctgctgcgcactggctgtcagggtcaggcaatcgatgtaaatatcctcttttgggattcccacagcttccgccgcgcacacgatgcgcctggcaatggcaacccgctcgtcagccgttttggggataccgttttcatccagagtcaggccaaccactgcggcgccgtactttttgcacagcggcagaatcacatccagaaccgcctgctccccgttgaccgagttgacgatgggcttgccgttgtaaatacgcagcgcactggccaatgccttgggattggaagaatccagctgcagcggcaggtcggtaacactttgtagttctttcacaagatgggtcagcactgccgtctcatcaataccgggcagtcctgcgttcacatccagaacctgcgcgcccgcctctgcctgagaaaccgcctgcgagcagggatacgccgaatccccctcccgcagggcctgctgcagacgctttttgccggtggggttgatgcgctctcccactaccgtgatgccatcgacctccacgcaccggaccggcgtgcagagaacgctctttctgacggggatcttctgtgccgggaccttgccgtcaaaagtttccctcaaaccacggataaattccggagtgctgccgcagcatccacccaccatggagacaccggtgggaagatattccagcatatcccgagcaaactcctccggcgtaatgtcatagctgccgtcaggattgggcagacccgcattgggttttacaaacaccggcattcccgcagggacacagcggcaaaggcgtttggcaaaaggcaaaatttccaccggccccagcgagcagttgatgccgatgccatccacgcccagtccggccgcagtggcggcaaagctctccaccgtgcagccggtaaaggtgcggccgcggctttcaaagctcatggacacgaggaccggaaggtcactgttttccttggctgccagaatggccgctttcagttcatacaggtcggtcatggtctccagcacgatcaaatcggcaccggcatggacgcccgccctcaccatatccgcaaactgtgcgcaggcatcctcaaattccagggtgcctgccggagccagcagttcccctaaaggaccgatatccagcgcaaccaatgcgcccgttgtgtcggcagcccggcgggcgcagacaatggatgcagatacgacttgctccaccgtatacccggtcccatccagctttttggggttggcaccgaaggtattggcaaacaaaatatctgcaccggcagcagcataatccctgtgtattgcttccagggtatcgggcatcgaaaaagctgccagttccggcttttgaccggtgcgcagtccccgctgcgtcagctgggtgcccattgcgccgtcaagcaaaatgaagcgtttgcgttcaaacagttcaggcagtttcacaggtaatccccctctttcgatatgcacaggtctcgcgcagcacacagtgcgcacagcctgcccgggttccggtgaccggatggtccgccgttcccagaatcgccgtcacactcttgcgcggcgtcatcagatgttcttttgtcacgcaaagaccgatcccccgcacggtatccagcgacaggcacaattcatcctgcaaggcaagtgggcagtcgccgtatcccggcgaatagcgtcccgtcataaaacgcttttttcgttcctgttcctgacggatccgcgcttccatttcatcgcacactgcctccatcaggaccgaggccgcggcatctgccacagcccccagtgcgatatccttcatgcacagtctgcgcagcagtgcatccaccgcactgcccagcgtgaccgccatcagcacgacaccgtcacaccccgcaaggtgcctggcaatgtcctcccctgcattctggagccacgccggagattcgggaaattctcgccacgttccccggggggtacaagccgcacgaagctcctgttctgccgtccgcagcaaggtttccgtattttcatccggctgccagttcgccgcgccgagatagcgcagcgttgcagcacagtccagtgttttgggcagaaccagttccatcgaaaaatccttccgttttgtttatgccttgggcaagagatcacggattccctcatagacctccgccgccaccgaagcatcattcatggcgtagaggtgcacaccgtccgctccgcctggctgcggcgtacgataggcataacacccgccgaaaccggcagcgtgatccccgccttgcgtgccatgttgaggaatcggtaaaaatggccgttgtcaaaaaacagctgagtcaccagatggtgcgcaccgttttcctgcttataacgcagattggcaacgtcctggagcagtgtagccgcctccgggtggccctcgggatagcaggcaccggacacgtccatgtcaggcgccgtctgacggatatacgccatcaaatcgctggcatggtgaaagtccgggctttccgggcgcagcggcgtacgatccccgcgcaaggccagcacattggagacaccggcagcccgtaatttttccagcagagctgtggcagaagccttgtcactacccatgcagataatgtgagccaaaggaaggattcccagttcctcctgcaggaagttggccacctcaaccgtcgaaacgccgcccgcagagccgccagccccatatgtaacgctgatgaaatcaggcgaaagttccttcatccggcgcagggtctgctgcatggcagcaaactgtgtggtctgcttcggcgggaagcactcgatggaaaatacacagcttttgttctgaaacaactccgaaattttcataaacttctgctcctttgtttgttttcctcacccaactctatttatgcggcctggtcggcttcctggttttcccatgccgtgccatccacttgcatggttccgtcacgcaggactactgtcaccgtcccgtccaaatcggtccggtaaaactcagctccaatgttctggatgcgttccaccacttccgcatggggatgtccgtaatcattgtccagcccgcagctggccacaacgatctcgggccggactgccgccagaaactcttccgtattggaggtattggaaccgtgatgcccggctttgagtaagtcggcgtccagtccgaaccagtaccgttccagcagctgttcttctacttcttcctctgcatcccctgtatcgataaatgaaaacgatcccgccgtaaagcgcaggcacagcgaaagattgttcaaattgtcaccagcttcctccggcgtcggcgccagcaggacctccagctgtcctgttcccagaacatatttgtctcctgtggatgcctcgacggtatccgtgccatactgctgcgccgcatccagcgtgcgctccaatgtggcggattcctcattcaagccctccagctgcgggagaatcagtgtttcagtgggaaacgtctccagaactgcggccatcccgcctgcgtggtcagcgtgaggatgcgtcatgacaacataggtcagcttttccaccccggcactttccaggctgcgcaaaagagactcctcagactcggccgttcctgcatcgatcaggcaaaattcaccgtcctggcagatcaacacggcatctccctggccaacgtcaagaaagctcaccgacgtatcgccggatacaatcaggtcccggtccggtgcgctgctttcgatccccagacgatcatacaattcatcccaggtcggaagtgtgccctgcccgccgccgtactcaacaacaaatgccgccagcacaacacagactgccagcacaggtacaagcactgaaattgccttgttcaaaaatcccacactgcgtctgcgttttcgtctgcgcggcataaggtttcctttcttgtgtcttattcgtcttgtgcgcccagtttgcgttcctgccactgggcacgggtgatgagcactgcacggggcttggcgccctcataggggccgatgaccccttcctgctccatctgatccataatgcgggccgcacgggcatagcccagcttgcagcggcgctgcaaaaggctggtagaggcctgacctgcatcgatcacacactccacggcctgttcaaacataggatcacgggccgatccggcatcgccgtcatcgtcaccggaatccttgcccttttctgcaacggccctgcgctccatttccgcaatcatttcctcgtcatactgtacctggctcgtggccttgataaagttgaggactgcggaaatttcttcgtcggtcacatacgtgccctggatacgggtgggtttcgccgcgccgaccggcaggaacagcatatcaccgttgccaagcagcttttccgcaccgccggaatccaggatggtgcgggagtcgatctggctggacaccgcaaaggcaatgcggctggggacgttcgccttgatcagaccggtaatgacgtcaacgctggggcgctgcgtggcaatgatcagatggataccggccgcgcgcgccttctgcgcgatacggcagatataatcctccacctctttgcctgcaaccatcatcaggtccgccagctcgtcaatcacgatggcgatatacggcaggtgttccaacgcaggatactgctcggcgagcttgttatagctcttgatgtcgcggacattgttttccgcaaacagtttataccggcgctccatctccgcaacggaagcgcccagcgcgcccgccgccttacgcggctccgtcacgaccggcatcagcaaatgcgggatgccgttatactctgccaactcaacgaccttggggtcgatcaggatcagcttgacatcctccggtccggaccggaacaaaaagctgatgatgatggagttgacgcaaaccgacttaccactgcccgtagagcctgcgatcagcaagtgcggcattttgcagaggtccgccacctgagcggtaccggcaatatccttgccgagagccatcgtcagaggcgaccgcatattaatgtaattctgggcctcgaaaacgctgcggatattcaccgctgcacgcacgcggttggggacctcgatgcccaccgccggtttaccggggatgggcgcctcgatacgaacgcccgccgtagccaggttcaacgcgatgtcatccgccaagttggtgatgcggctgattttcacgcccgcctgaggctgaagctcatatctcgtgaccgaaggaccgcggcaaacgtccaggattctcgtcttgaccccgaaactgtccagcgttttgaccagggtatccgcgttctttttcatttcgcgggctgcacctgcatcatcctccgcgcgggagggattgaacagattgagggacgggtagcaatacggctgattttccgcctgttcggcaaccagttccgacagcggcgccgtctgctctgccttatcggcacggggcggggtgcgaatgggttcggatgcagaattcccgattgcctcactgacacgcaggtgtcccggctctgtcgggcgctcaatgctttcgctgcgagcaggcgtcaccggctggaccggacgctgcaccgctgctgcggcagcccccgcgccggacagcaagctgcccatgggaactccggcgttccatgccgcctgcgccgaatcaaagctgccgccgatggacgggatcacgtcggtcgttcccagcgggtccggctcgacttccacaaaatcatcgtcgtgatgcggcatctgctgtgccacattcaggcgcacttccccaagaggagcatcctcatcatcacggggaagccctcccatcgccttctggatcagctcgtccagttcaccggccgaagtggtatccgggtccggctgcgcttccaaatggagggaaaaatcctcttcctccgtctgtttcggctgtgccggtgcaggacgcaggggcgctttttccttgcgtccaagctgctccagcgggtccagaccgaatgttccgcccggaccaatcacaacaggttccagaggatcattttccaccgcttcatgcaaggcacggctggacatatccggtcccaggtcaacgtcaaaggatgccctgggttccgtttccggcatcaccggggcaggtgcctttacagccgcagcggattccgccgctgccgcctgtgccgcaccacggcgaccattcttccgcgcttcgtcctgtgccagataaggcgccgcgtcaaaagcaggatgatgcggcacatcacggcccgcatctgtcggaagggtgccggtcagattttcaatcggctcttcctccggcccgcctgcaaacagctgcgtatcataggcgtcctcttcttcataggaagccgcccgtgcctctttcagccgtgccgactgatacaggataaactgaacgatatccctgggcgtgaccgcgaagaaaaccatcaacccggtggcaaacagcagcagcatcacaaagtttgctgcgggacgcccgcagagcgcaaccagtgtggcaccaatcgcaccgccaaacacaccgccgctccagaattttgtctgcccccacgcgaacagcgtctgtacgacctggacgaagttggagtctcccaccttaaaatcagaaaagaccaccggaacacttgcacagaccaaggcaagcagcagcgtcttggccaggaacttgccaaccagatagcccgaagcgatcagataggcaagatacagaagcagcgggcctaccaggtacgtcacaatgccaaaggttccgaacatccatccgcggatgatgctccagacgctttgccccggaacaatgaccagtgcaatggccagaatgccgaccgccgccagcggaatgctacccataacgctgttgcgttcctggcgccggcgagcgcgggtagatgtggttttggaagcctgctttttatggctggtgcttctgctctgggatgatgaacgacgttttgtcgatgatgtgttctttgcggatgaccgctgagacgattttccggtgctttttccggatcgagactgtgccattttgaatgtacccctcaaacaataatatattgttgataaatcgatcatttatgtacctcaaggagatcctttccgcaaaatggcgcaaagatccccttgaaaaatctatggtttattattttatcatgaatggcggcgattgtaaaatccatctgcccattttttgtccttcttgcctgtaaaacctcatccgatcaggcaggggttcttttgacgatttgcataaaaataagttttcttttttggttatctgcgcttttcaatttcctgatacagatagcccagggcatcccccaagccgcccagagaatcgatcaggccttcctgcacggcctgttcgccattgaggaccgtccccatatccatgaccagttcccctgtgttgtgcatcagctgggtaaaccgttttgcggatattctggaatgcttggcaacaaagccgacgatgcgttcctgcatctgctcaaaataccgcatagtctgcggcactccaaggaccatgccggaatgccgtaccggatgcaccgtcatggtagcagtcggcacaataaagctgcggcccgcggacaccgccagcgggatgccgatggaatggccgccgcccagcacaagagttgcgctgggctttgtcagcccagcgatcagctccgccagggcaaggccggcctccacatccccgccaaccgtattaaggatgaccagaagtccttcgatttccggatcttcctcaatatcgacaagctgcgggatgacatgctcatattttgtcgttttttgattgtccggcgacagggtatgcccctcgatcgttcccactacagtcaggcaatgaatggcataccgccctcttgtagcggctaccatgccgctctcggcaatcatttcttgttctttttgcttctgcaaagtgtcttcatgttcattttgcaaggtttggttcttattcacgggatactctccttttttctgctccatctctggtatggaattcattttgagtttccgttgacattatgcccatttcccgttccgcatatttagcaacgcacacaaaaacttagataaaaaattgacaactgtcggcagattgattatacttatccatagcaataaatgttcgattggtgcgccgccgtttggatgcccgcaccgtcatttcatcggctgttttgacgtattccatttgattttgcacgggaggtgcatatttgctatgtccacgcaaggaaaggtttccctgcccgtcatcaaacggctgcccaagtattatcgctatctgaccaatctggccgctgatggaaaagacaaagtctcttccagtgagctggcccacatgatggggaccactgccagccaggtccggcaggatttcaactgttttggcggcttcgggcagcagggcatcggatacaaagtcgacgtcttgctggaagagatcggtcggcttttgtttggctccggagagctgctccccaccattctcattggtgccggccgactgggaaatgccgtctccagctttatttcccgcgatacaaacggttaccgtctgctcgccgcttttgatgtcaaccctgaactcgtggggcgtcagatgagcggagtcaccatccgcccgctggaagagctggaatcgttctgcatggaacacaaaccggccgtcgccgttttgtgcgttccccggcaaagtgccgtcgacctcagcgatgaacttgtccggctgggaattcagggcttctggaacttcagccactatgatctttctgttgcccaccccgaagtcaccgtggaaaacgtacacctgggagacagcctgatgagcctggggtatcgtctgcgcaaccccgagacctgacaaccatcctctcacatctatgcaggagacttttcgtctcccgtgttctcgtgtaaaatgaaaagccgtcggttcccggcggcttttttctttggggcctgcattgctttttgcaatcagggtatctataataatggttaagcgcctatgggaatggacgaactgatatccccgaacaggcgtaaaaaatggacggaggatatccatggccaaactctatttccgatacggcgcaatgaacagcggaaaaaccactgcactgcttcaggtcgcattcaactacaaagaacgtgggatgcgggtattgatcctgaaaccttcgattgacaccaaaggcggagatatgctggtatcccgtctgggcatcggccgcaaggtagacattctcgtcaccaaagaaatggacatcttgcagcttgtgcgcgaagattgcgagaaaaacggccctctggcctgtgttctctgcgatgaaagccaatttttcactcctgagcaggcagagcagctgttccgcgtaacggtcgatccgggtatcccggtaatctgttacggactgcgggccgattttatgatgcgcggtttccccggttccacccgcctgctggaactcgcccataccattgaagagctgaaaaccatctgtgcctgcggccgcaaagctacttgcaacggtcgcaaggtcaacggagagtatgtctttgagggcgcacaggtcgcaatcgacacggtggacgatgtggaatatcagagcctttgcccgcaatgctggtaccgagaataccatgcctttctgaaacgaaccggcaaggaaaaataatcagctgcctgttttcttcccaattatatataatgccgtaatcataaaaccggcgtgcagaaaaagttctgcatgccggtttttgttgttctgcttgttttgggagccatttattcttcggcatcctcttttgtgacctggcgataatactgacgatactgctgtggagacaatcccgttgcgtccttgaacaccctgcggaaatgcgccgtcgtcataaagcccgacttggccgccactgcggagatgctctcgtcccctctttcgatcatgctttgtgccgctttgatgcggatgccgttgatgtactctaccagactgagattgattgttttcttaaacaatcggctcaagtagtacgggctgatgtagaactttgccgcaatctctgtcagtgtcagcttttcggcgtaatgcaccgcaatataactctgaatctgatcgatgatccggttgctgacgcgagcgttttccctgccgcgttccggctgcatgtcacacaaatgcttcaggtacagcaaaagggttccgaggatcagcttgttcgccgtctgtgcttctcgtccgctgacctcctgcagcagcatcatttgctgcagcatcgcatggatacgattttgctgctttaccgaaatgtgattgatcagatgatttcggccgctgctcaaaaaatcaaaaaagtccacatcgtcaaatccggcactcaattccttgaggtaattggggctgaaaatcaccgcgatgcggctcgagggtccttccccgatggaacctgttttgtggatctggttctcaccgatcagaaccacactgcctgcatttacgatataggcagtgtcttcaataaaatagcggcgggaaccctctatttcatagtaaatttcatatttatggtgcgtatgaaacgttgtcatttcatatgcgccgggacgttcgactttttcaatgtaaaaatcaagatcaggagaatagccgctgttcatttcgccctttcctccttcctcacattttctacagcgctggatttatttagtataatagcacattttttgctaattttcaaagtgttttttgggaacattctatcatccccatcaaatttcatcactttttcagtgtcagagtacattttttcacatcttgaaaagtttggatctctcccctgattccgtttcggccccctttctttccaccattttttcgtcagcgattgctttgccgatcggatggccatactttttatgccagcccggccatattccccgccagtgagcccctggtgctctttttacatgacaaagctgtcagaatatgatagaataggtaaaattgacatgctgttgcccgtattctgcttgcgcagccgtatcttgtttcagggaggtggccgacatcgccgcagatctcgattccgttttggattgcgaacttttcgacatgctttcgcaaagttcctcggatatttatttctatgtaagtgacatttcatccgggcgttcccggtggagcgcagctgccgtagaagaattcgatttgaaagacgaatatcaggacggcgccgactggctatggctttgccggattcatccggaagatcagccaattttcctccgtgatcttgaacagatgctcaccggtcagaacggtgacgtgcaccactgcgaatatcgcgtcaaaaacaaagccggccagtacgtctggattcggagccggggtgtactgcgccgcaacagcgatggcagcgccgcacttttcaccggtgtgctgcggaatatgggtctcaaccccaaatatgacaccaataccaacctgtataccatccacgaattccgggccagattgtacgagacgctctcccagcccggccagcgcggcggtattttactgttcggcattgacgatttcagccgcatcaacgatgtgcacgactatgcctttggcaacctggtcctccgcgcctttgcggaaaagctgttgtctctgcatctgcccgggttccttttccgaatggacggcgataagtttgcttactggatgcaggatgcagaggcagaagatctggaagtcgttttctcccgctactctgccgttgccgcggagcttaccgtcggcgaggaggaaatcccccttgttttgaccggcggctatgtactgtatccgtccgacggtatccgggctgaggatcttcatcgccgccttgaggtggcgctcaacaccgccaagctttccgagccgggcggcctgtgtgccttctcgtccgaaatgttccgtgacgagcagcggcttgatgccctgcgtgccgccatccatcgctgtgtcgagaataattttgaaggtttttatcttctgtaccagccgcagatttacgccatgagccgcacctgccctgccgccgaggcaattttgtgctggtcctccgaagaatatcccaatgtttctcatgccgaactgatggccgcgctggaagaaagcggagacatcctccgtctggggcactgggcgctggaacaggctttgacccaggtcaaacagtggcaaaagactgtaccttccttcggcatcagcatggatatctgcagccgtcagatcgttcagcgcagcttcattgatcgcatctgccagcttgccgccaagcatgccctgcccaacggcacgttgtgcctggaactgaacgacggctgttatgccgccggttcccggcacctgtacgaattgaccgcaacgctgcgaaaagccgggatcatgaccgcactggacggatttgcgccggaacaccttactctttcccttttgaaggacatccgaccgcagtggatcaagatccttccccaccatgtttttgattccagcagtgaggaaccttccatcctgccttccctgtttgccttgttccaccagctcggaatgtacgtctgcgcagaggcgctggagtcttccgagcctgccgacatcgccatccgcgcaggtgccgactttgtccaggggccgctgtattcccctccgctggatgcggacacattctacgaacgctttatttctgagcaggcgtgattttctctgtcctgccatacctgtaaaggaagttgatctttcatgtcggacgcgcctttgttaagcgcctgtatcgtctcgtactgtgattacgatgaggtatgtgctgccgtgcgcagtatcctcgcccatacgccgggtgaattggcattgtatgtcgtggacaatgcgagcccggacggctgcggcagccgccttgccgaaacggattttgaggattcccgtgtacaggtcatcaccctgccggagaacctcggctttgggcgcggccacaatacggttctcccgatgttgaaaagccgctaccatttcattttgaacccggatatccttcttgaaagcgacgtactgcatgaactggccgcatggcttgatgccaatcccgacgttgccatggccaccccgcagctgtattatcccgacgggcgaatccagcatcttccgcggcggaagcccactccctggacgctgtttgcccgtcagcttgccccgcgctttcccggttccctgtttgaccacagcgaccgtcattacaccatgcaggacgaagatctgacccacccgcggccgatcgagttctgcactggcagttttatggcagtccgcaccgatgttcttcgggaaatcggtggttttgatgaaagctacttcatgtatgtggaggatgcggaccttacccaaaaagttctgcgcaagggccaggtttatctggtcccccaattccgcgcggtacatgcctggcatcgtgcccctgctcgggatgccggcaaattcaaaatgcagctggtcagcatgatgcgctatttcaaaaagtggggcattcaaaaaggctccgtctgatcagatccatttcatctcagattttgtcacttaggacagtcgcttccaatgcgcgctgtccttttcttttgcggttgatggcattcggcgtattccttttcttcctctggttacaccaaatcacgttctccatcattcggccgccgaaacaccttgtatttggccggcatctttgctaaacttgtatatataagatttgcggctcgcaagatatatgggaggaacaaaaatcaatgttgtctgatattgaaattgcccaggctgccaaaatgcagcccatcaccgagattgccgacaaactcggtatcgattcggattccctgatcccttacggcaaatacaaagcaaaaatcgaccatcatctgatccattccgaccggaaagacggccgcctgatccttgttactgcaatcagccccacccctgccggtgaaggcaaaaccactaccagtgtcggtctggccgacgccatgaattccctgggcaaaaagaccatgctctgcctgcgcgagccttctctcggtcccgtgttcggcatgaaaggcggcgctgcaggcggcggttacgcacaggtcgttcccatggaggacatcaacctgcattttaccggcgacattcacgccatcggcgcagcaaacaacctgcttgctgccatgatcgacaactccatccagcagggcaatcctctgggcatcgatccccgccgcgtcacctggaagcgctgcatggacatcaatgaccgtcagctccgctttatcgtggatggtctgggcggcaaagtcaacggcactccccgcgaggatggttttgacatcaccgttgccagcgagatcatggccgtgttctgccttgccaccgacctggaagatttgaagactcgcctttcccgcatcgtctgtgcctatacctacgacggcaagccggttaccgcaggtgatctgggtgccgccggcgcactgaccgcccttctgaaagacgccattgatcccaacctggttcagaccctggaaaacaatcccgccatcattcacggcggccccttcgccaacattgctcacggctgcaacagcgtcatggccaccaagctgagccttaagctggcagactacgttgtgaccgaagcagggttcggtgcagacctcggcgcagaaaagttcctcgacattaagtgccgtatggcaggtctgtcccccgacgccgtcgttctggtggccaccgtccgtgctttgaagcatcacggcggctgcccccgcgccgagctgaatacccccaacgccgattatgtccgcaagggtattgccaacctggcacgtcacatcgataacctgaaagatcagtttggcctgtctgtctgcgttgccgtaaatgctttccccaccgatacggaggaggaagttgaggtcatccgcagcctttgcgccgaaaaacaggtcccctgcgccctgtccgaggtatttgccaagggcggtgccggtggtgtggaactggccaagaccgtcctttccatcatggagccgcgtcctatccagttcacctacgatctggagcagagtctggccgacaaggtcaaggccgtcgctcagaagatttatcacgccgacgatgtccgttttgctcctgccgctcagaaagccctcgacgagttcactgctatggggtacggcaacttgcctgtctgcattgccaaaacgcagtattcgttcagcgatgatgcctctttgctggccgctcccgaacacttcaccatgaacgtgcgcgaggtccgcctctctgccggtgccggttttgtcgtagtcatctgcggcaacatcatgacaatgcccggcctgccccgtcacccggccgcaatggacatcgattgcgatgcccagggacgcattaccggtctgttctgatttttctttccctcatacaagattttccccggctgccccggcaggttgttcctgctctggcagccggggctttttgataccaaaaccggcagccttttcggggctgccggttttaatcgtatgtccgtattcagttttcttctttactttcggccgggctctctgccgaagatgtatctgcagaaacagcgctttcctggctcgccgtcttttgttcctttcggaaacgcatcataaccggcttcacgtcctccgccatttgtccgcccggaagcgttgccccgaacgaaggcacaaagcagaactttctgattacaaaaatcagaccgatggatgccacgcccaaaaggttctcaatggcagaaccgtgacccaaaatcatattacgggcaatggcatacagcaaaacttccagcgcactgcccgggctatgcttggccagcatcttgataaactcaataccaattacaaggttgaacgcatgccccaaaaacgtctgaaacgcctccgtgctggaactgctccacagggtcagcatttcttttgcgacaggaagcgagctgatcagcaggccaagcagcaccaggcaggaaaccacaacctccaaaaggctggcaagctccgctacctgatcccgcagcgcaaacttgatgcgttcttcctggcgatgcagctgtgttctggtaatacgacgccttgtccgggtatccttcattcatatatcccccgtttgttttttatatccttctcctccgcagcttttatcgccgccgaaaggatcttcatagtattttttattatatcaggaacaccttgaatacagcaagatttttttacattttccggccggatcagacggacttatccttaacgctgtacgcaaaaaggagccgcttaaaaagcggctccttttgcagaatttccttattgctcgattgctttgacaacgcggttgagatcattttcatcttcgcagacgatcttgaccggctgactgaaatccaagctcatcaggccaagaatgctcttggcatcggcaatgctgcccttaacgtcatgcacgccgacttcgttataacacttggcagcggcagacacgatcccctggacttcagcaaagttggaaaccttgacttgtcttaccataataaattccctccatttttcccatgcggagcctgcgcacaacacaatgcgccaaaccttccgcagcatcattatagcatcattatggtctttcgtgagacaagacaagctttcgccgtctcttttccgcattttacacaatgcagtttcaacacacgccccattttcttgtaaaagcatccgtttttatagggttctttccgctttcatgcgcatgtttttgtctttttagatgtcgttttttgtattatcagatcgcattttgttttaatcagtatccaaaacagaggcaatccgtaacttttttaacatccacagaaccgattgttcaacaatgttccatatccagcccaggcgttctctgcgtttgacgtacgtcaggattgtgtaatccccttcatcgtcagaccaatcctttttttctttacgtcaacactgatgaccttgactcggaccacatcgcccactttcagcacctcgcgcggatgcttgatatagcggtcggtgatctgggaaatatgtaccagtccatcctgatgcactccgatatccacaaaggcaccaaagtcgatgacattgcgcaccgtgccggacagttccatcccctctttcagatcctccatctgcatcacgtcactgcgcagcagcggcttgggcaggctgtcacgcacatcacggccaggcttgcgcagttcggccacaatatccttcagggtcggttcaccgatgccgattttggcgcagagattgattgctcccagcgcggatactctctgttccagatcgttaagtgccggggttccaatgtcagccgtccggtatccgcactcttccaaaagggcgcgggccgcagcatagctttcaggatggaccgcagtttcgtccaatttatttttggcaccgggcagacgcaaaaatcctgcgcactgctcatacgctttgggacccaggccttttacctttttcagttccgcacggctggcaaaggcgccttcgctttctctgcgtgcgacaatgttttttgcgactgttgctgtaacgcccgcaacccggcgcaaaagcggtgcagatgcggtattcagatccacgcccaccgagttcacgcagtcttccacaacgccatccagagtctcattcagccgtttctgcggcatatcatgctgatactgtcccacgccaaccgccttgggatcaattttgaccagttcggacagcgggtcctgcaaacggcgggcaatagacaccgcactacgcaggttcacatcgaactgcgggaattcttccgccgccagtttggaagcagaatacacgctggctccggcctcgctgacgaccatgtactgcaaatgcagaccgttggactgagccagttcccggatcacatccgcggcaaactgttccgtttcccgcccggccgttccgtttccgatggccagaagttccaccttgtttgccaggatcatctttttaataatgctcttggcctgctccacacgcttgaattcgggaaccggatagacaacattggtgtcgagtacccgcccggtggcatccaccaccgcgactttgcaacccatacggtatcccgggtccaatcccattacaactttaccacggatcggcggctgcatcagaagctggcgcagattctcgccaaatacctggatggcgccctctgcggctttgtcggaaagttccccgcgaagttccgtctccaggctgggatgaatcagacgcttataagcatccagggccgctgcttccacaatggcagcgctgtccccgcctttacggtgcacaaaaagctgcgcagtgatggcggcggcgcgttcgctttccacctgaacgctcaccttcaaaaagccttcccgctctccgcgttcaagggcaagcacccgatgccccgggatcttgccgatgggctcggcgtaatcgtaatactgggcatagacgctgtcctcgtcctttgctttgacgctgcgcaccatgccaaatgcacgatagaaccggcgcagctctgcgcggcagcgtgcatcatcggagatcgtttccgcaagaatgtcctgcgctccggccaaagccgcgtcagcatccggaacttcctctccaagatactgctccgccagagcacgcgggtccactgctgcatcctgttttaagatggcgtccgccaggggctgcaaaccgcgcgcccgcgcaatgctggcacgtgttttgcgcttgggcttgtaggggcggtaaatgtcctccacttccgccaaagtgcgggcctcggcaaggcttttctgcagttccggggtcatggcgtcctgctcggtaatgctgcgggtcacttcttccttgcgggcatccagaccacgaagatattccaggcgttcgcccagagtacgcagcacctggtcatccatggaaccggtcgcctctttgcggtaacgggcaatgaacggaatggtatttccctcatcgatcagcgccacagcgccggccacattggcaggcaccaggccaagttcctgtgcaagctgttcgatatgatcgtttttctgtgtcatgtgttctccttcggttgttccataatattctccgaaccttcttcctgcggttcggatcgcagaatcggctttactttctgttcaaaagcctcctcttcatcaagcgggagttccgcccatagcgactccgggatctccgccggctccggcgacaggcgacgacggtggtccaacagaaacagcaccagcaaataaacagcatacagcgcaatccccgtcagagacagtttgataccggtatccagtcccggcgtctcatatacaaaggagatttccgcatgcccggccgggacgcgaatcgccataaggccgttatccaccttttcaatctgggtgctctgcccatttacggtagccgtgaagccatcgtcgtatgggacgctgaaaaataccagtgtgctctcctcataatccgtcacggcttcaaacccgcagtcattggccgtaaaggaagtcactccggcggcgcggcggtcattgcagtcctgtacataagaatcgtaatccagcgtttccagttcctcgtcactgatgggcttaagaagctcgccgtatttttcgatttgttctccagtcagaagaatcgcacgcataagggcattgccccgctgctcttccgcaatcccttcaaactgatcttgcgtcatatagtactcataggcaaagcccatgggaacccagttttcgttttcgtagatctggtagctggtcgtagtttccgccagattccagcctttcagtgcctcatcctcccaggagacctggtcgcttttggggacaagggtatagcgaacactcaaaaggccgcgcagagcatacagttcaaaatccggcttggaattgacatctctggtcacgccgaccgtgggatagaattccagaatgtgcggcgccaccgtagaatggaaaaactggatacagctctgatccagccagatgcccatattgttatagcaattataggcatccagccggtaaaaggtatcatccggcaagactgcattgacctcgtccgcttcccggtaggtctgctggacatattccgcgtcgttgtaccactgggcatacttggcaatggaaatatggacagttccgtacaagaagctgaatcccagcacggcagccagcagaaccgggaaataatgccgtgtataccgaaagaaccgcaaaatcagcgcaaagatcagcacgcccagtacgctgatcccgaaaattgcccagaaccttgcgggattatccacaacgccaaggataaaattatcatcctcatccgcattgggaaccagggcaaatgccactgccgataccgtgaaaatcgcaaccagccggtttgccccccaaaggttcgccgtctcatcctgcaaagccatggctgttgccccgcaaagcacgagcagcggcatataataccatctggcatagtagctggaattcaatgcgtaaaacaggctgttcagccccggcaccagcgcacacaccaggcatatcttcataatgatggtgaacggatgccgacgccgtttgcggcaaaatgccagtcctgccgcgatgccgaccaccggcagataggccgacatactggtccattttgtgataccggcgttgaacatgtcggtcaggtacggtgcgtccggcatgaggaacatgctgtacaaaatagcaaggtactgctgtgaattgccgtagacaaggtatccgtaccctgtgaagggatcaatggttcgagggttttgcagcagagacagaatcgtcggaacaaggagcacgctccctgccatgcagccgatgacggtttccagcgccagtgtcccgaattttttgatggtgatgggataacgccgtgttgcccacatgcagataaaatagagcaacaggaaaaccgcctgccccgcgaagaagaaatagttgttcagcaggcagactgccacccacgccggaaaacgtccctttttgccgtcaatggcagtgtcatccaaagcggccagcatatacgggaaaatggcaggcgcatccagaaagaaatagaaaaagatgttgtagatattgaatccgcagaaagcgtaaaggcatcccgccagcatcgccatgcgctgatccttggaccagcgcctcagccacagataggcgccgctccccgcgacggcaaacttcaggcacatcatgggcgccatcagccagggcatccagcgggaaggcagcaaaatggtcagccagaaaaacgggctgcccaaggagtagtaggaatacgcgttgacaaaaccgctgcccagatccgtggcccagctgaaagtcccgccatcttttacaaactgattggtgtactgataaaaggggatcatctggtcgttgaaatccccggcgtaacggaagaaatccccctggcttgcatcgataatgcaatggggtaaaaacaaagccgccgcaaggccgaggcagacgaaaaatgttcgccaataccaggatttttgcttttggagcggttgcatcttggattgcctcctcgttcgttttccctgccaaacggcaaaaagctttttgtcaaacccggttgtgtggtatactgaaacaagtgaaacaccgccgcgggcgacgctgcccggaaaggatcgtatcgacgatgaaaacatttccctttaatgccttgttaggacgaatgaaatacatcactcgctggagtctgatgcacaacagccgccccgaaagcctgagcgaacataccgccgacaccgcactgattgcccatatgctgtgccgcattgcccagcactgtacccacaccggcagcggtatccggccggatacggtagccacagcagcattataccatgacgcgcccgaaattttaaccggagatatgccgacgcctgtaaaatataaaaacgatgccctgcgcaccgcctacaaggcagtggaggcggaaagcgcccatgccatggccggcttgctgccggaggaaatctctgccgagaccgagctctacctgaccggcgcgatcctgacggatgccgagcgaaaacttctcaaagcggcggacagattgtccgcgctcatcaaatgtattgaggaatgtcagagcggcaaccgtgagtttgaggcagcccgccgtcagcaggaagccgctttgcacgaaatgaactgtcccgaggccgagtattttatggagcacatgcttccctgctatacccagaacctggacgagctgacgcgcggccgtttttaagcggccattctctcgcaatcagtcctgtgcacggtagacggcctcaatcaggcggtctacatcttcaaaatggctcagtgtcgcgcaggctctgcgcagcgctgcagcgccgcgcagcccgcgcatatagtggatggcctggctgcgggcctgagccatggcagtccactcccctttgcgctcacacatatcatagatctgctcacgcagcgtctgcattttctgccgcaaggagggtgcgggcggagcagcttcccccagcagtgcggcccgtatctctccaaacagccagggatcgcccagcgctccgcggccgaccatcaccccgtcacagcccgtttgctcgatcatattcagagcatcctccgccgaggtgatgtcgccgttgcccagcaccggaatgctgaccgcctgcttgactgcccggatcactccggggtcaatcggcggaatatacatctgttccctggtacgggcgtgtacggtcaccagcgcggcaccgttggcctcgcattgcttcgccacttccacggcggtcaggtgctcctcatcccaaccggcgcgcattttgactgtgaccggcgttccctccgcggcttccaccgccgcatggaccatccggccgcacagctccggggtcagcatcagtttgctgcccgcgccgccgcctgtgatcttgggcgctgggcaccccatattgatatcaatgatatcaaacgtcacgcctttttctcggatgatgcgcacagcctcccccagagtctccggctctgcgccgaacagctgtaccgcataaatgccgtggggatctttgtcccgcaaaagccccacacttttctgatccccataggtaattgcctttgcgctggccatttcgctcaccgtgtaggctgcgccgtgatccgccatcagatgccggcaggatgcatcggtgaatcccgccatgggggcaaacactgctcctgtcgggatttccaggctgccaatgcgtatcgtcatccggttttctctccgtttcctgtgatatgattcaaaaccattttattgtaccacaatacgcacaccgtgacaatttgtggtatactgaaaaagtatctgtatctttgtttttacaactgcatttctatcggcatgttccataaatgcttttgtaccgcgtgtacactagacgatcaggaggacaccatactatgaaactacttgtcctggacggcaacagcctggtgaaccgggctttcttcggcatcaaagtccttactaccaaagatggccgctacaccaatgcgatctatggcttccagaacattctgctcaatcttctctccacctacaaacccgatgccgttgcgattgcctgggacgaaaaagctcccaccttccgccatacggcatacgacggttataaagccactcgccacggcatgcccgcggagctggccgagcagatgcccgttttgaaagagcttttgaacgatctcggttttgtccaggtcagcaagcccggctgggaggccgacgacatccttggtacccttgccgccgcctgcgagaaagatggcgggaccactctgctggccaccggcgaccgtgacagcctgcagctagtggatgcctccaccaccgtactgctggcaaccaacaaagaaaccattgccatggacgaggccgccatccagaaaaaatacggtgtgaccccgccccagctgatcgaagtaaaaagcctgatgggcgatgcttccgataacattcccggcgttgccggtatcggcgaaaagaccgcactttccctgattcaaaaatttggcagcctggaaaacgtttatcagaacatcgacgacaaggcaatcaaacccaaacagcgcgaaaacctcatcaaccaccgcgaggaagccgaactttcccatatgctgggcactatccggcgcgatgcccccattgatactgccccgcagagttatctgcgagccgagggcgatcccgccgcagccgcaaagttgctggccgatctggagatgcacaagctggtggaacgctggggattgaatgaggcttccgctgccgcctcgccggaagttcctctgcccgcgctggaagccgagcccatgccgttcctcatttccgggcgctgctatctcgcccgcaccgtccagaaagatgcgcccggccgctggtatgccgttcaggtcgagcccgaacctgccgtgtactccctggacgaaaaccgtttggctgcgcttctggacgacggcagtaccgaggtttgggccttcgatgccaaaccgctgttccgtcttgccctggaaaacggcggtgtcggttccgccatccgctttgacggcaagctggccgcctatcttctgaatccttccgccagccggtatgaggtttcttcccttgctgcggagtacggtatcgccccgtcttttgcctgcgaggaatatcctgacgctgccgtcctcccggcgctgtgccaggcgctgcattcccatctggaagaacaggccatgctgcagctgcatgacgagatcgagcttccgctcgcccgcgtccttgcggatatggaacggatcggattttctgtggatgctgacggaatccgctctttcgggcaggaactgactgccgaactggagcagatccttgagcgcatttaccgggaagtgggatacaccttcaacctcaacagccccaaacagcttggagaagcgttgtttgaaaaactgggcctgccgccccgcaaaaagaccaaaagtggatattccaccgacgccgagacgctggaaagcctgcgtccgtacagcccggtcatcgatgacatcctgcaataccgcacctatcagaaactcaactccacttatgtggaaggtctgctcaaagcgatcggccccgacgggcgcatccattccacctttatccagacggaagcccgcaccggacgcatcagttccaccgaacccaatctgcagaacatccccatccgtaccgagctgggcagccgcctgcgaggattctttgtggcgtcggagggctgcgaactagtagatgccgactactcccagatcgaactgcgcattctcgctcacatcaccggggacgaggccatgcagcatgcgttccagaccggcgcggacatccatcggtccactgcagccaaaatttacggcatcccgccggaggacgtaacccacgatcttcgcacttccgccaaggcgatcaatttcggcatcatgtacggcaagggcgccttttctctcagccgagatctgaatgtcccggtcaaggaggcagagaccttcctcaaaacctacctcgacaccttccccaaagtagacggctatatgaaagactgcatcgctcaggcaaaggagtccggctatgtatccaccctgttcggacgccgccgccctctgcccgagctggcaagttccaacttccaggtccgttccagtggtgagcgcatggcgcgaaatacgccgattcaggggacagccgctgacattatcaaactggccatggtgcatgtatggcaaagtctccgcgacgaagggctgaacgctcgtcttttgctgcaggttcacgacgaattgatcgtggaagcacctgccaatgagattgaccgggtcaagcagctgctgaaagagaagatggagcaggtagtcaattattcggtcccgctgactgccgatgtcggcaccggaaagacctggctggaggcccactgacacccgcaagcaaaccgctttacaccatgtttcctgtcgtctcaagttgtaaagtcgtgccgctttacattaaaatttgtcgtgtatcagtcatttttatcacacatcataagacatcgtaagaatggtcggtgatttttcctatgtatatccttggtattgagtccacctgtgatgagactgccgcagccatcgtgcaggatgggcacacgctggtttccaacgtgatcagcaccagcgtgaaagagcaggccctgtatggcggcgttgttccggagattgcaagccgccgccacgtggaatatatcagtgccaccgtggaacaggctctggccgatgcttccatgcaaattgatgacattgacgcagttgccgtcacctttgcccccggtctgatcggtgcggttctggtaggcgtcaacttcgccaaaggtcttgcctattccgccggtaaaccgctggttccggtccatcatctgcgggggcatatcgctgcaaactatctgactcatcctgatttgaaaccaccgtttctctgtctggtcgccagcggcgggcacagccatatcgttatggtggaggactggtgccgctatcgggtgttgggccgcaccgttgacgacgcggcaggcgaagcctttgacaaagtcgcacgcacattgggacttccctatcccggcggccccagcgtttccgccgcagccaaaggcggcgatccccatgcttaccgcctgccgacacctcacgtggaaggaaaatacaacgtcagtttttccggcctgaaaacggcagtcatcaatgaagtccacaccgcctcccagcgcggggaaaccatcaacgttgcggatatggcggccagctttcaggagcgcattgcgcagatcctcgccaaaaaacttctggctgccgccgcagataccggcgcaaaggtcgtctgccttgccggaggagttgctgccaacggacgtctgcgccagttggtcaacgacggcgtccagaaactgggggcaaaagtttacttaccggaactgaaatactgtggagacaacggcgccatgattgctgcgcagggatactatgaatacctggacggcaacattgcaggactggacctcaacggcctgcccactctccccattgattaccgctgattttgcccttcccgtttcgggggccagtgtaatctcaatccgcatacaaatcttatctatttcgccatagcaaaacaggataccgctcgatacattttgagctgtatcctgttttttgtattttccgaacagccactcccgttttttgtcttgcccccctgcttttggcgcagccatcttcacttttgcgacagttttggcatcattcttacttgggcagtacagaacctcccgcaccgcgtcatattaaggtggtgctttgtttccctcattttttccgaaggaattgaatacactgaaaaagccccaccgccgggcgtcatttccttcggacaaggagggttcctgcatgaaaaccgtgatctatctcgacgtactgcttctggtcaactttcttgcgggatattttttgctcctggctgccggtctgttgtccgggtgtgcagcccgcctgccgcgcctgctgttggcctccgcactggccgcactctcctcgctgatcctgtttgtaccggagcttccctacgctgtacaactgctgtacaaatttttgagcggcggctgcatcattctggcagcctttggttttcgctccttccgacgttttttctgtgcattgatatggtacgtcatgctcaacttgctgttggcgggactgtcgctgcttgtcatcctgcaaacagacaccccatttctgcaaaccaataatctgtcggtatatctgcgggtctcgccgctgttgctgctgtttcttgccggcggatgctgtctgtgtgccgaactggtactgcgcattgtcccaagacatcctccttccagcgaatccatcggactggaactggaactgtgcgggaccaaagtctgcctgcgcgccatgctggataccggctgtcatttaagcgatcccattacctgcctgccggtcttgctggtcagttttccggatgcagaaacccgtcttcccgcaactgtgcgggaatttctttccgcctggtttgacggtctcgctccctcggaaccacccgaggggctgcgttttcgggtgattccctgcactaccgcggaagaagccacaattttgcccggctttgccgtggggcgtatcggtttgatctcgtccaagggggttgttcccctggatcgcaccgcagttgctttttcccgccagagtttcggaagcgaagcctacgaggcattgtatggttcagattttttatagacaaagtatcccgtttttcgcccggtccgtcccttattcccaaaggaggtttccaaaatgaacattgaccagatcaaagcgcagctataccggttccttttgcacctgaatgcaccgcagacgcttcactacatcaacggtccggatacactgcctccgccgctgtctcccgaagaggagcgaaaggtcttttccgatctcgccagcggacatccgggcgcccgggatactcttatcacacataatctgcggctggtcgtgtacattgccaaaaaattcgagagttcctccgcaggtgttgaggacatgatttccatcggtaccatcggactaatcaaggcggtaaacaccttcgagccagaaaagaacatcaaacttgccacctatgccagccggtgcatcgaaaacgagatcctcatgtatctgcgcaaaggttccaatcgccgtcaagatgccagcattgacgagccgctcaacaccgactctgacggcaacgagctgcttcttgtggatgtccttgtcagtgaggatgcccaggtcggagaagaactggaaaaaagcgcggagcgtgcggcactgcgacgcgccgtggaacggttggcacctcgggagcgccagatcatggaactgcgttttggactggacagcggcgttgaacacacgcaaaaagaagtcgcggatattatcggaatttctcaaagctacatttcgcgcctagaaaagagaatcatcaaacgccttcgccgtgagatggaggctgccgtctaaagcatttgcctcctctgcataataaaagaccgaccggagccccacatgcttaccggtcggcctttttattatcgttcgtataccgcgttggactccgtcacaaactgctgcgaaaccccgcccatcagattcatttccgacccgggcgcgaacaccgcataatcaaatccgttcttggtccagttcaggatggacgcctgacccggcgactgctgaagcgtgacgtccacatctcccacgttatagcttcccaggctctgataattgaagcctgcatatttttcggggacttgaagatttccgacaggtgcaacacggaatgtgacatcgttgctgtatgcaaccgcatactccacttctgcaatctccccatccaccagccagtagcgggtcggtgtcagaatatcatcgtccggcaggctcaccagctgaaatccggcggagcgcgtgtagtccggcttgagatattccacatgaacctcccgcccggtctttttccggttacgcaaagcataactcacagcagccagcgcaatggccaaaccgactgacagagccacaaacacagccagaagaatgccccagattgttgtttgctccattgttcacccctccctcattgccatactatgtttggtccactttgcttgtgaaaaattggaaggagtttttctgtctgcctcttttattcctcgcccatactgtctgtacagacaggaggacactgaaatgtatgcaggaaaagtagaaatctgcggggtgaataccgcacagctccctgttttgagcgaaaaagaaaaggtagaacttctggcagcagctcgaaacggcgacagcaatgcccgccagcaaatgattcaggggaacctgcgcctggttttaagcgtcgtgcaaaaattttctggccgtggagaaaacctcgacgacttgtttcaggtaggatgtattggtctgatcaaggcgattgatcatttcgaccccacactgaatgtccgtttttcaacctatggtgtacccatgattgtcggcgagatccggcgcttcctccgggacaataatcccgtacgcgtcagccgctccatccgcgatctggcctacaaatccatgcaggcacgggaattgatccagcaaaaaaccggccgagagccccgtatcagcgaaatcgccgatgccgtcagttcctctcctgaaagtgtcgcaatggctctggagtccgtggtcgaaccggcaagcctatatgaatccgcttattccgacggtgatgacaccgtttccatcatggaccaagtcaacgaaggcagtaacgaggaaagctggatcagcgacatcatgtttcgtgacaccgtgcgtgcgctgagtccgcgagagaagaaaatcatctccctgcgttatctctgtgggaaaacccagatgcaggttgcaagggaaatcggcatcagtcaggcgcaggtcagccgcctggaaaaaaacgctctgcgccagatcaaagagcaaatttccacctgctgaccacacttacccaaaccttttatggtatatcgcggcagaaaagcggcctcctgattgggatgggaaagcttttccctattattgatggctgaataatgattgcagctcaatcaatgccgcccaatttaattcggccctgctttcggcatcgatatcgcctttgcgcttacccaaaggtcacacaccaataagtggcaccaccttcttcaaactcacaagcaatcccacataccgtatagctgggatcagtcattgctgcatagtggccaggactagcagcccaggcatcaacaacagattgcgcagagttgtagttctgagcaatgatttccggagtttgataaccgtcatggctcatcgtaccggcacgtaccatgtcaagcactcttgtatcggcaatttgcgacaatccgctatctacagacaacggtgccacaccaacggctgctctgtatgcattgatgttttcgagtgttgcccaataggcatcatctgtcgaatcaatatgccaccactcttgcgtacctgcggcaaggttgaacggaattgctccgtatgcggtgcttgttgccgtctgggaagaatcgcttgctcccgcagacgagttacctgacgacttgctgcttacggtcacatcacacgttgcactggcgctgccgatggtagcggtaatcgttgctgttccatctgcgacagcagtcacattgccttcctggtcaaccgtcgcaacggcctcgtcggtggaagtccaagtcatttcggagacatctgcatcttcaggcgaaaccgcgatggacaaagtgccggttgctccgggcttcatggtcatggaactcttggacatgtccatagactcgatcgccggcgtgacgataacatggcaggtagcaaccaacccgctatctgcaatgatggcggtgacatccacctcaccagcagcaatggcagtgatgtaaccggtattgtcaacagtggcaatggcttcgtcagaggaggaatactcgataacgacatccgttgcatcttcgggggtcacagttgcttcaatagaagcgttgatgttgtctcccatcgaaagagtcacagaatccggcacggaaataccggtaggcgtaacgacaacagtaatgacgccgctgtcgtaaattttgccgtcttcactggacaaagcgacctccgccgtaccggcactcgcagcaacaaggttgccgtgctcatcgaccattacgacgccggggtcgctggaggagtaactcagcttgagggcttctaccttcttgtcgatttcagcctgctcaggagtggcaccactgtacgcgtactccggagtagccatggacatacttcctttttccatagtttcgggcagctccaacgtcacaccagtgatgctggaactacagccagtcataaccatcacacaagccacagccagtgcacaaattttcgcacgaattttcttcacttttatcacctcataacatttgtcagacagatcctgttcactttacactgcgattgtttctcataacactttatttataggcaatactttttgtcatgttaaacacagttttatatttattttttctccccccgccacatagacgaatgggaaatcggtttggttttacaaatccaaaaaatgtagagaaaatctccaacacaaggtgtcgggctatatagttatagtgaaaattgtacgtctattttcacacctactacatagagatatctaccgtcgtcgatttcctgacagcaaggaacggaatttactactgcgcccctgttgcttgtcttgtttggcttcataaatctggcagagcagttctttggtttagtagcataccaaaacttgctaagtcaagttgcagaaaatacagacacgccgcagtataagaagagtgcccaggtgagcagcacaagctcaatctgggcacttcttttatggggattatacccattacatatcttcttcataatcaaaatcgccagagcgggaaatatgctctatttcctgattgacgatgtcagggaacatcatggcgcggcgaattgcctcataagcattgaggttacaatgcagctcacaagacttactagtctcttcatcatccagctcgcagaacaaacgtccctgctccagggcttcgatatctttttttacttcatcaattttctgattgcagccggagatcgtctcctgacgttcttcagcagtcatgctcttagtccagttcacacaagttccgaggaacaggatatacgggatggaacgggaacgttcaaccatctcttcaatattaaattttgccatgttcatctatcctcatctcttatatcaaaaagaagaaacaggtacattgacaccgttgtgtactcgcttaatcttggaactcaaatggtggacggcctgtatttgttgattttattatatcacttatgatccaaaatagtttgtcaaaggagtctgggaatggaaccaggaaaattattgagaggtcccgcctgctttgccgagttttacagctgtaactcgttaccgttccgcataacggtcgtcccccgtcacgccaaagatccgcgccagagatgcgatggaggcaatgatggcattctttttcattgaagccaccaatgattatctcctcatgcgcagggtcggaacggtatcccgtcgcttttctgcgcgtatgcacaatcgcattccccggcaggctttgcggcctacggggattttttctactcaccctaaattttatcgatctcctcttcaattttttcaatcagaaaatatcttccctcaatatcatgaacataccgagaaattcccatctcatcaatcatcttaaagaacccatcactgtctgtacagtattccttgggagtcatattcataagctgattgaaagaacacatcagattgaacataagggcgtcccttcgaggagccccctgaacaatctcctgactcatcatttcatcaaattcattctgaatccattccgtgtccaccatcgaagggaccaaattagaataccgctttagatattcctgaagacattcgatttcggaagtatagactctctcgtccacatcactcaaaaccaatcctttatcattcatcgtcccctggatttgcataatggtcatttcacaaatagcctttttccagaaatcatttccggtttcgattgagaataaccggcgatacatatttcgaaacgaactttcgatggacataatcagctcaacggaagacttcatcatatgtatacccccacatgatttaagataaagaaaacaggcagaaaacacctctcgcatgtcaatgcattcacagtgctttccgcccgaatggacacaccgatccgcttttggtgtgtctataaaactcgttgaatcgttgacttcctcatgattttttagttatatcacattactgctcgtttgtaaacacttcttctcttctgataccttttcaggaccgtggtcataaagatttgccataatattagcctccccttactattttcctcgttaaacaaacaataagcagaagtgttttatcatattacattctgctgattcttctggctgaaaaatgatatggtcctggttttatcgtctttctttctcattttctatcccttccatctaagtatatccatagctcggtgactgctctatgaaacccacctcctcagcagtctcagttttacaaaaaaatcccgatttttctgtaaaatacctctatttttttgtaaaacagcccgttttgggccatttttttgcaaaaaatcgaattttttgtaatctatatgtcaaggggcaaaataatttgtcaatcgaacaaaaataacttgtcaatggaatttgagaacaagataagagaaattactcggggtacccagccgctttttcgcgttttgcaatcgtaataggatgaaatgaaaggatatagagaggtacccggcagtcattgatgcgcaaaatattttgcgataattcgcggaaaatcgcctgtattcctgataatttccctcatttttcatccaatttggaggggttatgaggagaatcatcaggagagcacttggaggttatccgctgcaaaaagggtaaaaaaataacggagtaatgagagcaaaaactccacattactccgttatatttcacttcattgacaaatcaacttgcccttttggacaagataaattgccccaaaacacaagtcttgtcagggggcaaaataatttgtcaatcgagcaaaaataacttgtcaatggaacctgagaacaggattagagaaattacttggggtacccggccgctttttcgcgttttgcaatcgtaataggatgaaagtaaaggatttgaagaggtacccggcaatcattgacgcgcaaaatattttgcgataattcgtggaaaatcacctgcatttctgataattttcctcatttttcatccaatctggagaggttatgagaggaatcatcaggagagcacatggaggttatccgctgcaaaaagggcaaaaaaataacggagtaatgagagcaaaaactccacattactccgttatatttcacttcattgacaaattaacttgcccttttggacaagataaattgccccaaaacagtcttagcccttgatggcagcagcaacttcagcagcgaagtcctcgttgcgcttctccaggccctcgcccttgacatagtgggtgtactcgacaaccttgatgtcgccgcccagctccttggcggtagcagcaacgtacttggtgacgtccatgctgccgtccttgatgaaggcctgatccatcaggcagttctccttgtagaacttgcccagcttgccgatagccatcttctctttgatggcgtcgggcttgttcgcggtcttgggatcgttggccatctgagccagaacgatttccttctccttggccagaacgtcagcagggacagactcctggttcaggtaggtcgggttcgcagcagcaacctgcatagcaatgtccttgccgaaagcaacaaactccggcttggcagcaacttcgtcgctggtctcgaacttaacgataacgccatgggtgccgccgccgtggacgtaagcagcgcaatggccctcgtaacgagcaaaacggcgaaccttgatgttctccttgatgaccaggatcagagccttcagagcatcgtcaacggtgccgtcgcccatcttgcaggacatcagagcctcgacatcggcgggagcctgctcggcaacaaccttagccagatccttggtgaactcaacgaacttctcgttcttggcgacgaagtcggtctcggcgttgacctcgacgacaacagcgcagttctcaaaagtagcagcgtagaccataccctcggcagcaatacggccagccttcttggaagcggtggccaggccctgctcacgcaggatctcgattgccttggcgaagtcgccgtcagcctgggtcagagcctttttgcactccatcatgccgcagtcggtctgcttacgcagttccataacgtcttttgcagaaatagccataatcaattgtcctttccgtttcaaaagttcgcgtgacaggtgagaggtttctctcaggcctgggcctgctcctgagcgggagcttcctcagcggtatcctgagtgccctgcttgccctccagaacggcgtcagccatagcaccggagatcagcttgacagcgcggatagcgtcgtcgttgccggggatgacgtaatcgatctcatcgggatcgcagttggtatcaacaatagcgatgatggggatgttcagcttgcgggcctcggaaacagcaatgcgctccttgtgggggtcaacaatgaacatagccttgggcagacccttcaggttcttgacgccgcccaggtacttctccagcttagccatctcgagctcgagcttgacaacttccttcttgggcagcagatcaaaggtgccgtcctcctgcatggtcttgagctgatccatacggtcgatgcgcttacggatggtgcggaagttggtcagcatgccgcccagccagcgagcgttgacgtagtgcatgccgcagcggttggcctcgtcacggatggactcctgagcctgcttcttggtaccgacgaacaggatgtcgccgccagcagcagcggtctcacgaacaaagttgtaagcctcatccagcttcttaacggtcttctgcaggtcgatgatgtagatgccgttgcgctcggtgaagatgtacttcgccatcttggggttccagcggcgggtctggtgaccgaagtgaacgcctgcctcgagaagctgtttcatagatacgactgccatagtgattttcctccaaataaatttagttttaccctccgcaccgcgtgatcgtttcctaacccaaccggaattgggcacaaaaaaacaacgcaatgcgtgtgtattgccgtaatataatagcacaaggttcaggcctttgcaagcatattttcggcactttctcaaatttttatgcctttcaaggtgcaaaacgccgattttttgtatttccctgtgccgccttttgctttcaccccaaaatccggcgagaaggccggctgcaggtatgctcggcaacatctaccataatcacatccgctccaatgctcaggatactttcccagggtatttccagatcctcatcccgtcccaaaagcccaaagcaatggcaacgcccatgcaaaatcaccgacttgatttgtgccgtcgtactgtcaaaaccgatgtcatctactctgccaaggttctcccctgtcttgctctggatcacatctttccggctcagatcgcgcagtgtcatctttctcacccccgcccgcaggcttccgatttcatgattgcatacaccattatattgcgctgccacgcatttgttccctgcgacaggtgacagactttccaaaatggtgtataatgcagaatcatacttgcgaaaattcaagacgacggctttgggccgggaggttcctgattcatgtataaaaacattatttttgatctgggcggcgtagttgtggatttcaatcccaaagattttctgatggattattttatgaacaaatccgccgaagaagccgtatacgatctgaccttcggcagcaaagaatgggaaagcctggaccgcggcgatattacccgcgcggcagcaaaccgcatcatgctggaaaatgccgcccgctgcggccgcacctttgaggtccagaccgtcatcgatgagtgggaaaaaatcctgcgcaccaaaaagacgacaatcaaaaccatgtgcaagctaaaaatggccgggtaccgtctgtactatctctccaacattgcctccgataccctggagctcatcaagcagcgcgactttttcccgttgttcgacggcggcatcgcctcctgtgaggtccatgtcaacaagcccgaccccaaaatctacacgctgctgatgcagaaataccacctcgcctacgaggaatccatcttcgtggacgacaataagcaaaatgctcaggccgcctacaacctgggtattacaggtatcctctacaagaacaaaaaatccttcaaccgcgctcttggcctttgcggcgttcagctgacgcccaaccgccgccccgctccgcagccgaaacaaccgcagtaaggaggctgccttttctcactttcagtgaaactgattatccaaaatgcccagcagggcgaggattgcatccgcgatcctcgccctgcttttttgctgatgaaaagatatctttccggtcattcattgtgaggaagttccgccggcctaggttcctccgttttcttggtttcaaacacacggctgaacagaaacggcagatgcagcacgcccatcagaatcagggaatacgccacctcaccccagccgtaggtctgattctggaagctgagctccggcacaaaaaccaggcccatattattgttgaagaagtgcatcagcaccgcagtccagatattgcccgtcttcatatatccataagccatcaaaacgcccaggctgatacaggtgatctgctgcagaaggatgctttgcagcggagtatccggtgcatagtaaaacaggttcagcggcagatgccagagtccccagacaacgcccagcagaatcacgcctttgcgattgccaaagcgagcctgtatgcggggctgcagataataccgccatccgtattcctcgccgaagaagcagagaaagctgaggaaaaagttcagcgccacattgaccaacataatgtatggcatgggtgtcagcaaatattcaaggtacacactctgggtgttggtcacaaacgccggcagaaaaatacgcagtacatacagaccaaggaaaatcagactgcagagaaaaacacccttagtgctccccttcgcccagccaatgccgtaagcacggcgcttttcccgcttggttgacagcagcacgatccagccgatcacgcttgccgccatgataacgtagttggaaataatgagccagcccatctctttcagcgcaacgctggcaaggctgcacccaatcattacagccgtcacaacgagataaaacccgtaaaagccgcggggcagcatggggtcatgccgtctggtgatcagaaacgcaagcattacacccgcagccgggtacagcatctgtgccagaggaaacaccgacacatccgcaccggagacatgccccaaatacatcggcccccccatcagatacggtacgccgaaggcaaccgccaaaaagatcagcatttctttgcgggatgccattttattgttatcactcatgagaatcctcctcttcttctgccatggaatcaagatgcttccggcgaccgcagtaaagagccgcccagatctgcaacacagaaaacgtcagtatcgagttgaacacgccgctgaaaagcgctcccggcagatacctgttagaaacaaacaccataacgcacgtaaacacgcccgctgccactgcggccagaagattgtttttcaaactcggttttccgcttcggtcccagagtcccgctttcatattggctatcagttcaaaggcccctatcagacacagcagcacgccctctcccgcatattgtttgagtggcgcccccatggcagactgtaccaccgtggaaattcccagtccccagaatgcgatccacaatccatagtgttcgactttgagcatctggatctcctgcatctcgtccagcttgctggacttgaatatcgtgttcattctgtttcctcctcttcccaaaacagttcatccaaggtcttgcccaatacccggcagatggctctgcacaaacggatcgtcgggttatactcccctttttcgattgcatggatcgtctgccgtgatacccccaccgccgcagcaagatcgccctgcgtcagatccttttctgcgcgcgccgccttgagtttcagattctttgccatgcggtcacctccgtcttgattacaagatatcacgtgccatacattttgtcaattatatattacatttttatttttaagttttacatttcgtttttctgcaacagacaaaattcaaatgattgcagcagtgctttgaactgtgctatgatatttgaaaagacaacagatttcaaacaaaaaaaggcggtcatcttatgaaagacggtttcctttctgtgcgtgcggcatcgcctgcactgcgcgttgcagactgcgattacaatacagaacagatcattcggcaaatgcaatcggctgcggctgacggcgtcaaactgctgtgcctgcccgaactctgcctgaccggatacacctgcagtgatttatttttgcaggcttccctcatcaagggtgcggagtccggacttgtcagcatccttgccgcgtctgctgagctggatcttgtcacgctggtcggactgccggttccggcggacggcaagttgtacaactgcgccgccgtggtgtcaaagggccgcctgctgggactggtccccaaaacctggctgcccaattacaatgaattttacgagaagcgacattttgtctccggttcttccgatgcgcggccgctgcattttgccggacaggataccctgctgggtacaaaactgctttttgtatgcgaggatatgcccgactttgtcctgggcgtagaaatctgcgaggacctctggtcgcctatcccgcccagctgcgcccacgctctggcaggcgccaccgttgtagcaaacctgtctgccagcgatgaaaccatcggcaaggacgcctaccgccgggatcttgtcagcggacaaagcgcccgtcttttgtgcggatatctgtatgccgatgcaggccacggagaaagtaccaccgacatggtctttgccggccataacctgattgcggaaaatggcgtactactcagtgagtctattccgttcggaagcggctgtgcgcaaagcgaactggatctcgaccggttggtaagagagcgcatccgcaattccacctttgcccctcagacggacggatatacccgtgtacctttccggctttcctgctcggaaacggttctgacccgagctgtctcccctgcaccttttgttccccaggatacctccgcacgcagtgaccgctgcgaaatgattctccgcatccaggccgaaggcctggccaagcgcatcgaacacactcacgccaaatgtgcggtgatcggcatttccggcggactggattcctgccttgccctgctggtcgctgtgcgtgcatgcaaggtgctgggacttcccgcagacaccgtccacgcactgacaatgccctgtttcggcaccagcaaacgtacccgcaccaatgccgagatcctttgcgaagccctgggcgtccgttttgccgaaattgacatcacccgcaccgtacaaagccactttgatgacatccatcaggctccggattgctacgacgtcacttttgaaaactgccaggcacgtgtccggaccctggaactgatggactacgccaacaaaaacggtggctttgtcattggcacgggtgacctgagcgagcttgccctgggatgggccacctataacggcgatcacatgagtatgtacggcgtcaatgccggcgttcccaaaaccctggtccgccacatcgtacagtatgcagcagacagtaccgccgatgaaacactgcgggacgttcttttggacattctggacactcccgtcagccccgaacttcttcctgccgcaaaagacggcagtttcagccagcagacggaaaaactggtcggtccctacgagctccacgatttctatctctattatgttctccgtttcggttttaccccgtccaagatctatcggctggcactccaggcgttccgggatcgttacgctcccgacgtccttttgtactggctgcggaatttctaccgccgtttctttacccagcagttcaagcgcagctgcctgcccgatggtccgaaagtcggctccgtcaccttgtcgcctcgcgccgactggcgtatgcccagcgatgccagcagcgctctgtggctgaaagaactcgacgacctggaagccaatccccacaaataagcagaaaaccctctttccgggtgcgtaatgcacgcacaggaaagagggcttgttttataattttttcaggacatcggctcgccggtttccggtatccgctgtcattctgctccagtccggcgcaggacgactcccaccgtcttgaacaggagcttcacatccagtttcagcgaccaattatcaatataccagacatccagccgcacgacttcctcaaagtccttgatgtcgctgcgcccactgacctgccacaaaccggtgatgccaggcttcatggacaggcggcgcttatggtggctctggtagcgctcatactcatccagcgtgggcggacgggtccccaccaggctcatctgtccgcggagaacattccagaactgcggaagctcgtcgatggatgtccggcggataaagcgtcccacacgggtaatgcgcgggtcatcgtccactttgaacataaacccttgcatttcatttttgtccatcagctctttcttacgctgttctgcatcctgatacatgctgcgaagcttatagatggaaaagacacggccgttgagtccgacacgtttctgtttgaaaaacagagggcctttcgactccaatttaagcgggatcgccacaatggcaatgatgggaatggaaatcagaattcccacaatgctgcccaaaatatccatcaggcgcttaagcaaaagatccgttgtcttgtggttggtcggtgcaatggtgaccagcggcacaccatcgcgctgttcgattcctccgcgcagacggggtccccaggtatccttttcgttcttggggaaaaatcgctccagtgccggcacgttcaggtggatgaccagtcccatgctctccatttcctcgagaaacggctgaagggactcccccgttgcatagggcaggttgatatatacctcatccagggattccctgcgcagccattccataaagccgtcaaagcccgcgcgtacgggaaccgacgcaatggaatccggcgcattgcttcctgcatccaccagcgccacgccaatgatgcggatgctccaatccgacttcaattcccggataaaactgggtgcccggtcgctggtagtaacaacgcccaccagcgaggccatgctccccttatagaaagtccggttcagataccgcttcagtccgcagcgcatggcaaaaaggacggccaggttggcactcaaaagccccacatacagataccgtgattccagcagcggagccttggtgatcagcaaaaagaccgccagcacagcggccagcagcgaatccacccgcagacagtcccacaactctgctcttacactgcgccgggtgatattctgggcgctttccgcaatcaagaacaccagcaaaaaagccaaaagcaggatcagcacaaactgaaaaatatcctcacccgaatatttcagtataacgccgaggccccgatccaggaccagccacgccgcagacgtgctgatcaccagggcaagcaaatccaccgcaaacaccattgcgtattgcagcttctcgcgtttttccatctcttatctatctcctctgtatccgggccaccttatctgccaaggacgaagccctgcaaagatgtccggttcaaacaggctatattttgcttatcataccacgattccccatcaaaaggcaaatatcctgttcatacagcatttggtgtgtttcccaaatcacagcgcagtctatccctcagcacaccgcggagaactatcccgctgcgattgatgtccccttcgtgaagctatcaaaacatcccgaacgcaaaagaaatccggacctgcggctatcagcacaaggtccggatttctttgttttggtggagatgagggggatcgaaccccttacctcttgaatgccattcaagcgctctcccaggtgagctacacccccaagttttctgtcgtggggaggtctgtctcccggcgacgtgtgttattatagcaaagcatttccgcaaagtcaacacctttttttgatttttttgcattttttgaaaaagttttttctccactctgttttttcttcttctgttcgttgttttttattccatctttttttgatttttttgaagaaccctggttttccaccggcaaaaagcccgctttcaaagcaaaaaaaaggcagaacccataatcaaggttctgccttttttctgacttttttatctcaaaacaaatcggggcggacaaattctttagccttcgtgagaaaggtttctgccatacaagcgatttccgatatggcggatcgtccaccggtatgcggggatcaggaacacgcaggccgcgatccatgctgccggattggccagtgcggcgccaaagaacccaagcagcggtacaagcacaagtgccacacccgtacgggcagccatctcggcaacgcccgccatcatggcaacgccggaatatccaagtccctggatcacataacgccagatgatgagcgcacccagcgggaagaagaacaggctgttccaaagcagatactgctgtgccagttccacaatttcagtttccgttgccgtatcaataaacagcccaaagatcgtaacatcaaagaaatgcagcacgaccaacgatcccacggcatacaccgccacaatacccagtgcataccgcacaccgctgcgcacccggtccagacgggaggctccaaggttttgcccggcgtaggtcgccatggccgttccgacactttccagagggactgtcaaaaggttgctggtcttgctggccgccgtgacagcggcaacaacggtgctgcccaaaacattgaccgcccactgcatcacaacagaaccgattgccgtaatgctgcactgcagccccatgggcaaaccgatatacaaaagcctgccgcaggctgccctgtcaacgccggcttcctctttttgcattttgagaatctcaaatcgtttgcagagatacagcaagctggcaatgcccgaaatcgcctgggacagatcggtcgccagcgcagctcccatgacccctgcatcaaaaaccagaataaacaagaggtccagtgcgatattcaaaaagctggtaatcaccagaaacaccagaggtgttttgctgtctcccaaagcccgcataatgcaggaaaccatattataaagaaagacaaacgggataccggcaaaaatccaccctatgtatgccgccgcgtcatcaataatatccgctggtgtctgcatcagctgcagaatggggcgcgtcagcaagacagtcgccaccgtgagcacaaccgctcccgccagggaaagccacgcggaatttgccacataccgccgcatatccccatagcttcgtgcgccaaaatactgcgcaatgggaatcgcaaagccattgcatataccgatgacaaagcccagtatcatatagttgatggaaccggtagaacctacggctgcaagggcgttcacgcccacaaagcggccgacgatgatcgtatccgccagattataaaactgctggaacagatttcccagtaccagcggaaacgcaaaccacaaaatcactttgagcggatgtccggtcgtcagatcttttgtcatgatgatcccctcttgtaaaaactttccttgtccgaatttcctgtattctttatcctgtttcctgccggaaatacttttctgtcatgtacttaccggtaaggcttgcaaactctcaaaaaatcaatacaatagtaatatgatttgctgtttccctaaacagtctcagtccccaatacaaggaggaaaccatatgaaacgcatcatcaccatcgggcggcagttcggcgcaggcggcggtgaaatcggccgccgtgttgcgcacgagctgggcatcgaatatgtagaccgtgatctcatcctgcgcaccgcggcagagtccatgcagctcacccccgagcaggtccgtcagtgggacgagaaagtcccccgcgatgtaggttttgcccagagcctgttcaacttctattcccgccccctcagcgacgagttgtggaacgctcaggtagaagccatccgcaagctggccgacagccagagttgcgtgatcgtcggacgcaatgccgattacatccttcgggagttcgaccactgcctgcatgtgtttgtccatgccgaccgtaactggcgtctggcacgcatggccaagctgatgcccggttcctcgcccgaagcgctggaagcggatatgcgcgccgcagacaaagcccgccgcaactactgcgcccactatacgggtcaggtttacggtgcagccgaaaactacgatctgacgctctgcaccagcaagctgggtgtggacaaatccgtttccctggttctggccgccgtcgatcacttgtgaccccgaattttgaccttgcacaaaaaccgcatttttttgcacgacacaagttcaaaatttaagcgttgtattgacagatgccctgaaacgttattataatatatacaacgctacgggcaaaatcaagccgtataagcgacgatttgttctgctattttggcaattattttatgacttttgccgaaggctgaaacagcgttccttggaatgttttattctacgtcattttcacttatacgcatcaaaggcgattgcggatatgtggccgctgtcgccttttttatttctccggcacagcgctttcacagcgttttgcatagatcatcatagaggaaaggaacatcgtaacatgaaaaagcttctggcatccctgatggccctgggcctggccctttctatggccgcctgcagcacgacttcttccgacgcttccgagcccgcttcctcgggttcctccgcagcttccggcgagtccgccgccgctgccgatcccgacaaggtctggctcattgcaaccgacactgtctttgttccctttgaatacaccgacgagaatggcgacttcgtcggcatcgacgtggacattctggctgccatcgccgaagatcagggcttcaagtatgaactgaacagcattggctgggatggcgctgttgctgccgttcagaccggccaggccgatgcgatcatcgccggcgcttccatcaccgacgagcgcaaggaatccggctggatcttctccgacggttactacaacgccacccagaccatcgcagttgctgaggattccaccatcaccagcttcgaggatctgcgcggaaccagcgtcgccgtcaagaacggcaccgccggtgctgactacgccgagagcctgaaagacgagtacggcttcaccatcacctactttgacgattcccccacgatgtatcaggacgtcatcatcggcaactcctccgcctgctttgaggatacccccgttatgatctcctacatcaagcagaagggcatcgccctgaaggttcccgagggcctggagagcgagggtgctccttacggcctggctatcatgaacgaagacaaccaggctttcctggatatgttcaacgccggcctggccaacatccaggctaatggcacctatgatgcgatcatcgagaaatacctcggctgatcgctgaaccaccgcggcgaaacaacccgccgccaactctttgcaacaccccaaaaacaagagagcgcacggccgttatctgctgtgcgctccctctttgaaaaaaacggacttttaattctatactcgtggtaaggaggggccttcatgctgagaatcattcagacctacggcacaatgatggtcgcggcaatgggacagacgcttctgctggctctgctctccctgttttttgcctgcctgctgggcctgtttttcggcctgctcagcacagtccgcaatcgtgcctgcaatatcatcggcgcgatttacgtcgatgccatccgcggatggccgttgattgttctggcatatttcgtttatttcggcattcccatgatgattcagggaatgggattcaagagtttccgcatggatagtctgcaggccggcgttattgcgctgtctcttaactgcggcgcctacatggcagagatcatccgtgccggtatccagagcgtcgacaagggtcagatggaagccgcgcgcagccttggtctgagctacggcaagagtatgttccgggtcgttctgccgcaggcaatccgcaccatgatccccagcatcatcaaccagttcatcattacgctgaaggatacctcgatcctgtctgtcatcggtttccccgagctgaccaacacagcgaaaaacgtctcggccaacgttggccttcccatgcaggcctggctgttgtgcggcctgatgtatatggtcgtcatcattattctgagcaagctttccaaaaacatcgagaggaggatcaaccgtggccgataacatcaaaatccacgtatccaatcttgtcaagcgcttcgggaatctggaagtgctcaaagacatctcgatggacgtccgtgaaggtgaagtcgttgttctgctgggtccgtccggcagcggcaagagcacgttcctgcgctgcctcaatcgtctggagaatccctccggcggccagatcgtcattgacgggcatgacatgaccgacaagcacaccgatctgaacaaggtccgtgaaaacatcggcatggttttccaacatttcaatctgttcaatcatctgacggtgatgcagaatctgacgctggcccccgtcgagaccaaaaaagccacccgtgccgaagccgagagcaccggccgcaaataccttgaaaaggtcggcctgctggacaaggcagacgcctatcccagccagctttccggcggtcagaaacagcgtgttgccattgcccgggctctgtgcatgcatcccgacatcatgctgtttgatgaacccaccagcgctctggacccggaaatggtcggcgaagtcctttccgtcatgcagcagctggcacgcgatggcatgaccatggtggtcgttactcatgagatcggttttgcccgcgaggttgccagccgtgtcgtgttcatggatggcggctacatcgtggaggaaggcactcctgaagaagtgatcctgaacccgaaggaaccccgtaccatcgacttcctgagcaaagttctgtgatctttcggttttcgttccgattcaaacaaaaagagcctgttctgaatgaccaggctcttttttcagtctttttcattgtaccattatttctgccaatacaaagcgcccctgtttctgcacaatcaaaaacaggggcgctttgtggtgccgctaaccggggtcgaaccggtacggaatttcttccgagagattttaagtctcttgtgtctgcctattccaccatagcggcgtgacactgtgagtattattttacatcaccgcttccccattgtcaaaccgcatacgctaggcaaactgtgcggattatgttacaatgcttatgctgtgaatatgatacatttccataaacttttcaggcaaggagggctgtcgctcttggcatcaaaactttcctccaatagaaaaatcgcactctttttcgcgggcggtttgctcggcgtactggcttttttgcttatttacggcatttcgccgctggactttaccaacgatgctttttgccgtggcggatacattgaaaaagacatccagcagcactatgcgggctggcttttttaccggcagagcgacctgagtttcccgttctgtgtcacacaaaacctcaattatcctgatgggctcagcgtagcttacaccgactcgatcccgctgtttgccgctttcttccgctttctttcccctatcctgccggacactttccagtatttcggattgtttaccctgctttgctttttcctgcagggtgcgttcggtgccctgctgaccggcttgtttgcccgcggctttcttgtcccgcttttgggcgatattctgtttgtcacaagcccggtcctgttggaacgtgccttccgccacaccgccctgggggcacagttttttatcctggcaacgctttactattattttgatcgcagacggcagaatcgtatgcccggtgcggggctgtttcttttgaatattgccgccatcacgatccatccttattttctccccatgacttacgccgtgaccctggcgttgctggcggaatatgctgtcacaaagcggaagtttaccatgcccgctctctacctgattgccgatcttgccgcaacgctggccgcgggctgggcattcgggctgttccatggctccgcctccggtggcagcgatgcactgtacggctatttcgggctgaacctcaacgccctgtggaatccggtaggtgtgagcggagtgcagtggagccgcctgctccccgcacagaatcaggtaggtggaaactacgatgctttcgcctatctgggccttggtgtactgattgctttgccggtcgccgcattcgttcttgccttgcagcgaaagctaaaagtaaaagccttgctgcacaatcattggatgctcgtcattgtatgcgccttgctgtccatctttgccgtcagcaacgttgtgaccgcaaacggtgccactctactgaatcttccccttcctgctcagctgctgtccctctgttccatattccgttcaagcggccgtcttttctggcctgtctactacctgctcatgctggccggattcgttttcaccgtgagagcccttcccacgaagcgtcaatatctcccgccgatcattcttgccgttctctgcgcagtacagctttgggatatctctcccggtatccttcagcgccgggatgccacgcagcaggcccaaacccaggacgcgtttcccacaagccttgtcagcagcttctggcaggaagcgcaaactcgctacgaccatatcttttccctcaacggtctccaggacgacgcgctgcatctggcgctttatgcggcagacaacggcatgacgacaaacgatccctttgccgcacgatatgatgcccacgctttggaagcgtcccgccaagccactcttgaacgcattttgtgcagcgagttggataccgacacgctgtacctgttccatgatgagaccgaatttctgaagtatgccgacgcggccgcagagattgcctggtgcggggagatttcttctcctgacgataccgcacattggtacgtaattgcgcccgggttgcaggattttgtcggagatgaattctgcaccccttacggggagacctatcccctgcggctggctgactataccgatcagctgtggaaccgaggggttctggacagtgacaaaaagacggtctgctttgcagactccacctttacccgttcaaggctggagaatgcctccgctatctgcgctgatggtcaagtttatgagatcctgaaatttgacgacagcgaccccggctggctcatgctgacactggacatcgacgacgccactgtattgtgggataaagaactggagacgatttcatgaaagagatccgtgtaaagagcctgctcccggtccggctggataagtatctgtccgagcaatatcctgttttggggatcggccgcctgaacaaagctctccgcgaaaacaaaatcaaactaaacggcaaaaagcagccgctttccacgcgagttcaaaatggcgatgtgatccgcctttacctgactgacgagcagctgggtctggctgcccaaaacggtcccgcctttctctctttgcgtcctgccgaactgatttatgagaatgacgatctcattgtggcaaacaagcccgcaggcattccggtggaaggcccggacaccgataccctggtcaaccgtgtctgcaaggcgctgtacgatgccggacacctggattcccgcgcacttccgcggttatgccatcgtctggacaccggcaccagcggcctggtgcttctggcgaaaacgcctgaggcggaggaatttcttctggaagccatccgcaagcgcagcatccgaaaacggtatctctgtgtgacgtttggccgtccgcagcccgcagaagccactttgcacgactatctgctgaaagatgccgaaagcggcaccgtgcacgtcataaaatctgctcgtcccggagcaaaagagatcatcacccagtacgagaccctctccgtaagcgggcgtctggcgctgctgcgggtcgagcttgtaacaggacggacgcaccagattcgcgctcaccttgccagtatcggctgcccgattttgggggattccaaatacggcaacaacgccgcaaaccgggagttgaagctcaaataccaggccctctgcgcttgggagatcgcttttccccaacaaatcgaatcacctgccttccgctatcttgaaggcaaaagttttcatgcgccgaaaccatggtattaccagcaggtcctggacggcacattgaaataagctcaacaaatctatgcaaaaaacaggcatgtctcttttccacctttggaaaaggccatgcctgttttgttatttgataggttctttttgcgtctcggaacttccttgatgtaccgcttcacattcccgttccaatgcatcacgggtatacagggtattcaaaacctcaagcagctcctttttactcaagcggggcggcaggcccagccgacgaagaaacgcccggcgaaactccgaacagtcgggacgcccggaaagtccccactcatacaaatcgctgtatgaaatggatcgcggactttccccatcctcaggcaaaggcaaatcggtcaccgttgccgtgtgaaggccttccaggatcacttcattgggtatcccttccacgccgagcaagccctccttgcccggctcggccttgcgcttttctttgccgggcaaagccggcacatacgcctgcgccacatgggcagcaccgaccagtttggtcacgaaatgtcggatacgaaatcccgccgcatcggaatccgtcagcacgatcaacccctgggtccgtcccaatcgcttaaacagccgctgcatttccttgtccttgaagatggcaaaaccgtccgttgtcaggatggttccctccacaatgcctgccaggcgggctgcgtcatattttccctccaccacaatggctcggtttgtcttgaatttcatcggcggcctcctgccagcgccaactcacacagcgccttttggagcaaaaggtcattgtccagtttgctgcgtttcagatcaagatccagctgctgcaaaatgttcaggctcttctcaatctgacggcggtcaaagcgtgcggcggctttttctgcgttccccaaacggtagttccattttccggagtatccgaaatctttggccagttccgccacctggcggcggcttttccgtgcgataaacgcacgataaatatcaagatagttgccgatgagcgcaccggcgatcaaaatcggatcattctgcaaagccagcaggaccctcagcttttgcagggcttttgccgtctgtcccgatgtaacgagcttgaccatgtcaaaggtatccgcatccagcgtgaccgtgcccagtttgcggatcatgtcgggtgtgatggtctcgtaatctgccaaagcagcgagtttttcaacctcgtttcgcaacagaaactgatcttctccgcagcggtcgatcaaaaggctttccgcccccggtacaaaggatgcaccgatttcctgcgcccagtcccgcagcatgccctgcagcgccgtacggcccggctttgcgacctgcgcacaatagcccagcttttcacacgcggtgatcagtttctgttcccgcttgccgggtttgattttgccgtaatgctcttccagaacactggtcagaataaagactgcgttctcggtatctgccagcgtatcacaaaattcctgcagatccttatccgaataggcggacggtttgaccagcggcattaataccagacgcttaccgccaaaaaaggagatcgtacctgccgccaatacgatttcttcaacgctcggcgtaggtcctgaaaggaccgttgtctcgggatcgtccttggacagcgcatgttccgttttcgccgccgcatcacggaccagcgcctcgtcggaggcatagaaataatatacggcacagcctgctttgatccgtttattcagttcattctcactgtatagcatgttccgtcactccgtcaaaaacagccgatgtgcccggccgtatggtcagttcagggatatctgccgcatacaaaaggcgtgcttcaccggcttcctccagccaggaggccgcccgggatgtatagaggatcgttccggcatcaatgttatccggataggaagccccggcgcagtaaacgtcaatggcaagcgcttcctccgttttgatgttgccggactggataccaacagtatacccgcttatttccatcactgcaaggttgccgccggaggtgtgccacagttccagtgcaacatcctcccagacttccacccgttcgacgccttcttcggcagtgtccatctcaatgacccggtcggcatcaaattccatttcccggggcgactgccgcatatctaccagaatcatctgcgaaagtccgccttcgtcggccaggtattcttccaccgcacggagattggaatccccgccccggaacaaaacaaccgcctgaccatcgtgtgtcattacagcacagccgtttcccgccgtgcctaccactgcgatacgcaccacatcccgctgcagggcaaatcccagcccgattgcagcggctgagcacagcaatgctgccggcagataccacagcatccgccgttgcttccagaatagcagcgccagaatcccaagcacggcaagcacaaacaaggtataggtttccggcagggcaaggcgcgcagccggcagtgacgcgcaccactgcacaacggcatacatccactttaaccagacggcaagcagcaggctgaacgctttcatacagggcgcaagaacgggcagcagcgaaaacagtaccactgcaattcccaagaccagggccgggcgcagcatccagacaacaagcaagttcgtcaaaacacctaccccactggccgtcatgtcatgggcaagcagaaccggcagcgtggcaaggcttgccaatatggtacactgcaacgtgccaagccctgaaagtgcaaacccgcgcagaagatctcctcgctccgtttccggctgaggaagtgctctgtcctcccatcgtgagattgcagatgccgcctgtacgccaaggactgcactgaaagaaagctgaaaccccagatcacacggaaaataggcgttttgcattcccagaacgattgccaccagtcccatggaagtcagcgtatccggcggctgtatcaaaaaccgccccagcagcgtgatgagaaaaacacatcctgcgcggactgccgataccgggaagccgatcaatgccatataaaatatcagcaaagccgcctgcatcagaatccgtggtctggaaaagcggcggcggatgtcccgttccgacacaagcagtccgcacaaaagcgccacatgcaggccggacacagccaaaagatgggacacaccggccacccgaaaggtatcttccacctcgtcatccagatatgtcttgtcgcccaacagcattgccgcttccaccccggcggtctgccgcggcagatacatccgcaagcggcgggaaagctccatgcgaagccggtacagcccgaactccagattgtcgctctcccccagatattcatatccttccagatattctgcgttgaggtaaacaccgtcggcataccggttcatgcggtaggcatccgcttccatttcttccagcgtgacccgtgcggaaaacatttctcccgcagatgctccgggaacggccgcacaatatacccagaggtccgcttcttcgccgtccagttccgtgacatggagcgtggcagagatcatgccctcccgataagaagcggtcgcattcgtctgaaccgttgcgacgatttcggcggtcctgccggagaggttcagcgccgggcgcaccacaaaccactgatacagcgtgctgcatgtcagggccagaagcacggccagcatcagcggcactgccacaacacgggcatcttcggaacggatggccgccatcgcacccaccgcaacgaaaatagccgctgccagccaaacagccgacagcggcagataagccgcggaaagttccgtcaatgcaaatgtcagaccaaagaccgcgagcttgcgcgccatatcaatggaagaaaagcggcagcggttccaggaagaagatatcggtgcgcttggctgcatcaccctccgccagagccgcgcagcagcccacaacggtgccggtgctgcgtgcggccagcgtctccagtgcatgcagagaaccgcccgtagagatcacgtcatccacaatcaggatgcgcttgccgttcatgcactcaatgtccttgcggtcaatgaccagcgtctgctttcctgccgtagtgatggattcatcctcaatgatgaccggatcgcgcatatacaacttcgctcccttgcgggcaggaatccactgttttccgctttgacgggccatttcgtaggccagaggaattcccttggcttccgcagtcaggatcacatcaaactccgggcactttttcagcagctcccgggcacaggccacagtcagttccacatcgctgaacatgatgaacgccgcaatgtccatatgatcgttgaccttgcagatgggcagctcgcgagtcagacccgccacatggagagtataggtatcttgcatgtttttcactctttctttttggcaaacataacacggatggccgtttctcagcccggaggccaggcaaggctgcgcttggccagcacatggaagtgcaggtgaggtacgctctgtcccccatccgcccccacattggtgacgacacggtaaccgccgtcacagccgagcttggcgcaaagggatgcaatcgtggcaaacacgtgtcccagcagttcggcatccgcttcggtcagagccgcggcagacgcaatgtgctgcttggggatgaccaggaaatgcaccggtgcctggggatcgatgtcatagaaagcgagcagacgatcgtcctcatacagtttgttggacgggatctcccctgccgcaatcttgcagaaaaggcagtcctccatgatattgccctcctttattgtggaatatggaaaatgccgttgtacttattgtatcgcaatcaagcatttttttccagttctgcccggataatgccggaaactgcagacaacgcctcgtcgattttggtattgtcccggataccggccatggcaaagtccggcttgccgccgccgttgccgccagcgatagccgcgatctgcttagccagcaagccggctttcagaccacgggcctgcgcgtttttgccaacgctcaccgccaaagtggtcttgcccgcgtcgctgccgatcagcgctgccacagcgttgggggtacggtcacgaatcttgtccagcataccacgcagggcatccgcgccggtgccggtgaagtaagcggaaataatacgcacgccgtccaccatctcggccttctcaaacagaccgtcgatcttgctggcagcaatgctggccttggcaatgtcaagctgtttgccggtctctttcagttccgccataacagccgccgcacgggtgggcacatctttgaggttgccgactttgagggtctgtgcagtctgggccagagcctcggtgcgctcgtccagcagacgcagaacgccaaagccggtggtagcctcgatacggcggatgccggccgcgacgctgctctcggacaggatcttgaagcaaccaatctcggaagtgttcttcacatgggtgccgccgcagaactcggtgctccagccgcagacgtccacaacgcggaccacatcgccgtacttttcgccgaacagagccatagcgcccatcttcttggcttcctcaatgggcaggttctggatgctcaccgggatcgcggcgaaaatcttttcgttgacgcggcgctcgacctcagccagttcttcgggggtgaccgcgctgaaatgggtgaagtcaaagtgggtgatcttgtcatcctggtagctgccggcctggtggacatggtcgcccaggacctcacgcagtgctttctggagcaggtgggtggccgtatggttgcggcagatggcggcacggcgtgcctgatccaccgacgcagtcacagagtcgccgaccttgatggtgccttccagaagagtgcaggtatggacaaagtagcccttgggcgtctttttgaccatattgacgcgcagcttggcgtcgccggaaaccaggtaaccggtatcggcgacctgaccgcccatttccgcatagaaaggcgtgcggttcaggacaaccagaacgccgtccttctgctcaatgtccgtagcaacagcatcggcaagttcttcaccctcagacagagccacgacttcagcgcgctcgtcggtggtgtcatagccgtcgaacacggtgggttcagcagtcagctcgccgaacaggtcggccgcccagccagagatatcctttgccaggcgctccgcacgggcgcgctcacgctgcttggtcatctccttatggaacgcgtcctcgtccacggtgatgccgaactcggaaacgatctcgcgggtcaggtccagggggaagccgaaggtatcgttgagtttgaaagcttcctcaccggagagcagcttttcaccgccctcgcggatcttttcgatcaggccgttcagaattgccaggccggcgtcgatggttttgtagaagcgctcttcctcggtgctgacgaccttcttgatatagtcctcatgctcgcgcagctcgggatagccctgctcgctggaggtgatcacggtatccaccagctccgtcaggaagggatggtcgatgcccagcatacggccatgacgggcggcacggcgcagcagacggcgcaggacgtagccgcggccctcgttggaaggcaggatgccgtcagacaccatgaacacggtggagcggatatggtcggtgatcacgcggatggaaatgtcgtccttctcgtttgcaccgtaggtcttgccggagatgcgctccacatggtgcagaaccgaggccacggtatcgacctcaaacaggttgccaacgttctgcatcacgcaggccagacgctccagacccataccggtatcgatgttgggtttggccaggcgggtataggtgcccttgccgtcggagtcgaactggctgaacaccaggttccagatctccatataacggtcgcagtcacagcccacaccgcaggtcggcttgccgcagccatactcgggaccgcggtcatagtaaatctcagagcaggggccgcagggaccggaaccgtgctcccagaagttgtcctccttgccgaaacggaccatatgatcctcggggatgccgactttcttggtccagatgtcatatgcttcatcgtcgtccaggtagaccgagatgtaaagcttttcggcggggatctcaagagtctgggtcaggaactcccatgcccagggaatgacctcttccttgaagtaatcctggaagctgaagttgcccagcatttcaaagaaagtgccgtggcgtgccgtgatgcccacgcgctcaatgtccggggtacggatgcacttctggcaggtggtgacacggtgacggggcggctcctcctggccgaggaaccactttttcatgggcgccatgccgctgttgatcagaagcaggctggggtcatccttcggaaccagcgggaagctgcccagacgcaggtggcccttgccctcaaaaaagtgcagatacttttcgcgcagatcattaagtcctgtccattgcatgtttttctgaatctccattccttgatactgtcaaagcgcaggccacaaaaaagatagcctccgcccctgcattacagggacgaaggctgaacgcttccgtggtaccacccggtttgcaggtcctgagacctgccgcttttcccgcattaacgctgcggacacgcccgtttcttccgggggctcaggggcggcgatgatccggtttccgtgagacgcttttcagccttgcagcgtcctctctgtacacgaaacttccgtgaaattgaccccgtctttgcctgttttcatttatagtgctattatatgccgtcgcaacggcaatgtcaaccattttccagtgcacacagcgcatcggccacccgcgcaaaaatcgcggcgctggaggtttccggttccaaagtcgcgtcctggagcaccgtgatcacgtaccggggttcctccgcaggataaaaaccggaaaaccagtaattcagaagttcctccccctgagagtcgtactgcccggtctgtgccgttcccgttttgccgcctgccgttccctctttcggtgcagcgtccgatccgattccctcttccacaacactttgcagcatatccctcaatacacgcgcagtatcctcgctgcaaacccgctgcggctgctgcgtcaccgccgcgtccagaagttccagtgtttcgctgtccacagtgccgcgcacaaatgtgggctgacgatagctgccatcccccgccaccgtgagcatcatggccgtcacctgaagcggcgtcactgtcagctgcccctgtccaaaggagaacattgacagctgtccgatgctttccaggctatccctgttaggaagtgtcccggcactcgatttcagtccgcccgcaacggcggtcgcccggccaaagccgaacttttccgccatttcaaggattctgtccgcaccaagagcctgccccaatgccacaaaatagcagttacagctttgttccagcgcgccgcgcagattcaccgtaccatgcgccttgccgagtgcgcaccggtatgtctggtcgcccacttcgatggaaccctggcagtcatgagtaaaccagtcaagccccgcctcataggctgcagcccccaaaaccaccttgaacaccgacccggcattgaacaccgagaacgcccgattgatgagcgaggtatcatccgcatcaatgcttttctggatattttccggatcaaattccggcatgctgacactggcaagaaccgatgcatccgagacatccgccaccaggatacagccgcgctgtatggaagtctgtgcaattccttcacaggctcgctggatcttggcatccagggtgagctggaccccggaaccgctgccctgcgtttccactgcaatgtccggcgacgtgccattgagcaggcctccctgagcagtggtcgcacattccacgacctgcgcatccgctgcgctgcttagaatgtcatcgtaggccagttccagccccgacaccccgtgtccgtcgccgtcgaggtagccgatcagatgtgtggcaatggggacttgcaggaagcgctgacggatgggataggtataaatcccgctgttattcagatcgtcagagacttcgatcaaaaacgggatggaactgtttcggttctcatataacaggttctgctgttcatacggaacatagggaaacagttccgagtagctggaatccccggggatacacagcgcataccatcctacctgcatcccggtaaggcgtatcccgttgcgatcaaaaaaatcgccccgttctctgggcagagctgtcgtggacgtcgtctgcgccccggctcgcaccgcataatcggcgtctgtggaaatccagagcacgcggcagagcacaataccgaacagacagacaaatgcggcgtacaaagcaaacaaacggcgtcgtgtcattttggctctccccttttctcaattcggtctccggctcaaaattgccgtcaaaaagaggatgcccaaaatatcaaaagccatacgaacagccgatgcaacgctcggcactccgtatggcttttcgccttttcactgttcagtttgctgcctttttctgcaatgcctgtaccacagcgcacaaaccagcaggatgcccggcataaagcccagggcatccaccagcacgtcactggccaggcaggcccgcccgggcacaaaatactggtgcagttcatcccctgccgcatagacaaaacaaacgattgccgcgtatccaccacagcggaacgccgcacctgccggtccgttccgccacagcttttccgcaaaggacgataccgtaagcgctgtgctgacccccagcatggcatacaaatacacatgcgcccattttcgcacattggcgtgaaagttttcactgaaccaggccggaaccatcgactgtgaagcagtgttttcctcgatctgctgtacaacactctgactgagcgcgtaagaccgctcgccttcctgcgaggacagcacgaatatcgtccccatcagcaacagtgtgacaacaagaaagatccactttttcacgcggtttcctcctgtatgtctttacaggatatgattgtcctgcaaaaacaccttgatttcctgtgcgtaacgttccgggtcagacagcaggctcattgcatgggccgctccggggaaaaccaccttgcgtcgagcccctgtccgttttgcactatagttttcatccagcatgaagaacggcacataggtatcggcatccccatggatgaacagcatgggggtgtcgccgctctttgccacagcctcggcaggttccacctgagagaagcggacacccgtgcgcagccatgccacccccatgcaggggtacaagagcagggccggcggcagatggtagcgcgtcctcatcacatacgccagctgacgcttcagactggaatatccgcagtcctcaaccacaaaggcaagaccgtgatccatggcgctgtgcagcataacggtggcggctcccattgactcgccgtgagttcccagcaggcagcttttgccgaaacgccggcgtgcccaagcacagaccgtcgccagatcatccgcttcccgccgtcccatggtggtcagggctttatcggatgcgccgtggttgcgctggtcatatacgatggtttcaaacccgaggtcacgaaacaccttggcgtacttcatactggagcagcggttttcgccatgtccatgtacaataaccgccacccgcgtgcgcccgtcctcatgcctgacctgaggatttttgggaatcagcgtgcagcgcagcttgtatccgtaacggcttttgatggtaaagtcttcacggttccagtttttctccatatcttcggggtcgattcctgagatcttgagttcttccctgcacttttctttggtatccaactgctgacggggtttgatcgcaatgtcagaaagtttccactccgccgcgaaaagagccgctgctcctaccgcgagatatttccaggcctttgccaaggtcgtcacctccgattctgatatccgatgccaaaaagcccaatgctttgacacagtgtcttgaattaagcatagcaagttctttgcttttttgcaagccacacccttgccctgttcttactatggtatgccgccgaacaatatcgtgacagtctcacttgtacagtatgacccgatttgctatctgctaaatcaaaaagcccggcactcacaaaagcaagtgtcgggctttatttattggattatgcgcacagggccatgttactggctattctgccccttaaaggaagaattagtacatacccatgtcgccgcctgcgggagcagccggagccggaggctcgggcagatcagccacaaggctctcggtagtcaggaccatcgcagcaacactggcggcgttctccagagcagaacgggtgaccttggtcgggtcgacgataccggcctcgatcatgtcgtcaacatagacttccttctgagcgtcgaagccgtagttaggcttgccagtctcgaggatcttgttgatgatgacgctgccttccaggccggcgttggccgcgatctggcgcagaggagcttccagagcctgacggacgatgttagcgccggtgcgctggtcgccgtccagttcggagatgaccttctcaacagcggggatggcgttgatggtggcagtaccgccaccggcaacgatgccttcctcaacagcagccttggtggcgttgagagcgtcctcgatgcggagcttcttgtccttcatctcgacttcggtagcagcaccgaccttgatgacggcaacaccgccggccagcttggccaggcgctcctgcagcttctccttgtcgaactcggaggtaacggtagcgatctggctgcggatctgagcaatgcgctcgctgatcgcctgcttgtcgccgttgccgccgacaatggtggtgttctccttggtgaccttgacctggcgggcagtgccgagcagatcaatggtagcgtccttcagctcatagcccaggtcgctgctgatgacggtaccgccggtcaggatggcgatatcggtcagcatctccttacggcgatcgccgaagccgggagccttgacagcaacaacattcaggccgccgcgcagacggttgatgatgaggttggacagagcgtcgccctccacatcctcagcgatgatgagcagcttgcggccggactggacgatctgctccagcagaggaaccatatcctggaacgcgctgatcttcttatcggtgatcaggacgctggcatcctcaaagacagcttccatcttctcggtgtcggtgaccatatacggggtgacatagccgcggtcgaactgcatgccttcgacaacctcggtgtaggtctcggcagtggtcttgttctcctcgatggtgatgacaccgtcagaggtgaccttttccatcgcatcggcaatcagctggccgatctcggcgtcgccggcagaaacggtgccgacacgagcgatgtcggtgctgcccttgaccttctggctgtgagacttgacagcctcaacagcagcggaaacagccttccgcatgccgcgcttgatgtccatggggttggcgccggcggcaacgttcttcatgccctcgttgacaagagcctgagccagaacagtggcggtggtggtgccgtcaccggctgcatcgttggtcttggtggcaacttcgcggaccagctgagcgcccatgttctcaaaggcatccttcagctcgatctccttggcaatggtcacaccgtcgttggtgatgaccgggctgccgaacttcttgcccagaaccacgttgcggcctttggggcccagggtgatcttgacggtgttcgccagctgatcaatgccggcgcaaagggctttacgggcttcttcgccctgtttaatctgcttagccataattctacgctctccttaaaatgctgttatcaaagattactcaacgatggcaagaatgtcgctctggcggacgatggtgcattcctcaccgtcaaccttgacctcggtgccggaatacttgctggtaaggactttgtcgccgaccttgacgatcatctcgacttccttgccgtccacattgccgcccgggccaacagccagaacttcggcaacctggggcttttctttcgcagtcccggtcaggatcagaccgcccttggtggtctcttcttcttcgaccagcttgatcacaacacgatcagcaagaggtttgattttcatagagaaacatcctcctataaataaaattcaaatcgagccattctgttttagcactcgctttccttgagtgctaaacatattgtagtcacttgccggcaaaaaatcaagccctgattttggattttttttgaattcacaaaaagtttatactttttctgccgcttcccgcttttgcagcctgtgatttcgcccaaagtcaggccttttgcacgcctctttgccttttattgatattctccgaaacccatttcccgtccggccatacatacgccttgtgaatcctctttctctgcgcctttgatggcagactttggcatacagcgccaatttcttttgttttatgcccttttgacagacttgtgccacagatgcaaaaaaacagccggagagcttttcccgctctccggctgttttatgtgttcaggcctggctcagtacggaagctgtgcctgatttttataacgcttgcgcaccgcgccatactccagatggggcgttccgccttccacagtatcctcgtcaatgacaacgcggataatggtggggtcagacggaatctcgtacatgatggggatcagcagttcctccaccacgctgcgcagaccgcgggcgccgctcttacgctcgatcgtctttttggcgatggcgtggagtgccgcgtcggtgaactgcaggtccgcgttatccagaccaaacagttccttatactgacgtacgatgctgtttttgggctccgtgagcacacggatcaaagcctcttcgtccagcgggtccagaacggtaaccaccggcagacggccgatcagttccgggatcaggccgaacttgaccagatcgtccggctccacgcggcggagcagcttctggcgagtctcgtccttatccaggctggtgcgaagctggctgccaaagcccagggacgcattgtcggtacgcttctggatcagcttttccaggccgtcaaatgcaccgccgcagatgaacaggatgttcttggtgttgatctggatgaactcctgctgcggatgcttacggccgccctggggcgggacattgctgacggtgccttccaggattttcagcaaagcctgctgcacgccctcgccaccgacatcgcgggtgatggagggattctcgctcttacgggtgatcttgtcgatctcatcaatatagatgataccgatctctgccttggggatgtcgtagtccgccgcctggatcaatttgagcaggatgttctccacatcctcgcccacgtaaccggcctcggtcagcgtggtggcatccgcaatggcgaaaggcacccccagcatcttggccaaggtctgcgccagcagcgttttgccggtaccggagggtcccagcatcaggacattggatttctgcagttccacactgctctcctgtcccgaaagaatgcgtttgtaatggttatagaccgacactgccaaaacctttttggcctggtcctgaccaatgacatactggtccaagccttctttgatctcggcaggcgtcagaatattgatgtcggcaagcggattggtggtgctgtgacgctgtgcggcagcgcggcgcgcctgagccttgggaggcgcaggacggtccccttccttgtacagggcgttatagcacatatcaatgcaatccttgcagatattaacgcccgggccgataatcagctgctcgacctggttctgcgaacgtccgcaaaaattacaaatcagttcccgttcttttccgtccttgccggaattttgatttgccatgaaaagcccccgtgctttcagtgtttcgagatgatcgcatccaccaggccgtaatccacagcctgctgtgcggtcatatagttatcgcgctcggtgtcgtgctggatcacttccagcggctgaccggtgtactcgctcagaagcgtgttcatgcggtttttgatgtggacaatgtgatccgcatggatcttgatatccgtcgcctggccggagatcccgccgccggaaatcagcggctgatggatcaggatctcggagttgggcagtgcaaagcgcttgcccttggttccgctggccagcaggaacgcgcccatcgaagccgccatgccgacacaaatggtcgatacgtcgcacttgatgtacttcatggtatcatggatggccatgccgtccgagatggaaccgcccgggctgttgatataaaagctgatatctttttcggggtcctggccctccagatacagaagctgcgccacgacaacgcttgcagagctgggattgacatcctcgctcaaaacgatgatgcggtcgttcagcaaccgggaaaagatatcgtagctgcgctcaccgcgcgcggtctgctcaacaacatacggtacaaggctcatagtaggtcccctcctgtacaaaaagagtcgtttgcattttttcacggataaacgaaccgatacggcagcaaacgtaccgtatcggtcccgtggtcgccggagtcagactcaggcgttttcttcttccttcacctgttcggtggtgatgttggctttttccttgacgaagtcgatcgccttgttgacggccagatccttcttcacagcgtcagcgtcaacgatggccttgaccttttcggtctccatcttgtacgcatcggcaatgcgctggacctcagcatcgaattcctcgtcgctggtgacgatgttctccttcgcaacgatggcttccatcgccaggcgcatcttgacctgcttctcagcctggtcagcgaactgagcacgcagttgatccatggtcatgcccatgtactgcagatacatgtccatcttcaggccctgctgggagagacggtactcgaagtcgcggaccagttcgtccacgcggctgtcgtacatagcctgggggatctcagcctgcatgccgttgacgacctgctcgatcaggtcgttctcgacctgctgatcggcctgacggtcgttgttctcctccatgcccttgcggatggaagccttcagctcgtcgagagtgtcgtactcgctgacgtccttggcaaagtcatcgtccagagcgggcagctccttgtacttgacttcatgcagcttgatcttgaaggtggcatccttgccggccagctcggaagcctgatactcctcggggaacttgacgttgatgtcaaactcctcgccagcagcgtggccaaccagctgatcctcgaagccggggatgaaggagttgctgcccagcaccagagagtagtgctcagccttgccgccctcaaaagcagtgccgtccacaaagccctcgaagtcaatgtcgacggtgtcgccattctcagccttgccctcacgggtcagcagacggccgttgcggtcctgcatacgagccagctctgcgtcaacagcgctgtcctccacagtcttgacctttttggtaacgcttaaaccagcgtagtcgcccagagtgacctcgggcttgacggcaaccttgaccttcagagtagcgccctcagcctcggacatggaaacgacctcgggctcgggagcaccgacgacctcgatgccggcggccttgacagcctcttcatactgagcggggaacagatcgttgacagcgtcgtaatggaaaatatcggcgccgtacatcttctcgatcatcgcgcgaggagccttgcccttgcggaagccggggacattatattttttgctttcacgcttgaacgctgcgctcacagcatttttgaaagtgtcggcgtcaatggaaaactgcagctcgaccatgcttttttcgagcttttcacaagaaatcagattcattagaatactcctccaaacatagcggtacaaggtattatagcacacgtctttgcagaatgccatagcaaattggaattttttcgtgcaattttgcgttcaggcgcgtatcttaagcgggcaaaaggcaatcccgtcggcggaaagcaggcggtattcgatgccgtcatgagttccctgcaccgcatatcgcagtgccttgccgtgcaggtgtccgtaccagcaccgggtaacgccatagttttgcagcacgtccacgatctcctgtgcgcaggcgccgggataaaccggaggatagtgcagaaacgccagcttgggcagattcccggccgcttccaacgacattttcagccgccctgcttcccgggccatgactttggcatcctgagcggcggtatcgtcaaagggccagccccgggttccacacagcgccacaccgtccacgatgcaggcgttattgtgcagaatatgcagtgaggaaaagccgttttcctgcaaaaaagactccatctttttgcgggttgtccaccaataatcgtggttgcctttcaaaagccatttctgccccggaaggctttccaaaaaagagaaatccgctttggtgtccttcaggtgcattgcccagctggtatcccccaccagaaccaccgtatcttccggggcgatcagcttgcgccagttggcttccagcttaggcaaatagccctgccaccccgggaacacatccatcggcttatcgccccccagagacaagtgcaggtcaccgattgcaaaaattgccatgtaccctcccgtatagcccgcggcctcctgtgccatactaacaggcgaaaggaggtcgacagaccatgaatcacgataacaacgtcatcaacggcatctgctgcgacgtcgagaactgcgtctataacaacggttcctgctgctgcactgccaaagagatccacgtcaagaaccgcagcgccgagtccggcgagaccatgtgtgagacgttctccgaagtctgacatcagtcttgtccgaaaaagccactgagcacacccgtgcgctgaggctttgaacaaaacggcgggccatccggtatgccccacaagaaaacacagccgcaaaacagcgtcaaaacgcccattcaagggcctgtgctttcttgtctcggcacaccgtccatggtccgccgtttgtgtcgttttgatcagcgcagggccgcgtcccggatctgagccggggcaatgatctcggtaaatcggaccggcatttcccgcaggcagctcagcgctgcgggcgcggcacagccggtcttttcggtcagcatccgcatggcctcaaagtcgctttccggtgcttcgctccccagggcgtgcagaacatcgcgggggaacttgaacgggcttgccgtggacagtacgaccatgggcgctgcgctgcggcaagcttccgccacgcagaaggccaccgccgtatgggtgtcgcagagataaccgtcgtgctcaaaccggtcacgaatctgctgtgcaccctgtgcgtcatcggcacagccgcaggcaaagctttcctgaatgcccgccagcgtctgcgcatcgacggtataatatccctgctcgttcaggtccttcatccaggcggcgaccttctcggcgctgccggatacatgatacagcaggcgctccaggttgctggagatcaggatgtccatggaaggcgatgccgtcttgtggaactcgcggcgtgcgtcataggtaccggtgcggatgaagtcggtcagcacgttattttcattggacgcgcagaccagacggcccacgggcagacccatgcgcttggcgtaataaccggcaaggatatcgccgaagtttccggtaggaacgcagaagtccaccggctcgccccaggcgacagcgccgttctccgccagacggaagtaggtatagaaatagtagacgatctgcggaaccagccgtccccagttgatggagtttgcgctggaaaggcggatgccgcgctgttcaagcgcttgcgccaccgacgcatcggcaaaaacttttttcacgccggtctgagcgtcgtcaaagtttccgtccaccgcataaacatggacgttttctccctgctgggtcgccatctgcaggcgctggatctcactggtaccggcattggggtaaaagaccgaaatctcaatgccctcaagcccggcatagcccgccaaagccgccttgccggtatcaccggaagtcgccaccagaatccgagtcgtctcagtgcggcccagattctttttgccctgaagcagcagcttgggcatcagctgaagggcgtagtctttgaacgcacaggtgggcccgtgccacagttccagcgagtacataccgtcatgcactttctccacatgaccggctttccccgcaaaggcagcgccgtaagtagtctccgttgcctgcgacaggaacgcaggttcgtagtcggtcaggaaagagccgaccaccttctcggcaagctgcgggtaggaaaggttcttccatgcctgcagatccgccttagggaaggactgaggaacatacagaccgccgtccggagccagtccccgaacaattgcctcggacgccgagacgccacatgctccaccgcgtgtgctttgataatccatgcctgaacaccctccatctttttattttttactgccatatcggtcaacaggaaaatgcgtcgggaatacaatggatctgccatgccccgttttgcgggaacacctcgaccacatcgaatcttacccgggaatcggaataagggctttgctggagataataggccgcagctgcgatcagacggcgctgcttgtgcgggccgaccgcttccgctgcgagaatgggacctgtccggctgcgggtcttgacctcggcaaagacgatggtatcgtccttgtataaaacaaggtccaactcccccatccgggtccggtaattatggttcaggagcagatatcctttccggatataatatttggcggcaatggcctcccccgtctgcccgagagtacggctcatttccaatacccctgctttttcaaaaagctgcggcgataaaacggctggatgccgtactgttcaatcagttcgtaatgcagcttggtgggataacctttatgcttggcaagctggtactgcgggtattgccgatccagttccagcatgtaccggtcacggctgacctttgccagaatggaggctgcagcaatggaagcgctgtttgcgtcccccttgaccaccgtctctcccggcagggacactgccggcggataccggttgccgtccaccaacacgtaagccggagccggttccagcccggccactgcccgtgccataccgtccatggttgcccagagaatatttttctcatcgatctcttccggcgacacaaacacgacctgccacgccagagccttttccgtgatttcctcatagagttcttcccggcgtttggcactgagctttttggaatcgttgaccccttccacgggattctgcggatccaggatcaccgccgcgcagcagacaggcccgcacagggggccgcgtcccgcctcgtccacgccgcacaacaagccatgttgcgtacggatctcttcgtcaaaggcatagagagcggtgctgtcaatcttcctcgaggccatcgtcgtcctcctcatgtacgatctgcggcggacgctccagcgagatgcgcccccatttgctggcacggaactcaccgaccagcatacgggcagcccgctcggaatccacctcaccgccggagaccaacattccccgctttgcaccgatggccagcaacaggtcatagggcggcagttccagcgcttcggcatccagcttgtatcgttcccgcaaacgctgaggataaatcccccgcacactgctcaaaagaccgcaggccagttcctcaatatccagaatatcatcccggatggaaccgatgaacgccaaattcgtcgccgtctccagagtatcgaatttcttccaaagcacgcccggcatgtccatcagatcgaattcatccaccgtgatccactgtttgccgcgggtgacaccgggcttatttgcggctttggcacgggcctcccccgcaaaggaattgataaaagtggattttcccacattgggaatgccgacgaccattacccgggtccgtgcaccggtcatgccgcggttgcggcggcgctccaaaagggcagaaagttccgcaatgatgggctttttcaccgcatttgccgattttttctgccgcgcatccatggcgatgcagcctgcatcggcggccttgaaatattccagccactgtttcgtgatatccggatcggccaggtcggccttgttcagcacatacaaatgcggtttgccgccggtaatgcgctcaatctccgggttcaagctggaaagcggaatccgcgcatccagaatctgcagcacacagtcaacattgcggatctctttttccatcatgcgcagcgtctttgtcatatggccaggaaaccactggatcacacggcggttaacgcccgacatatcgttcatcgctttcacgctcctttccgcgcggagtttttcacatccgcggcgtttcccctctattcttttatggccttatcttgtcatccgatcagaccgaatttatcaaacggcgtcaggcgcaaaaccgcctgtcccaaaacatcaccctcggacacacatccaatttctggggaacggctgtccttggagtcgttgcggttatcccccatgataaacagcatcccttccgggacggtaatggggaacgtgacgccctccgacaggaaggtcctgtctgccgtatacggttcctccaaagcctcaccgttgcggtaaacgatgccctgttcaaagtcgatatcgatcacgtcgccgctttttccgatcacacgcttgatcagcagtttgccgtaatcggtatagctgtcgatcaccactacatcgccgtattccggttcatagggcaagctggacaagagaagccgttccccatccaccaagccggggttcatggaggaaccatccacctggacgacacggacaccgaatgtaaacaccagtgccaggaccacaacggcaaaaatgatggaatcgacccattccagcaagccacggttggccttcattcgttccacggcagttcccctccttataccgcaaatcggcagcatacagttacagataataaaagaaaaagggagaacgaacagacgtcctccccttcttcttgtcgtcagatacgagccttaaccttggcagccttgccggtgcgctcacgcaggtagaagagcttcgcacgacggaccttgccgcggcgaacgacctcgaccttctcgacgaacgggctgttgaccgggaacacacgctccacgccgacaccgtaggaagtacggcgaacggtaaaggtctcagcgatgccgccatgcttcttggcaatgacggtgccttcgaaagcctggatacgctccttgtcgccttccttgatgcggacggagacgcgaacggtatcgccgatttcgaacttaggctgattctctttgatcatgccctcggtaagagtcttgaatgcgtccatgaatgttcctccattttttgcgacgttcatacccgaaaaatcggcagaggaccgcctgtttaatgatttgtcattatcccgccggtggtgccggcggcgctaacgctaaaatataatatcacaacgcagcatattttgcaagaactttttgtccttacagcttaagttttttataaaacggagtgatatccagggtggcaaagtagtctgccggggtctcggcgcggcggatcagcttatggctgccgtcctcgcacagaaggacctccgcgctgcggagtttgccgttatagttgtagcccatggaaaaaccatgagcgccggtgtcatggatgaccaggatatcgcccttgtcaattttgggcagcatacggtcaatggcaaacttgtcgttattctcgcacaggccgcccgtgacatcgtacttgtgatcgcagggagcgtcctccttgccaagcaccgtgatatggtggtagctgccgtacatggcggggcgcatcaggtttgcggcgcaggcatccacgccgatgtattccttgtagatgtgcttttcatggatggcttcggtgacaaggcagccgtaaggagccaacataaaacggcccatctcggtaaagatggccacgtcgcccatgcccgccgggacgaggatctcctcaaactttttccgcacgccctcgccgatggccatgatgtcgttgttccgctgctccggacggtaggcaatgcccacgccgccggacaggttgatatagcggatgtttgcaccggtgcgcttgtgcaggcggacagccagttcaaacaggataccggccagttccggatagtagtcatccgtgacggtgttgctggccaggaacgcgtggataccgaagttttcagcgccaagggccatcaggcgggtataggcttccgccatctggttctcgctcataccatatttggcgtcgccggggttgtccatgatgccgttgcccaggtcaaaggttccgccgggattgtagcggcaaaatacggttttgggaataccggccgttttctggagaaaatctacatgggtcaagtcatccagattgatataggattccagctcgtaggcctttttcatatcctccgcaggcgtatcgttggaggaaaacatgatatcactgccacggaagccgcaggcctcggccagcagcagctcggtatagctggagcagtcaacgccgcacccctcttcctgcaggatctgcagaagatacgggttgggcgtggcttttacggcaaagtactccttaaagcctttgttccaggcaaaggcctggttgacgcggcgggcattttcccggattcctttttcgtcgtacaggtgaaacggcgtaggcacatccgcaatgatatcctgcgcctgatccagcgtgataaacggtttcttgtttgacatacttcctcttcccctcattgctccgcatagcgaaagttcttcccctgcggatatgatacatcattatacggcttttcactgcacacggcaagcgttactgtccaatcatcgcaaaaaattcttcttccgtaatgactgggacccccaacgactgcgctttggtcagtttggagcctgccgcttcgcccgccaggacatagttggtctttttggaaaccgagccgctcgccttgccgccgttttgtttgatgagtgcttccgcttcctgacgggacaggcggctgagggttcccgtcacaacgatggtcttgccctccagtgctgtcccccgggcttccccgcgccaggtcatattgacccctgcgccggccagacgcccaatcaggtcggatgttccctctttggcaaagaactcggctacgctctgggccatgaccccgccgaatccgtcgatctgtgcgatctcctcctgggtcgcagcgcggatcgcttccatgctgccgaaacgttccgccaaaagggcggccgccttgtctccgatgttccggatgcccaggccgaacaccagcttatccaggttgttgttcttggagcgttcaatggccgtccggagattgctcgcgctcttttccttgaatttgtccagagacaaaagctgttccatcgtcagatcataaatatctgccaccgtatgcacaaagcctttgtcgatcagctgggcagccactgcctcgcccagaccgtcaatggccatggcatcccgggaggcaaagtggatcagattgcgcagaacctgggccgggcattccgggttgacgcagcgcagggcgctctcgtcctgcagatgcaccaccggcgcgccgcaggacgggcagacggtcggcatctggtacggcacggttccttctccatgagagacaacgccgatcacttcgggaatgatgtcccctgcttttcgtacctggacggtatccccgatccggacatccagcgacgcaatgatatccccgttatgcaggcttgctctcgccacgctggtaccggccagaaaaataggatcaaacacggcggtgggggtcaggacaccggtacgccctaccgtcacttcaatgtcccggaccaccgtctccttgacctcgggcggatacttgaaggcgattgcccagcgggggaatttgttggtgcttcccagacggtcgcgggacgccagatcgttcaccttgataaccgcgccgtcaatgtcaaacgccagcgtacctcgtgcttcgccgattgcctggatctcggtgatggcctcctcgatattatggtaaacattgtatcggggcgataccgggaatttgagttttttcagataatccagcgtttcgctgtgcgtcttgaaagacttgccgcggatctgctgcatattgaatacaaagatggacaacccccgcgacgccgtgaccttggcgtctttctggcgaagggaacccgcagccgcattacgcggattcttgaatggagttttgtcctgcagttcctgttcttctttcagcttgagaaaggcttcccgaggcatatagacctcgccccggacttccagaaattccggcgcgtcaggcaactgtttgggaatatccttgatcaccgaaaggttttcggtcacatcctcgccgaccacaccatcgccacgggtggagccacggacgagggtgccgttctgatactccaggctgaccgacagcccgtcgatctttgcctccacaacgtactccggttccacaccggcatcccgtacccgggcatcaaactcccgcagttcgtcaaaggaaaacgcgtcctgcaaactttccatcttgacggcgtgggtcaccttgctgaacttgctgctggcggaaccgcccacgtgctgggtcggtgacgacggcaccaccagttccgggaaacggctttccaggtctttcagttcacgggtcagcgcatcgtattcaaagtcttccagttccggtgcgtcctgatcgtaatacagtttattgttatactcaatgactttgcgcagttcttctgcacgctgtctggctttttccagttccatcgccttttcctccctgtccggttttattttcaaaggcatacacttggttattataacatacgcagcccgctttttgcatccgtccgcggcactttttgcctaccagattctaagcgtcgccctgggagtagtattccggtgttgtgccatccatcaccaggtacgccaccgggaccgtatcactcacatacaaaagatgggtatcgccgtccaggatcatgttgatcgcagtggtaagcgtcaggtcaatagagtattccaccttattgatctcgatctgccggacgctttcccggatctccccatccacgtatccgcgtggctgaatgcacaagctccagctcggcccccggtcgttgagaagtgcactgtccagcaggcttccccatggaatctccagctctgtttcgggcagttgctgcagtgcctgcgtcgccgcgtcgatgagatatgccctggcccggttcagggcgacggagtccgcctccacagaaagcatgtcaccatcctgtccataggtaatggtatacaggtcctcatatctctccggatgttcttccatttcccgggcaatcgccgtattcatggcctccaccgttgcggcacggctttcatattcggccagttcctgcaacgccggctgtatccgggcatccaatgccgtccctgcataccacaaaatcaccgcaaccagcaaaacactcactacgcgcagccgctttttcaggcgcggcattgtcggggtcgctctgcgcatcctccttccccctttcggaaaactgtcgtgtttccatgttatgccgcttttttgcccctggttccccgcaaacgcacagcaagcggagactttgacgcatttcaaagtctccgcttgtttcaaaacatattgctcggagcagctcggcacgggctgcccgtcaggcacaggaaggtctgcttatgtattgtagtgagccaggaaacgacgagtacgttcctcccggggatggtcaatgacctgatgggcaggaccttcttccaccaccacaccgccgtccataaacagaatacggtccgccacatcacgggcaaaggccatttcgtgcgtcacgataatcatggttgtctttttggccgccagttcccgcagaacacgcagcacctcacctgtcagctcggggtcaagggcgctggtaggctcgtcaaaacagagaatgtccggctccagtgcaagggcgcgcgcaatcgccacgcgctgctgctgaccgcccgaaagctgatggggatagtgtcccgcacgatcgctcagccccatctgctccagaaggccgcgggccttactctccagctcatcgtgaatcttgcggcggtttgctttgtaatccggccgctctttcgccagcagttccccggccagcatcacgttttccaacgcggtatactgggggaacaggttgaagttctgaaacaccagcccaaagtgcagacgctttttacgcttttcgctttccttgtgggtctgcgggtccgcagcatcccacagggtcttaccgtcgaccacaatgcgtccggtgtcgggtgtttccagaaaattcaagcagcgcagaagcgtcgttttgcccgaaccggaggagccgatgatcgccagcgcctcgccttttttcagggacagagagatatctttcagcacatgggtgctgccaaaattcttaccgataccggtagcttccagcaaagccatttctctgccctccttacttaaagtaatccagtttcttttccagcgcaccgaacaccaatgtcagcacaccgacaaagactaggaaaaagatcgctgtcgagaacagcggccagatcagtcccttggcgctgtattccttggccatcatgatgatttccttattggagatcacgttggccagcgccgtgtcttttacaagggtgatgacctcgttgcccatcgggggcaagatccgcttgatgacctgcaaaagcgtcacccggaaaaagatctgcggccgggtcatgcccagaacctgcccggcttccgtctggcctttggggaccgcctcgatgccgccgcggtagatctccgagaaatagcaggcatagttgatgacaaaggccaccaccgccgcccacaaacggccaaaactgcccgagggccacggcgtcccccagcccatcaggccggggccgagataaatgacaataatctgcagcatcagcggcgtaccgcggatgacccagacaaacgtgcgcaccacgccgcgcagcggcgcaaagcggctcatggagccaaatgccaccaccagacccagcggcagcgcaaaggccagcgtcaaaaggaaaagctgggtattcagccagaagctttccgtcaggcggccccatatcaccaatgcttcactcatgtttttccacttccccactccggacggccatcgccaaagctatgccccggtatgtctcaaatatacaaaggcgcctgcgcacaaccggcattgccgccgtgcgcagggcctgttggatacggtttagtccgcgagttccaggttgtatttatcggcaagagcctgcatggtgccatcttcacgcagagcggcaaaggcctcgttgaccgcatcagccacgtcactgcccttacggaaagcaacgccgtattcttcgacgttcagctcatccttgatctccagatcggtatagctggtgccttccccgatcatggcattggccagggtcaggtccagaaccgccgcctggcagcttccggccttgacctccggcaggcaatccgcctgggtcgccatggggaccagatccgcctgagaaagatttccttccgcctcaatggtctcctgaccggcagagcccgcctcataagcgatgcttgcgccgaccagatccgcagtgccggtatattcggcatccttattcatcacaatgacctgcgcgtttttggcataggcctcggtgcaggcagtgttttccataatgtcctcggtcagggtcatgccgttccagatgcaatcgatggtacctgcatccaattcaatgaccttggtctcccagttgatctcctggaattccggcgtaacgcccagcttttcacagaccgcagtagcaagttcggtgtcgaacccggtaaagttgccctcgtcatcggtgtagttcatgggggcgtagaccgtatagccgatgatcagcgtgcctttttcctgaatgtaggcaaggtcgctttcctctgcatcggtgtcaccggcagcgtccgaagaagtttccgccgtaaccgcttcgctgctgtcatccgctgcggaagttcccgcatcgccgttggaacaggcggccaggctcaaaaccagagcagctgccaatacggtgctgacaattcttttcatgatgatctctcctcctcaatcactgagccggctccgtgatttaacacagtaaaccggcaatgcactttattatagtaatataaacattggcattgcgcaagtagtcccggacaaaaaacagcatatatcgtgctgttttttgtatattttttcgatttttctgtttccgacacaaaaaaggcaccgtatttcaaaaagcagagaaatacgatgccctgatgaatactcaatatcggggttcgcccccatgcgccgggagctgccgcgcgtcggacctttgagtcagttcgactttttgcgcacggtatgttttttgcttccggaacgcggcgtcactttgcggccggtctttttgggagcgggctgcggacggatacggacaaactgaatgggattgccgttggagagcatccgctcttccacctccagccccggcagtacggccagaaaacggttcaggctcttgctgccgaagtttcgcacgtcaaagtccggatagcgcttgatgagctgatcgccgatccggctggtacgtacccagccggtgccgtcgtccatctcgtcgatcatgccgtgcaccaggcggcccacagaatcccgattgatggcggtatcgtcgctggctgcctgcaaggtttccgcagcggtcggcacgatggtctcttcgggcgtttcggtgttgtcgaggatcaggtcaaggtacttgaactggtcgcaggcttttacaaagggccccagggttttgctttctcccatgccgatcaccagcttgccggcttcccgcaggcgggcagccagtctggtaaagtcgctgtccgaagagacgatgcagaagccgtccaggtttccggaatacaaaagatccatcgcgtcgatgatcatggcggagtcggtggcatttttgcccgtggtatagctgtactgctgcaccggaatgatagagttgttcagcaggacgtctttccagcttttcagacggctgtcgctccagtcgccgtaaatgcgtttgcaggtagcaacgccgaaggacgccgcctcatccagaatggccttgacatatttgggcgaaatgttatcggcgtcgatcaggactgccagtttcaaatcttccaccggaaaggcctcctttatttcttgcggccgggcactgcggcgttgttcttgcccgcctgaccgcgaggttgaaagtacatatacagctggcaagggatcattccgttatagatcttgcgccgcttggtcgctttggctccgaagtgatcctcaaacgccgcgtcggcggtgatggcatacaatcccgaaccgggcgccagccgccaggcctgtcccagaacacgggccagagacgctgcctgttcggcatctcccaggcgctccccgtagggaggattggtcagcacaactgcctccggcgacgcatggaagtcctttacatccgccacttcaaaccggcaacgctcccccacgcccgccagttttgcgttggcgttggcaagagctaccgccgccggatcgatgtcgtacccgacgccttcaaacgccgcgtccatccgggcagcttccagggctttgcgccgttcctgcgcccagacatccttggagaggaatccgaatgcttctgccgcaaagcgccggcgcagacccggtgcgatattcagcgctttctgggcagcttcgatcaccatggtgccggaaccgcagaacgggtcctgcacgaaggtatcccggcggacatgtcccaggtccgcaatggccgcagccagcgtctccttgatgggagccagggtcgcgttgcggcggtacccccgtttgtgcagaccgtcaccggaggtatccagcatgatctccacaacatccttgcgcagagcaaaccggactttatacagtgcgcccgtctcaggcagaacagacacgtgatgccccgccataaggcgtttgacgatcgcctttttcacaatgctctggcaggcaggcacgctggaaagcgtgctggacaggctggaacccttgaccgggaactgcgcatccggcggcaggaggtcctcccacggaatgctgtaaacactgtcaaacagctcgtcgaaagtgaccgtgcgcgcggttttgagcagaagcagcacacgttccgccgtgcgcaggttcaggttggctgccgcaatcagcgaggcatctccctcaaacgcgatacggccgtccgtgaccttgatattttccgcccccaggcgcttgatctcaaaagacaaagtggattctgttccaaaaaaacagggcgcaacaagagtgtaacgctcaggcatagcaattcctttctgcaatgtttcaaatcatattgggttgccggcagataacccaaaaaggccctgcgtccaaatcacgggagacaacagagcctttctttgtttacgggtcagccagcgatgacaaatcagccgcggcgacgggaatatccgccccggcgattttcggtaacgcgcttcagatccgcgattttttcttcgctttgagtcttgtagcgtgccatcatatcctcaaagctcatctcgcccttgggctgggacggcttgggctgccagacacgcggaggagcttcgcggcgctgcggacgaggtccacggccattgcctccgccctggcgctggccgcgctcgggagccggctgggtgcgcttgatcgacagtgcgatctttccgtccggcgcaatgttcaggaccttgaccgaaacggtctggccttccgacaaaaccgtggaaagatcctggacaaactcatacgaaacttccgaaatgtggacaagtccggtcttgttttccggcaacgcaataaatgcaccaaacggtttgatgccggtaactttaccttccagaatgtcccctacctgtaatgccaaactgtaatacccctttttgctgttcgctgtattttcagaaaaaggcccgcaaagccatttctgtcacaaaaatcacttgccgctgatatcgtagaagatccgctcgttgggacgggcataaccctgttcccgggcaatgcgctcgatgatagcagattccccatcggaaagcgcgcggttcagttcctcattgtccgccttctgctcctcgacctgagtctggatggattgcagttcctggcgtttggaaccaatggtcacctggcattggatcacattgaccacaaggtatccgcacagcagacaaatcattgccggcagaaaccacttcggcatctttttgcgttttttcatggccgcgatccgccctccctccggttgtatcctcggcaatgcaggcaaatacgcctgcgtgtttttaattatataatatccgttttggattttgcaacatttttttctgtttttttctcttttttccctgctttcggcggctatgcttttgttttgccgaaaacgcagcctgtatcagctttcttttgatgggccgaaccaccttctgcgccgtccaatgcaaaggaaacgccaggattcgcagcaacaattctattccgcgatgcagcagcggcgatgctgtaacgctccatcccaatgttcccaacgccatggccgccgccatgtaccatcttgccgtaccgctggccgatagctgcgcggcaaaaccgcacaccgcaatcgcagcggcagcaaacccggcaaggtccagcacaaagcagacaggccggctttccccgaaaagcagccccagcgcgtcgcgcccggccgcgatgcacaacccgatgcccaggcaccagagcacgtccgtccagaccgcccaaaacggcggagaagccgtcattgccccctcacccgaacaagcgcttgaaaaatccgccggaagtctggcgattttccgcatactgcaaaaattcgatctttccggaaatatggacttctccggtgcgcaccgaaagttcccccacctggattccctgccctccgatggtcagatttccctgggtggtttccaacgccgccccggtctcgtcacagctgatgacccgtgtgacccctgtggcaacaagggtgtgccggttttccagcatcagggtatgtgcctggaccggaagttccgcctgtggtaactcattttgtctggccgccatgaccgccacctcctggtttctcggggcggcacaaaaggccgggcccgcacattcgcttggtttccctagctatatatgcgggcccgtttcaaattattccggttcagccggagatcacttcgtacaattcccgggcaacatccttgccgcggggttcttccaccgagagcacacgtaccttgacaggcttgttgccgaacgtgatctcgatctcgtcgccagtcttgaccgtgtagctggcctttgctgctttgccgttgacaagcacccggccggcatccgcgacctcattggccagcgtgcgccgtttgataagacggctcaccttgagatatttatccaatcgcatgtatcttcctcctgtgacggccgggccgtccgcgttacgatacgcaaacgcccgccgcttgggcaaacgtacgtccaaatcactttgggcttactttcaccttacagcggcgggcaatgctttttggctaacgcctctcttactggaccgcgtccttcagagccttgccggccttgaaagccgggagcttggaagcaggaatggtgatctcctgcttggtctggggattgcggcccttacgctccgggcgctcacgcacttcaaaggtgccgaagccgaccagggagaccttttcgccgttcttcagcgcctcggtgatggcgttgactgcactgttgacagccttctcggcatccttcttagtcaggccggcatcagcggcaactgcggcaatcagttcaactttggtcattgtttttacctccaagtaatttatctgcaaaaagcactttgcagccctccattccggcaggccgtttgctttttgactggtaatattatgccccggtgtccggggtctccggctgagggatggtttccattccagccacaaaccggacgttctgcttctgcagcgcctgttccgggtcgaccccggcagctctggccagtcttaccacttcaaacagcagctttcccacagcgtcctccgccatatccggtgcggcatccaccgcatcggcaagggcttcggacaggttccggtcattgaccggctggtcgcccaggcggcgctgtgcccgtttttgcagctttgccgcacgcatcagcgcaggcatcgctttgggcacgctttccaggtcctgagcaagcgtcgtgcgtcccttttccttattcttgagcgcatcccagtcgtttatgccttcgtttccgggttctgcgccaaaaatatgagggtgacggaaaatcagcttgcggcaaacgccgtcgcaaacgtcctgccagtcaaagcgttcccgttcggcttcgatgcaggtatgaaaaacgacctgcatcagaacgtcgcccaattcctcgcacataagctctgcatcatcgcagtccagcgcatccaccacctcataggcttcctccaggaagttcatgcggatggaggaatgcgtctgcacccgatcccaggggcagccggtctccggctggcgcaggatccggatgatctcgacgagatcatccgcggtgtagtgatctttcggctgatattctaccatctttgcccgcaaatcacaactgtgcgccgcaatgattgcagaacagtgcctcggcatcgacttcagagttgcacaccgggcaggtcttggtctcaccgcgggggcggtcaggctcctcctcgatgatttcttcctcctcagtcgccacgatgggttcctctgcctcagcctcagcggcttcggcctcggcgcgctcggcgggagtcatgtgtgccttgatctcctcgatgttcttctcgatctcggcaatggcctcaatgtacttgtcgaccagaggctggttctcttcacccgccttgtgcaggctgtaaaccagagcgccaagctgacgctgggacttggaaaggcgggcctgctggttcaggagttccagctggttcttgcccttatccgcaatgtcgatggcggtctttttggcggtatccataatctgaaggccctgctctttgagcatctcaatatccaattcaaacatgttatacacctctttctatgctaccgaatagcagctgccaggttgcaggatctcccggcagaatgcgccgggcggcagcttatttatctgcattatagcgtatccctttcggctttgcaacgccttgaaaggcctgatttgtgtacgtttcgttaattctttcggtttttccggccgattttgcggtttaaccgataaattctctcaaaatgctgcgctgcggcactgcctgcccggcaataggcgtaaacggctgcaactgagcgcacagcgctgccaggcgtgcggcatgtttgctttccgagtcgaccgtctccagcatgggaccaagcatgccgctccacagacagggctcataactgaaggaggtatccagcacaaggtccgcacgatttttgaacaccttgatataacggttttccgaagagcagacatgaggccacaggttgagtgtgaagtccgcaccatgtccccggaacagggcgtcccgggtcaggcggcgggccagccggatatcgcgggtcgcaacggtgcgcgccccgatggtatcgcagtattcttcccggaggctggcatagatcagcaggcgcgcggtctgcggcagatgatcggtcagaaccggattgaaggcgtggagaccttccacaatggctacgccgtcacggcagtccacatggtgcgtttttcccgaaggcttctgggtcaggaagtcaaattgcgggacatcgcactccccggtctcggccagctcccgcaggcaatcctgcaaaagcgggatgtccagcgcctcgacgcattcatagtcatcactgccgtccgggcgcttgggatagcggccttcccccacaaaaaagtcatccaggctgatgacctcgctgcggcggccgctgctccggacaacctccgccaaacgtttggccgaggtcgtcttgccggaactggaaggtcccgtaagcagcacaaggccgcggccggagtcaaggatcgtttcaacggcgcgccggacccgggcgtcgtactggttctcgcacagttccataaactccgcgggacgctgtgcggcaaaattgacgatctcactgctgatgagacgcttcggaatctggaccggcgaaatcggcatagaattgtttcactcctttcttgcgtgcaagaacggtgtcaaattgtccaatgtattcgttgggatacttataattgaagatacgctcgatcctggcgtgacggaccccgggctggaccagcttggtagaaccgcccgctcccgccgagaggatcgtatgtacttcttccatgatgtagatattgtaaagaccctcgtacccgggcttgcaccagcccacattttcaagattctggagggtgcctttctggcggtagagataatacggccgatagcccgctttttccagcaattcgcaatgggaaagcatccttgccacatcatcgtatgcatcgggacggtgttccaccacaagattggatgcccgtttgagggtcagcgtatggaccgtgatgttttccggttccagggagatggccgtctccaggctcttgcggaagccttccaccgtatcccccggaagccctgcgatcaggtccatgttgatgttgtcatggcccgccgcccgtgcttcggcaaagcagtccagaatatcctgggcgctgtgacggcggccgatatttttgagcacctggtcagagaacgtctgaggattgatggaaatgcgcgtggcaccgtattctttcagaacccgcagtttttccgcatcggtacagtcggggcgtcccgcctccaccgtgtactcgctcaggctcctgagatcaaacagctctgccagacatcccataagctgccggagctgcgccgccgaaaggctggtgggcgtaccgccgccaatatacagcgtcttgaggttaagtccgcagtcatccgcaacgtcgcgcatggcttccagttctctgcaaaggcagtccacgtaaggttggaccagcgcctgcgtggtcttgtccccaaccgtgcgggacacaaagctgcaatagctgcagcgggacgggcaaaagggaatgcccgcatagagactgtaatccatgggctttgcctgggccagaatcgggcgctggacttccgcaatgcgcagtgcggtgtcaaagcgttcgggcgtacattcaaagtggtcgacaaaccgctggcggatttcctcttcggaagcgcccgccgcccgcatatcatggatgatccggaccgggcgaacccccgtcatcattccccacggaggacgaatccccgtctgctcctgcaggaaatgatagaccagacggcacagggcatattcccggtcagcgggtgtctcctgcggggatgccgggcaggctgcccagcgcgcttcgccatcgagacgcaggtagaccatctgtgcgtgcgctttggataaaatcaggaggcagtcgccctccccggggatcgcctcagcacgctgcaggcttgaaaagaacatccgggctgtatgttccgcctcatatccggccatgccgttgaggatcagactgatcggttcctttgccattgctcagtaccactctcccaaaagatacggattttgccggcgctcttcccccagcgtggagaagtactcatgtccgggcatgactttggtctctccgggcagaggcagctttgccagcatggaaaggctgcggcgcatctccgcggcgctgccgcccggcaggtccacacgtccgcagctgcccgcaaagagggtatctccgctgaacagcacgccatcgcaatacaggcagacgcttcccggtgtatggcccggcgtatgccagatatggaattccagctcatcaatgcgcaggatgccgtcctcgggataggcctttcctatgcggggcagcgggaacatgggcggctttgcagtatccacaggttccacgtataccgctgcgccggtctgcttttccagctccaccaccgcgcctacatgatcgtaatgaccgtgggtcagaagaatatgggtcagctgggcgccctcctgcttcaggcggcggagatatacctccgggtcagcggcaggatcgatgacgatgccatggcccgcctgggtcagaatcaggaatgtattggtgaaaagcggcgcggaggccgtaatgtgaatgagattcataaaagtgttcctttccccgctgctgcggaccaggttatcggttccagtcgtcggtatcgatccagatcgttaccgggccgtcattaacaagatcgacctgcatatccgccccgaactctccatgttccactgcggccagcccttgtgcggacatctctttcagaaacgcttcataggcatccaccgacaacggcggttttgccgcacggataaagctgggacggcggccccgggcggtatctccgtaaagggtaaaattgctcaccaccagcgccgaatatcgcagctctgccgcgctgcggttgagtttgccctgctcatcctcaaagatgcgcagatgcgcacatttttcggccagtttagggacaatgtcaagagtgtcggtgtccccgacgcccagcaaaatcacaatgcctctgccgatggtgcggggttctcccccgttcaccgtcacagatgcgcgggagacccgctgaattaccgctctcataaaaacctccatccgtaccgtgccgcggttcaggccgcaggcaccggcacaaggaaataacaggaatctgtcacaaacagcgaaacgccgggatcttccgcgaagatctgctgccagcggttgtactgggactcatccgtggtaacgtagactgtggacggatcatattgaccgccgtccagcagttccccggcatccagcgcggactgttccgcctgaggatagctgccggataccgcaatggaaatattggttgcaagcccctgcttgcccgccaggatcgccagacggcgggtccggtcctccctcagcggagatgcggcaagcaggctgctgtgtccgctgcccagggtttgggtctgttcggcgttgaccacagtcgcttccaccggctgttcaaagatctgccgtttttgctgcgccacagccgaaagatcccacagctgcactgccgccaccgcggcaagcagaatgcacgccagaacccgcccccggctggaattgccgcaggcatcccggacgacatacacaccgaacagcacgatgcaggcccccaccagatagaacatccggccgctggaacggaagataccgcacagttcggtcagtgcctgcggaatgggaatgctgatttgccagcttcccagcgtcaggttattgcttgccgcaaacagcgtcaggaacgcgcacgccgctacaaggggaagattgcgccgccaccattgggccgtttgccggggcgagcgcaccgtgcgccaaaggctgtacagcagtgctgcgaccgccagtaccagcacgcccaaccccaggtaattgaagccgtcatactgtcccggatactgatgctgctggggcagaagtcttgaccatgtatatccgccgcgggaactggggttcaaaacggcgttgagattcatggacagttcgccgtagccatgacgggagacctctaccccgctgccaagtgcaccggtgatcacaccgcccgccaccgcggccacaaggctcagaccgaaaagccctgcccccgcaagccgcttgtgcgcgatgcgtgccagatcgacagccgctagaaggctgcacatcatgaccggcggcaggaaatagggatggatgcccaccgcggcaaaccccagcagcgggaaaatcacccaggcataccggggatgcttgccatcccgaagagcggtgcggtattccagataaaagtaaagggcaaaaaggaacagatactgcgacgccagtgccacatgccggaaagcccgttcccacaaggtcggcaggcaggcaaacagcagtcctcccaacgccgcaaatacgggcgccgcacgggatgccagcattttgccccgggtacacagcagcgcacctgctgcgccctgcatggcaaagcagaacagtgtataccagccgaaccactgaaaagtggagggcagtatcccgcgcagcagcttcagaccgatgctcacccacggaaggctgtccgtgtaagagatcatggtcccgtcgggcgctgccagggtatcgcacattcccagcgggaaggtccagtgggaattgcggaacagcagccagccggcatagtgctgctggatgtccgtctcatcgtatccgttgaggatccatccgtcgttggtcacgtccaaagtgaccgtgccgtacagcatcaaaaataccgcgatcccggcagctgcgccaagcagcgcgcacgccacccggccaagcacgatattccgatgtttccgcatacagtttcgctccattcaagtgcgcagaacgctgacaacgtccttgacctttttcagtttggccaccacgttgttcaggtgttcggtgttcatgatgccgatggtcatgctcatatgcgcgcgtccctgctcggcagcccgtgccgtcagcgagtaaatggggacccgcatatcagacagcgccaacgcaatatccgataccaggttgtcgcggtccatgcaggtcagttccagcgtggcgctgtactgttccttggcagccgtatcccagtaggcacgtacccagcggtcggtgttttccgggtggcgcatgctctcgtgaacgtttttgcagtcctttttgtggatggacacgccaaagccgcgggtcacaaaaccgatgatctcatctccgggcagcggagagcagcacttggcaaacttgatgggacagttgtcgatgccctcgaccacaacgccctcggaggaatgcacccgcttgatatccagcgtgaccggcttgggttcgctggctttgagacgggcgtactcgtccgtgattttggtgagcatgcgggaaagctgcaaaccgccgtagccgatggccgcatacatttcctccaccgagttgcagcggttgcggcgcgccagattggacatgaattcgtcgtaaagttccggcgggatggtcatcatattgcggcgcagttcccgctccagagcgtccttgccctgagcaatattttcttcccggcgctcctttttgaaccagttccggatcttgttttttgcctcgctggtcttgacgatgttgagccagtcacggctgggtccgcggttttcggggccggtgatgatctcgatgatctcgccggtgaccacctgatggtcgatgggcacaatgcggttgttgactttagcgcccaccatccggttgcccaccgcggaatggatggcataggcaaagtcaatgacggtggcgccggtaggcagattgatcacatcgccccggggcgtaaaggcaaagacttcttccggcagaagatcgctcttgatatcgctgagcaggtcggtggcatcggcgctggagcgctggctttccagcagctggcgcacccaggccaggcgctcctccagcttgtcgttggaagcggtgatgccttctttgtatttccagtgggcggcaatgccgtactccgcctgacggtccatgctccaggtgcggatctgcacctcgaagggcagcgcctcgtgaccgatgaccgtggtgtgcaggctctggtagccgttgggtttgggggtggagatataatccttgaaccggttgggcagcggatgatacatatcgtggatcaggcccagcgccgtgtagcactcggcaacgctgtccagaatgatgcggaccgcatagatgtcgtagatttcctcgaactccttgttctgcatatacatcttgcggtagatgccatagacactcttgacgcgatacttgatctttgcgttgtcgatcccgttttcggtcaggtgtgccgagatggtgttgcagacgtcatggaggaagtcgtccccgtgctcatccagaagttcccggatatttttatagccgatggggtccagatattgcaggctgcggtcttccagttcttccttgatgttggaaattccaagacggtgggcaatgggggcatagacctccatggtttccagcgccttatcccggcgcttttgctccggccaggcatcgccggtacgcatattgtgcagtctgtcgcacaatttgatgatcatgacgcggacgtcctggctcatggcaaggagcatcttgcgcaggttttccgcctggcggtcctccacattggaaaacttgatctgggtcagtttggtgacgccatccaccagaagggcgacttccgggccgaattttgcccggatatcatcgatggtgacgtcggtgtcctccgccacatcatgcatcagcgcggcggcaatgctctcgctgtccatgcccagttcaatcaggatctgcgcaacactgagcggatggcagatgtagggctcgccactgcggcggcgctgggtactgtgcgcctgttccgccagtgcataggcacggtcaatcatatcaaaatcataggggcgaccgctttccacaagtgcctgtttcagttcctcataggtgatcggcattttctcggtgttttccatcttccttcctcccctgtccgcttatttttcctgtgccgcatcggccggctccgtccccgcttccgccatgcggcgcaggatcggagcactcataagatctcgttttccatctactgccgccggaagataccgggccccgcggcgttccacaagcccgagttcccgcagggcctccaggctgacgagcagtttgcccgccttatcactgcccagggctgcaaagacaggctgcagatcctcggcatatacatttcccgcctggatcatccggtacaaggtcaccgtgtcagtcctcgcgggcaggaactcctgtgcctgttcttttgtcagggctcgtccggacaaaaagtcctccagctgcaccgcctgccggaccgggccgtcgtccaggcctgcaggacgcagcgcccggatatgcaccgacaccgccggaccgcttcggcccgcataaattccggcctccaccgcggcatccaccacggttcccacacggtaaggcaggtcttccggggccgtcccgaacaaagaggcaaagcagcaatcggccccctgccgcagacggatgcggctatggcgcttctcagcccccatgggccagacaccgtccaccactgccccctggatcaggaacagcggctggtgatttccgccgccaaacggagccagtttttcaagctgtgcaacttcctgtacggtaagctccgcaaccgccgccggggcgtccagttccaggaccggaggctgtgcttccgggtatgtctgcaccgcccagcggttgattgcctgccggaaagccggcagattttcttcgtcaatggtcaggcctgccgcagctgcgtgaccgccgtagcggctcagcagactggcacatccctgcaacgcaccgtggagattgaagctgcgcggtgcacgtccgctgccccggccttctccatcggcaagggagatcacaatggacgggcgtccaaagcgttccgtcaggcggctggccacaatgcccagcacaccgggatgccagttttcccccgccacaacgatcacacggtcatgcgcccgggaaggctccgcgtcaagctgactgagagccgccgccagaacttcctgctcggtatgctggcgttgggtgttgatctccgtcaggcgggcagcaataccggtagcctgctcctcattgccgcacagcagcagtttgagggcgatggccgcggtatccatccgtcccgccgcattgagccgcggcgcaatgctgtaccccaccgtctcggcggtgactgccttgcctgcacagcctgaagcctccaacagtgcagcaagaccggggcggacggtatcctgaagcaggcccaggccttcccggacaagggtccggttttcccccaccagcggcacaacgtccgcgatggttccgatggccgccagatctccgcagacatccagaagctcgtcggggtcacattcttccatagcggcacagagcttgaacgccaccccggcaccgcacagaaacttgaacgggctttcatcgtcgggacggttggggtccacgacagccaccgcctcgggaagttctcccgacggcaggtggtggtcggtgatcaccagatcgatgcccagctcttttgcataggcggcttcctccaccgccgcaatgccgttatccaccgtaacgatgagcttgaaacctttatccgccagctttttcagcgccgtacggttgaggccgtaaccgccctccgtgcgcagcggcagtttgcaccggacctgcgcgcccaggtttgtaaggtattcatacaaaagtgcggtggccgacacaccgtccacgtcatagtcgccgtaaatgacaatgggttcttcctccgcaagagcccggcgcagacgttccacggccttgtccatatccttgatgagatacggatcggacagcggtgctgtttcatccagcaaagcgcgggcctgctccggcgtgcggcatccgcgggagacaagcaccctcgacagcagccggccgcagcccgctgccaccagttcctgttccgcctgagcgtcctgcgccttttgctgccagacgcgatatcccatgttcctcattccttcctgtttcggtgggtaaattcgggcaacacccccgctttacccctgcgcgccgaaatcactggcgaaatcatgggtcaggccatcctgacggagcatggtttccagtgtatcgatctcggtggaaacgtccatggacacttcctcaagcagtgtatcgtacaatttgacgtaagccatattgagcgtgtgcaaaataccggtaatgtcccgccggatcgcctttgcgttttccgattccgttgcgctgagccccagagcggtatccagcagcttgcgcgtggtgggcagataatactccgaaaagcgccgcacccggtccagctgatccggatggttatgaatgaaaccaagaatctgtgcacatgtcttttccatctgcacaagctcctcgtcggccgcagggtccagtttgccctggcacttgccaaggtagcgcaaaaactccgcgccgtctttctcaaacagttccagtggggtcagggccggctggggttcccgcttcgttttggtctcgggcacgggggacggttcccatttcggggtgtagagctgttctttgaaatatacggtgttttcatcatcactcaggcagacccccggcaaggtaccgtcggctgccgccatggccagctcttttcgtaccgtattgacatccccaagtgccgcgcgggccagtgcaggaacggaacagacccagtcctttgcggcataaagataacggcgcaggcgcccataatagcgaaaacggctgacgcccattccgcccataatgccaaacccaacggtaaaggctgaaaacatcacacccaaaatggggaatatcagatattcgcttcctgtgatttccaaaggatttgcacccacagcagacagggccagcatcacggctgcggcaatgccgaaacatcctgcaagggtccatcctgtgattgccatagcgagccagcccgcctgtttggaactttgcaaacggcggtccatcgcgctgcgccactgagcaaacgtctgctctttctgcttgccgcggcggcccagcccattgccgagttcccccagaacatctgagagactgcgcaggaccgtggagccaatctcttccccggcggacacaatgtcctgcaccgccgtttcgagatcacgttcccagtcgccgccctgacggcctgagccggttgtctccccattgcggggcggctcctggccgccgttttccctgtaagggtggccgtatggcatagtatatacacttccctctttctgcaaactctgcgtcgttgttttgggtcaaactccaccgcgagacggtgtattgcgggacatcagctgtgcggcacagcgcacgccgtccaccgccgccgtcatgatgccgcctgcatatccagcgccttctccgcaaggatacagccccggcatgccgaggcactgcaagtcgccaccccgcagcaggcggaccgggctggaagtgcgggtctcaaagcccgtcagcaccgcatccggtgcgcggtatgcggccatttttctgccaaaagcccggagcccgtcccgcaatgcacccgaaagttcatcgggcagaaggctgcccagatcctgcgggacaatgccgcggggataggtgggctgcaccgatgccagttccagggcaccgcggccttccaagaagctgccgaccgtttcagccggagcggcatacggcgcctgatgttcccctgccaggtaggctgcccgttccagtttgcgctggaactgcaccgccttgaccgggtccccgtcaaaatcacggccgtccacgctgacgaccaccgccgcattggcattggggccgctgcgtgcgtggtagctcatgccgtttgtcacaacgccgccttcctcgctggcagcagccacgacccggccgcccggacacatgcagaaggtgtaaacacagcggtctcccacatgctggctgagctggtattcaccgcggggcaatgccgggtgtcccgccgcagcatgatacaggctcttttcgatctcggattgcaggtgctccacacgcatgcccaccgagaacggtttgcattccatgggcagttccatgccgtgcagcatggaaaaagtatcccgtgcgctgtgtcccaccgccagaataagcgtgtcgcaggggatttccccgtcgggcgttaccgccgcggacagcttcccgttttgggtgcgcaggccggtgagaggcgtctcaaagcggaccgtgccgcccaggcgttcgatctcccgccggatggatgtaattaccccctgcagaagatccgtacccacgtgaggtttctggcgccaggcaatatcctggggcgcgccgtgttccagcagcgcctgagtgacaaaggcgcagagcggatcgcccacgcgggtggtcagctttccgtcagaaaaggttccggcgccgccttccccgaactgaaggttcgcattggggtcaagactgccggtcttttcaaagtgttccaccgcctgaatgcgcttgtccagcgcagggccgcgctccagtacgatggggcggtatccgttgcgggcaagaagcagggctgcaaacagccctgccggtcccaaaccgcagacaaccgggcgatgcgcaaggggcatcccccctgtctggaaagaaaaaaccggtttgcgggaaatacagacatagggcgaggccccggcaaaagccgattcctcaccctcgtccttgagtgtgactgcgatcgtatataccagaaccggagcacctctgcgggcgtccaccgacagtttggcgacgccgcagtgtgccacccggcccggagccaggcgcagcattttgagcgccttggctccggcttcctgctcgccgcaggacagcggcaggcggatgtttctgactaggatcatactttgtgttatagctcccccttacagcaggttgactcttaattaccgggaagagatctggcactgcaccgtatagctgcctaccgcaaaaatgcgggaggacgacggcacctggatcgtgacgggaagcgtctgctggcccgccgagacctgaagattctggcagtcaagctgtgcaaccacactgtccggcagaagttgctcaatctcctccttgggtccgtagagcgtcacattgctgacacgctcagactgtacggtaatatcatagttgctgggcatattgacgacacggatattggggacattgatggtcacgcttgccatatccgaggtatcaaaactgagtgtcacgctggtggtatcatcctgagcaacaagaccgctgggaagttccaccggcagttgatagtcgcggtcaaaggcgaactgacggcccaggtcaaagctgatcacactgagctccgtcagtgcgctgaccgtgcgcgtcggtcccgcgaccaccatcgtctcctggctgagagtataatccaggctggaggtatcaaagccggtaggcacattgataaagtcgatggcaaggggcagttcccgcacctggtaaaccgtcagcgtgacgttggcgctgttggaatccagcgaagcatactgcggcgaaaccacattgccgttttcatcacgcatttccagcgaagtcgtaacgctggtgctgtcggacagttcgccgtccaccgtaaccggcgccaccacagaagtaatggagtcgagttcggactgcggtcccgagatcgtaacttccgccgggacggtgctgctgcgatacagcataaagccgtcggcaacgctcaggttggaactttcgaccgtgacaggcagggtcttttccccgatcttgtcaaacacaaccgtgacctgggtgggcgataccacctgcacctcaatgttattggtagaaaactgggaattggatacgcgggcctgcaggctgagggtctgctctcccgcgcccgtcaccgttgaatagttgggatatacgatcaggtcactggcctgcagctgaccgatgacggtgccgctgccttccacctttacctgaatgctgcctacctgctcggtctcgacaatatccagtcccagcgaggtgtacaggttggagttataactgtagctgatctccgacacggtaaaggtcttgtctccctccggatcgagcgtcagcgtgacgatgctccaggaaatgattgcgcacaaaagcgacacggccagaacaaacagcttactgtcccaaatggagtgctttttggccgcctgttccgctttgggtgctttatttttgcttaccatgtacggctgtgcctcctttgccgaaaagctgctgaaggatgctctgctccttgtcggcgccttcctccggcgggacaatctcctcctgcagcaggctgaacagattctgacggtccagacggcggatcaggaccccgtttttggccagagagatgatgccggtttcctcgctgaccaccacgacgatcgcatcggagttctcgctcatgccaaggcccgcacggtgacgggttcccatgtccttgcccatttccaggttgttggacagcggaagcacgcatcccgcggcgacgatctggccgtcccggatcacaacggcaccgtcgtgcagaggggtgccttcataaaagatcgttcccagcacttccggtatcacgttggcattgaactgagtgccggtatgtatgatctcttccagattgtttttgcgttcaaggaccatcagcgcgccggtgcgggtatccgaaagctgctccgccgcgtcgcagatcgccacaatggcgctttgccactggccgcggagggtaggttccatcttacgggtaaacaagagtttgtttgcccagttggtactctggcccagccgttcaagggttcggcgcagttccggctggaacaggaccaccgccgccacaaaggcgatctgcataacattgctgaggacccattttacggtgcgcaggcggaagtagaacgccattgcataaaatgccagaaacagcaatacgcccttgacaagctgtcccgcgcgggatttgcgcgcaaacaggatcagctcatagaacgccaccgcaatgatgatgacatccagcagatcccgtgtccagtcaaatgaacggaaattgctgatgatattgaccagctcattgttcatcagcgcgcagtcctcctctccctgccgtatcttacggcgtcccggcatgtgtcgggattcttttcagtatagcatacatcgtgccgtccgcaaagcgttccgaccgattttcacggttctttacccgatcagcgcaacggcatgggccgcaatgccttcccctgctccggtaaagcccagtttttcctccgtggtcgccttgacgctgaccgcatccacaggcatacccagagccgaagcgatattttcccgcatggcagcaatatgcggcgcaagtttgggtgcctgacacaaaatcgtcgcgtcaatattgccgaccgtatatcccgctttgtgcagaagctccccgacttcatgcagcagcatgagggagtcggcaccttcatagcggggatcggtatccgggaaatgcttcccgatatcccccaaagccgccgcgcccagcaaggcatcggagatggcatggagcaggacatccgcatcggagtgtcccagaaggccctttgcatacgggatctccaccccgccaagaatcagtttacgcccctcgaccagccggtggacatcgtagccatgaccaatacgcatacagctttcccctttcaaatcatcgacggttgtgattttgatatttccatagtcgccctgcgtcagccgaaccggaaagcctgcaagttcaaacaggctacagtcatccgtaacggcagaggcacggtctgccgtcaccagttccagcgcctgcagatacttctgccttgaaaagcactggggcgtctggaccgcaaacagtcgtgaccggtccggggtctgctgcaccgtgccgtcagagttgaccagtttgatcgtatccttgaccgccacggcaggagctgccgcaccggtccgggaagcctccgcgatggtctgagagatcacgtccgcgcttacaaaggggcgggccgcatcatggatcgccaccagttccccttccgccgcacggagccctgcgcagacactgtccgcacgggtctcaccgccggcaactacctgcgcaggctttttacaccgcgaagcgatctcctcacaggtttccttatttttaccggcaaccagcacaagctggcccacatccgggtgtgaatcaaaggcctgcacactggcttccagaacagtcctgccgtccggcaaacgatgactgagcttgtcaaatcccattctgcgtgatgcgcccgcggccacaatgatcgcggtgacatacggcttggcttgtggattcatggaatgctcctcctgtcaggcacaaaaaatgcagtgatatagtcctattatacaggcttacagacaaaaaatccaccgtcgcaccctgcctcggaaaataatttttacaaaaggcaaatcatatcaaaaaacctcccgcgccttatagaaaggctgtcgggaggctgctgatacatgatgcgccgggaaacgttccggccccatcacgccatatgcaagcgtcaggcgcggcgctttttatccagacggatcttgtccgagatcatggcaataaactcggagttggtgggcttgccgcggagattgtgtatagtatatccgaaatagctgttgagggtatccacgtcgccccggtcccaggccacctcgatggcatggcggatggcgcgttccacacgggatgccgtggtcccgttgcgtttggcaatctccgggtacaggcgtttcgtcactgcgttgatatactcatggtcctcgatggtcagaagaatggcgtcccgcaggaactggtatcctttgatatgcgccggcacaccgatctgatgcaaaatttcggtcacaacaagttcgtcactgtcctgggaaaaggtgatgtgctgtgcaggcgtccccgccgacttgagcacccgtgcagtcaggacactttcatcaaaaggttttacaaagaaaaaggaaaagccgttatcgagaagttcctgttccaccgcttcattctggaaagcgcccgtcacaaagaacgtagttttggggccctgacggccaacctgcgcttcatagcgctgcttcaccgtgatggcatccagatccggcatgaacgcatccagaagcgccgcctgcgggcgggtctccaaaagagtttccagcgccttggagccgttgcgctcgcaaaccgtcacagcaacgcccttttcttcaagggccgccttacacagtgccgagatgtcagccccggtgtccgtcatcacaaacttgattctctccataacatgcaatctcctttatgtgaatgtctgcgtcttcgtgacaatggaaattttaccatatttttccatatcttgcaagacagtttcgcgaaaaaatcggtcattttcaaatgttttgtccgactcttttcacgtcacaggctcacatatcgtcacaacagaccgaaattcgactttgtccgtgtgcaaacgtgctgtttcttattttggaaaataattgtctttatttcccaatcatgccattgtgtgtcagtttgtggctgttcctgccgtttgacaggcatccgccgcgctgagcatcgtttgtgcaaaaatggcatatccccgggacgggtcattgatgaggacatgggtcactgcccccaccagaaggccgttctggagaatggggctgccgctcatgccctgtacgataccgccggtggcttccagcagttccgggtctgtgacttcgatcatcatattccggttgggatcgctggcattgagattgacgcgctcgatccggatatcataaagcttggcctgtcctcccgcgatggtggtaaggatctgcgcttccccggcaacgacctcctgactgttggcaaccgggtaccgcgttccctctaccgaagcactcaaagttccgtaaactccggtctcatcgtttgccagaactgtccccaaaaccgtttccccggaaaattctccccgcagctctccgggcgcacccgccgtaccgcgcacatatccggtgacgttgacaggaacgatctcccctgagagaagagaaatgcttgtccctgtatcggtatcactgatggcatgacccagacccgcaaaagttccgcgctccgtatcggcaaacgtcaatgttccgattcctgccgaggagtcccggacccacacgccggccttgtatactccgttctgatccgccaccggcgtcagcatacatcggcattgttcgccgtcgcgcagatataccacttccatggcactgccggcggcctcggaaatcgccgcactgagctcgtcattattgcggacggcatgtccgcctgccgaaatgatcagatctcccagacgcagaccggcttccttggcgggattctcacttcccagattggtatacagatcagagaacgccacgaccagcgccccgttggaaaacattttgatgccgaaaggagtcccgcagacaaccacttcccggcgttccaccgaaaccgtgcgcaccgtttttacaggaatcaggtcaaacaatgccagtgtgcagttgccgctggtatcctggctgacatttccggctgcaatttcatgggatgtgctgcttttctctttcagccagggcatggatgcaatcgtaagcgactcgccctgctgtacataaaaagtgtccggcagcgagcgattgagcgcgtaaacgccaacccccgccgccactgcagcggcaagaaacagtcccgccgcccgccggaacaacttgtgcatttttatcatctccctgctttagagtatgtgcagaggcagggcgaattattgtattttttgtttttcctgttttttcgcagggcggtgatatcataaaaccgcattccgccgggagaattgacaaacacggtcccggttggtaaactaggtttcatggtcttacttctgtttccactataagatatgcgggtatggcggaattggcagacgcgctggatttaggttccagtgggcaaccgtgtgggttcgacccccactacccgtaccatattggaatgggctttgccccattcaaaaagcccagccttttggctgggcttttgatattttatgcacgcaatacgctttcgattctactcggttgttcctgtttgcgcccgtgtcgctttcagaccatcacccctatatctttgctttggaacaggctttctttcccggaaagtttggagtagaatataaaaaacttactgttccaagaaaggtgcctcatcatggaatttcaaatcatagaccaacaaacctggccccgaaaagaatactttgaccactacttttcggctgttccctgcacatacagcatcaataccaagctggacatcaccgccattttacaaaaaggcatcaagctgtaccctgccatgctgtacgcaattaccaccatcgtaaaccgccacagtgaatttcgaacctccttaacacccgatggcgaagtgggggtgttttccgacctgatgccctgctacacgttttttcacaaggacaacgagactttttcaaacctctggacggagtatcatccccggttcggagactttttgcaggcctaccggcaggacctggaacaatatggcgacatccatggaatggagccaaagcccggcacgccggcgaatacctttccggtctccatggttccctgggtcacctttgacgggttcaatctaaacctgcagaacggttacaattatctgctcccgatttttaccatggggaaatattataccgatcaggaccgctgcctgcttccactggccattcaggttcaccatgccgtctgcgacgggtttcatgtctgccgttttatcaatgaattgcaggagctgatttcgaaggaagaaacctttgcagacgtctgagccgggctttcctttgccgttacctcgcaatcgttcctggcgtaccgcaccattttatagacatccgttttcccagaaatggcgccacttttgatacacactataaaatacatgctataaaaacagagatcttcaccggcaaagtcggctgatgagatctctgttttttgtcttggcccatctttgcattatatttttgacacagcttctcgcagaatttttcacatttttatacttgacttagtcaagcaaagagcctatacttgaccaagtcaagaaaaggagttgactgttttcatgtttcaaactctggcctattacgccactgtattccatcgcagttttgtcggctacaccacagaacggcttcaaacgatgggtttgagcttcggggcactgtttccggtcatttacgtcggcaagcaccccggatgcactcaggcagagctgaccgccgccctgcatctggactggggctactcccagcgctgcatcaccaagctggtagagaccgggtttcttacccgggaaaaatcctcgcgtgcttatcacctgaatctgagtgaaaagggcaaggaagcttttgcggcaagtcatcaggtctttttcgattgggatgcagaaatgctgacggctctggacgaaacggaacgtgaacagctgttctctctcttgacaaaagtaatccggaaagaagcagaatcctcatgtatgaaacgatccaaagcccctacaactacggagggctgacgctgaaaaatcgcattctctttgccccgaccagccttgggctgtcccgggaggaaacactggaacggctgcgcagcattgcagccggcggctgtgccatgatcattgtgggagacgtccccgtcttgccccatggattcggaccttcgctgtacaccaaaaagggtcaggcctactaccgtgccatggcagatgctgttcatccttacggctgcaaactatgtgcacagctgcaccagtctgactccgatctgaaaggaatgatccgatacatccccggcgtactgaccaaacgaatctccatggaagagcttcgccctctgctcaaccagcaggtagggccttatatcaccggtttgtctgagaaaaagattcaccaaatcaccgaatctttcggccaggcggcagagcttgctttgcaggccggttttgacatggtccaggtccacggcgaccggatgtgtggaagtttcagctcttccctgttcaaccaccggaccgactgctacggcggcagccccgagaatcgagcccggtttgccgtggaagcagtctctgccatccgccgccgttttcccgaactgcccatcgattacaaactggcgatttgccaggaaaacccgcactacggaaacgccggtgtactggaagaggaactcccggtttttgttccgcttctggaaaaagccggggtcaccagtttccatgtgacacttgctaatcacggcgagttgagcgataccatcccgccgaaaagccatcccgaatttggcggcgaaggctgctttttgaaattctgcgacgaagtccgccagctgaccagcttacccgtctgtgccgtgggcggtctgaccgatcccgatttcattgagcagcagctggcctgcgggcgggtggattgcattgccatgagccggcagctcaccgccgatcctcagtggcccaacaaagtctgttccggacgcgctcgggaaatccatcgctgtgtccgctgcaacaaggaatgtctcggcggcatgatggcccatcggggcgtccactgcatttatgaaaggaaggaaaccaaatgagttactccattgtatacagcagccgtacgggtaataccgctctgctcgcccagaccatccgcgacacgcttcctgccagtgactgcgtctatttcggcgcgccggatgcaaaagcccttgccgccgacaccatttatgcaggattttggaccgacaaaggcacctgtgacgaacagctcgcccagtttttgcagagcctgagtggacaggaagtatttttgttcggcacggcaggctttggcggcgctcccgcctacttcgagcagatcctgaaccgggtacgggagaacctgccggaaaccaccgaactgatcggcagctacatgtgtcagggcaaaatgcccgcagcagtccgtgcccggtatgaggccatggaggacaatccccgccgggccgccatgatcgaaaacttcgaccgtgccctgagccaccccgatgcgcaggacttggacgcccttgccaatgccgtgcgccgttaagccaccgatttgtgctcgttctgttttttcacgccttcttgccccggccttccggccggggctttgttgtatcattgtagcaaccagggtattacctgctttcgcttttgctgcgccttcggtgttgcccgacaaacgaggcaaaatcccgtctatcggtagacagcactgtcgtatcatgctacaatatttcccagattggcggctttttacagcctttttcccggccgtaaaattgctttccgccatttgtggaaaggaacttccgttatgcacaataaaaagcctttgatttttctgctttgcgctgcattgctggcgttgatcgtcaagtacagcgatcaaattttccaggccgtgcggatggcgatgactcttctgatgcccattttcatcggctgtgccattgcgtatgtgctgaacctgctcattgtccggctggaacagctgcctgctcttgccaaagaaagcagtccgctttaccgttttcgccgtgtgctgagcatctgcggcgcgctcattatcattgtggccgttctggtcttgctggttgccatcatcattccccagttggtggatgcattccgcgtgatgctgctgggcattcctcccctgctggatgaattctccaagtggatcagctctttcggcaatcccacgccccagatccagcaatggctcaacagcctggacatcaactggccgcaatttttggagaaagccggcagttatttgacctccggcgtcggcaacatcttttcctccgctgtttccatcgtcagcagcgtgggcggcgtggtcatgcagttcatcatcgcgttcatcttcgcgctgtatctgcttgcaggcaaggagcgtctggccgggcagttccggtctttggccgaggtatatctgaaagagaaaacctatcagcgcctgatgtacctgctttccactgccaacgataccttttccaagttctttatcggccagtttaccgaggccatcgtcatcggtgtgctgtgcacgctgggcatgcttttgttccgcttcccctacgccaccatggtgggcaccctggtcggtgctactgccctgctgccggtggtcggtgcttatctgggcgccggtgtgggtgcattcatgatcctgaccgtcaatcctctgcaggctgtggcgttcctgattttcattgcgatcctgcagcagcttgaaggcaacctgatctatccccgggtagtcggttcctccatcggtctgcccggcatctgggtgctggccgccgtcacggtaggcggcgggctgggcggcattgccggtatgcttctcgccgttcccgtcaccgcaacactgtacaagctcatccgcagcgatgtccgcaagcgcaaaagtctgaccgccgaagctgaatccgagccggtcgcctgacctgcctgtccgccgggcagatatcttttcatcaatacaaaagccccgatgccgttaacgttgcggtaccggggctttttgtatgttgtttacgcggatgtttcagcgcagtcccgcgccggatgcaaagtctgccatggtttcggagactttgattttctgcgggcagatcccttcgcagctgcggcaggcaatgcacgccgcgggactcttctcccggggcatggcgcttacttcctgcaggattgaagcatccccgctgaaacggtattcattatacagcgaaagcagcgcgggaatgtccagatgtgccgggcagcgcgtggtgcaatagcggcaggccgtgcagggcagcacgccgcctgcggtcatgccgtccgccaccgagaccacggcatcaaactcctgttgggacagaggacgttcctcactgaatgtcgcaatgttttcctgaagctgctgcatgttggacatgccggagagcaccactgcaacgccgggtaccgactgctggaaacgcagcgcccacccggggaccgattcgtccgggcgaagcgaccgcagcttttccgccgccgaccggggcaggttggccaatttgccgccgcgcaggggctccatgacccaaatgggtacgccgcgctggttcagcagttccacccgggctttggcatcctgataatgccagtccatatagttgagctggatctggcagaattccaggtactccccgtaggtatccagcacccgcttgagggtgtcgtagttgccgtggcaggagaagccaaggtgccggatacgccccgcctgcttctgctcaagcagatatttcatcaggcccttatcctcgtcaaggtagccgtccaccgtgtcctcgcagacattgtggagcaggtaaaagtcgaagtattcgacaccgcactttttcagctgttcctcaaaaatttcaggagcacgttcaatgttggcaacatcatacccggggaatttgctggccaggtaatagctgtcgcggggatagcggccgagaatacgccccgtcacgatctccgactgtccgccgtgataagcataagccgtatcgaaataattgacgccgtttttcagggcatagtccaccatttcggcagcttttgcctcgtcaatgtcaccgtctccgcttccgtttttgggcaaacgcatcatgcccagtcccagcgccgacagcttgaggtcctgaaaatccttatacagcataccgtttcactcctttattttagcaatccaaggcggaccgttccccgttccgtatctcagtctctgtctgtcccgctttgagaacagcctgtatcacagttgtcctcacattttttgagctgatagatcagatagtcgagacagtccaccttttgctgttctttatgaagcacttccatcatgcggcagcgctggcagcgcagcatccggatcaattcctgcacgcgcccttcgtccagaagccgcagaaactgctgcgttttttcacactcacatccggcatccagcagatttctttccaccgcttcccgttgcgggaaattgcattttgtgcccatatccatcctccctcggttataaaaccatggccgcaagcacaaatgcaaacgctccgcttccttgctccaacgccctttcatcagagcattggggattttatccagcgtaacatcaatttgcgcatacgtcaaccatcccccaagctgcaccgtgcagatgcgggattctgtttatgattgtaaagcattcccctcgtattatcaaatacctatatcaaatgcgcagccatgcttgacagttatgaaaaaacgatgatatattttttctatcctatttagtaaaggagtgccgacggatggaactgcgcgtgcttcaatactttctcgccgtagtgcgggagcaaagcatctctgccgcagctgagacactgcatctgtctcagcctaccctctcccgccagctcaaagacctggaagaagagcttggcaagcagctcatgatccgcggcagccggcgcattaccctgaccgaggaaggaatgctgctgcgaaagcgggccgaagagatccttgatctggtacacaagaccgagacggagatcgtagactcggaggagaccctttccggggatgtctgcatcggcagcggagagaccgatgccgttcgcctgcttgcccgtgcggccgagaccatgcgccagttgtatcccaatgtccggttccgtatttccagcggagatgaatgcgatgtttccgaaagtctggacaagggattgatcgactttggactgctcatcggcgggacggatttttcctattatgaccacatggagctgcccgcccgggaccgctggggaattttgatgcgcaaagatgcgcccctggccgaaaaggccgctctccggcgtgaggacctgtgggatcagcccctgattctttcccgccagacctgcaacagctccgacattatccaatggctgcagcgcgaccaggaacagctgaatcttgtcgctacatacagtcttgtttacaatgcatcccttctggtcgacgaagggctgggctatgcctttgtactcgacaaattgatcaacacaaacggcagtgatctgtgtttccgcccgttggagccgccgctggacgtgggactgcatgtggtgtggaaaaaataccagccgttctccaagcccgcggaaaagttcctggaaatcttgaaggcacaggtgcaaaacaacgtccaaaagtgatctgtccagccgggccatgtcggcttgccgctttcctttttgggcataatatgctaaaattcgagcgttagtccgttttcccgcacctatcaacggaggtttttcatgctgattcaacgcctgggaatcctgcacctttccgaggattcctgtcgtttgcttgcccagcgcgtctactgcgcggggtttgccatgctgctgattttgagcgaagtgttcagctccaatatccagtctactctgcccaccctgagcaccttgttccgcgtgggtctgaccggctgcggtgttttgctgctgctggccaaatgcgtctttttgacccgatatgagacaaaagcacagtggggcttgctggcagcggtgatcgggtacaccggttttgccgcgctgtacggtgacgatcactggtttttgctggccgccctggtgggactgggagccaaagacgtggatctgagacaagcggtaaaggtctttctggccgtgactgccgccgggctggtgctggtacagcttctgcattacaccacgccccttgttcctttcaagtattactgccgcaactgggattacggctacggacactacaatggctacggtgcccggctgatgggtgtattttttgcctgggcctggctgcgctggccccggctgcgctggtatgactgggccggtctgacagcgcttttgctgtacaccatgtttgtgcccatctgccggggcgcaggcggcgcgatgttcctgctgctgttgctgttcgcactgcaaaaactgttgccccgcttttttgaaagcagaatctaccacggtctgctgctggccgtatatccccttttgacggtgttcagcgtgctggccggatatttctttgaccccatggcccccgatcggaccccgattttgaaaaagatcgaccggctgttttcgggtcgctttgagatctggcacaatgtgttctgggagacgccgctctctctgctgggcggtgttcccaccgacggtgacgagcaccattccatcgacaacatgtaccttgccctgcccatgaacaagggtctgctgggcgccatcctggtagccgcggtgttcctgatccttttgtggcggctgtgccggggacagcataccggcgaactgctttgcatgactgcccttctcgcctatctgctgatggaaaacaaggtatttctggtagccaccaacccgttccttatgctgctgccctgtgttttctttacctcaaaagaccgtgcactgccggtcctgtgtcctgttgtgcagcattcgccagaaccggtggccgccgcctcagaccgctgaatgcgccgacttactccatgtaacaaaccatccccgcgccatggctttcgggccgcgcggggatggtttttttctctctgttctgctgttttacacgcaggcggcaaaatctccgctgcgcagaacgatctggccgtcggctcccacatccgccgtcagggattcgcccggttcggtgtctccgctggcaatgcggtcggccaatgcctgttccactgcgcggccgactttgcggcgcagttcccgcgccccgtaagagggcgtctcgttgccggccagggctgccgcagcggcaggcgtatggcggagggtatatccctggacagccgcacgctgttccagttcggccagcaggcggtcggcaatgcgggtgagctgcttgggaccgagaggatcgaacaataccacctcatccatccggcccatcagctcggggcggaaataattctttgcctcctggagagctttctgggcgcggcggtcggtctcttccgcagcagcgccgaacccgaggggtgaagtctgccccaccaggcagcgcgcccccaggttggaggtcagcaggatgatggtgttggaaaaatctgccttacgcccctgcgcatccgtcaggcagccatcctccaggatttgcagcagaacgttctggatgtcgctgtgggctttttcgatctcatcaaacagtacaacactgtacggacggcggcggacggcttcggtcagctggccgccctcatcatgccccacatagcccggaggagaaccgatcatgcgggccacggtgtgctgttccatatattcgctcatatcaaagcgcagcaatgccttctcactgccgaaccagctttttgccagtgtgcgggcaagctgcgtcttgcccacacccgtcggccccagaaacagcatggcaccgatgggacgccctgcttcccgcagcccggtacggctgcggcggatggcggccgccaccgccttgactgcccgggactgaccgaccacctcctgagacagacggtcctccagctggcacaggcgttcccgttccgcttccccgacccgttccaccggtacgccgctggccttgctgaccacacgggcaatgtcctcggctttcagttccggcatggggccgctgcgggactcggcacaggaaatgcgcgccgatgccgctgcctcgtccagcaggtcgatggccttgtccggcagataccgccccggcagataccggacactcagttccaccgccgtatgaatggcctccttggggatggcgatgccatgataccgctcataccggggcatcagccctgccagaattttctccgcagcttccggtgtgggctcatccacaatgactttgccgaagcgccggtccagtgcggaatctttctggatggtgcggcggtattcctcctgggtcgtggctccgatgagctggatctctcctcgggcaagcatgggtttcaggatactggccgcatcgatggcgccttccgccgcaccggctcctgcaatgatgtggatctcatcaataaacaaaatggtggaacggtcccggtaaagttcttccaggaggtttttgaagcgttcctcaaaatcaccgcggtactttgtcccggccaccatggacgccatatccagagacaggacccgtttgccccgcaggctctgggtcacctggcccgacgcgatgcgctgggccagcgcttccgccagtgcgcttttgcctacgcccggctcccctaacaggcagggattgtttttctgcctgcggcacaaaatctcgatcacccgttccagctcggcatcccggcacaaaaccggatccagctgcccctcctgggcaaggcgggtcaggtcacggccgtatttttcgctgggacggctgccgcgggaaacgttcatccttggctgggccggcaataccagctgccccgaaagctgccggcattcccgggcggcctggggcacctccaccccgagctccgccagccatacgctggccgtgcaggcacagtcttccaacatggcacacaaaagatgctcgttctcggcacgggaggcccgcgccgcacgggcgcccagcacggcaaactccagcgccttgcggctttccggcgcaaggtccttggtcttgagctttaccggcgtgccacggcagctgcgccggccggcacattctagaagcgccgtctgcgttacgtttttcccgcgcagaaaatccaccgccgggccgacgtccgtttccagcatggcaagcagcaaatgtccggtatccgcgctggaacacccttcccgggatgccagtgtcagcgcccgccccaccgtgcggcaggtgcggcgcgaaagtcctttttgaaaatagagcataaccattcccccttggcaggcagtcaaacttgctgcggcaaaacctccaacgacagtataggcgaaggacgggcaaataatcatcgaaagcgggcaaaatccatgacagcggcttgccatacgtggtataataattgtcggatttttggcatcctggcccgggaccgcgaaagcggttctgcttttttcttttcgggatgccgaacctccgattccacggaaaggcaggaaggatatgcgtagattattccgatacatccgcggttacgaaaaagaaaccgtgatcgctcctcttttcaaaatgctggaagcctgttttgagcttctggtccctatcgtcatggcgacgatcattgacgaaggtatcaaaaatgccgacctgcccctgatttggcgccagtgcgggattctggtcctgctggccgtcgtggggatggtatgcagcctgaccgcacagtattttgccgcaaaatcggcattagggttcggtactgcgctgcggcgcgacctgttcgcacacatcaacaccctgtcttacaccgaactggacagcatcggcacgcccacccttgtcacccgcatgaccagcgacgtcaaccaggtccaaaacggcctgaacatgacgctgcggctgcttttgcgctgtccgttcatcgtcattggcgccatcgtgatggcctttaccatcagcccccggctgacgctgtggtttttgctcatcaccgccgtcatttccctcatcatttatctcatcatgcgggcaacggtgcctgtatatcataaatcccagagcgctctggaccgcgtcaccctgctgacccgggagaactatgtgggcgcccgtgtggtgcgcgctttctcccgccaggaggatgaaatggcggactttgccgccacaaacgaccggctgcgggatttccagctggccgcggggcgcatttctgcactgatgaatcctctgacctatctggtcgtcaacctgggtgtcatcgccgtgctgtggtacggcggccgcgaggtcgataccggtaccctgacccagggtgagatcaccgctctgatcaactacctgagccagatcctgctcaacctgctgcgggtggccgaccttgtcatcgttgctacccgtgccattgccagcgccctgcgtgtgaccgaagtcctgaacaccacctgcaccatgcctgatcccgctgccgcagacctgactgccgatgctttcgctcccgctgtggcgttcgacggcgtcagctttacctacaacggtgcgggcgcacccagcctggaaaacattaccctgcacgcagcccccggcgagaccatcggcgtcatcggtggtacgggcagcggcaagacgaccctgatcgatctgatcccccgcttttacgatgccacttccgggcaggtttctctgttcggccacaacgtccgggaatacgggtttgcccagctccggcgcctgatcggcattgtcccccagaaatccgttttgtttaccgggaccatccgggacaacatgcgctgggcgaaacccgatgccaccgacgaggagatctggaccgcgctggaaattgcccaggcagcggatttcgtccgttccaagccgggtggtctggatgctccggtggagactgcggggcgcaatttctccggcgggcagcgtcagcgcctgaccattgcccgggcgcttgttcccatgccccgcatcctgattctggacgacagtgcctcggcactggactacgccaccgacgccgccctgcgtactgccatcaaagaacgcacccgcggcatgacggtgtttatcgtatcccagcgcgcggcttcggtacagcgtgccgacaagattctggttctggacgacggcgcctgcgccgggctgggtacccacgccggacttctcaaaacctgcgatgtctaccgtgagatctgcctgagccagctttccaaggaggaggtgtcccgcacattatgagcaaacagaaaaaactgcgcacggcggacaccgccaccatccgccgggttctgtccctgatttttccttaccgtgtatcggtgtgcgccacccttgtgctggctgccgtgacggtgatctccacgctgtacgcgccggttctgaccggacggggcgtagacctgatcgtcggccccggagatgtggattttgctgcgctgctggtgttgggcgggcagctgcttttgaccattcttatcacggtggtcgcccagtggctgatgaacctggtcaacaaccgtatcaccttccaggtggtgcgggacatccgcgtcaaagcctttgagcacatgcaggtcctgcccctgagttatatggatgcccatcgccccggtgacgccatcagccgcatcaccaccgatgtggaacagttctccgacggtctgctcatgggatttacccagctgtttaccggtgtgctgaccatcctgggtaccctgggcatcatgctggtcattgagtggcgtattgcccttatcgtggtgctgctgacacccttgtccatttttgtagcccggttcatcgccgagcacacctactccatgttcaaggtccagagcgagacccgcgctgagatgacctccctggtggaggaacttgtgggcaacgagcaccttgtccgggccttcggctacgaatcccgggcagaagcccgtttcgagaccatcaaccaggacttgcagcgctgcggcgtgcgggcggttttcttttcttccatttccaatcccgccacccgtttcgtcaactctctggtctatgcggcggtgggcgtcatcggcgcatttctggccatcggtggttccatcacggtaggtggcttatacgccttcctcaactacgccaaccagtacaccaaacctttcaacgacatttccagcgttatgaccgagctgcaaaacgccctggcctgcgcacaacgggtgtttgatctcatcgacgcggagcccatccgccccgacgcgcccgacgccaaagttctggcccacggcgccggacaggtggagtttgaccacgtcaagttccgctacgttcccgatgtaccgctgatcgaggatatgtgcctccgggccgaacccggccagcgcattgctctggttggccctaccggctgcggcaagaccacccttgtcaacctgctcatgcggttttatgagatcaacggcggcgtgctgcgggtggacggcgagcccatcgacggcgtcacccgggattccctgcgcggaaactttggtatggtgttgcaggagacctggctcaaggccggtaccattgccgagaatatcgcctacggcaagccggatgccacccgggaggaaattatcgcggcagccaagcaggcccgggcacacagtttcatctgccgcctgcccaacggttacgacaccgtcatcaccgaggacggcggcaacatcagccagggccagaaacagctgctctgcattgcccgcgttatgctgcgccgcccgcccatcctgattttggatgaagccacctcctccattgacacccgtaccgagatccttgttcagagtgcctttgaagaactgatgaagggccgcaccagctttatcgtggcccatcgtctgtccaccatcaaaaacgcagactgcatcctggtgatgaaggccggcaacatcattgagcgcggcacccatgacgaactgctggcaaagggcgggttctacgcccagctgtatcagagccagttcgccaagagctgactgcccacggcgcacatttgacgtcgccgtacacagccgctataatgaaacatattcccgggcagtgtcaaaattcccgggcaagtcacagagagggtgggagtcatgtccaacatcgtcattccgaagaactacaaaagcacgctgggcctgtacgatacgcagaaagccatcggcctgatcaagaccattttccaggagaaactctgcgcggcgctgcatttgaaacgtgttaccgcaccgctgttcgttgctcacggcagcggcttgaacgacgacctgaacggcgtggagcgccccgtcgcttttgacgtcccctgcctgaatgagaacgccgaggtcgtgcatagcctggccaaatggaagcgctatgctcttggcaagtacggcttccgtgccggccagggtcttgttaccgatatgaacgccatccgccgagatgaggagctggacaacctgcacagcatctatgtggaccagtgggactgggaaaaggtcatcaccgagcggcagcggaccattgattttctggaggataccgtccatgatatcgtggatgccgtctgcggtaccgcggatgagctgcgctggaagttccctgccctgaaaaagattgcactgagccgagacgtggcgttcatcacctcccaggagctggaggacatgtatcccgggatgacgcccaaggagcgggaaaacgcctttgtgcgggagcacaagaccgcctgcatcatgcagatcggcggcaagctgcgcagcggcaagccccacgacggccgcgcccccgactacgacgactgggcgctgaactgtgacattctgttctggcacaaagcgctgggctgtgcgctggagctttccagcatgggcatccgtgtcaatgccgagagcatgcgccgtcagctggaggaggcaggctgccccgagcgtgctgagttgcccttccacaaaatgctgctatccggggaattgcccctgaccatgggcggcggtatcggccagagccgcctgtgcatgctgttgctgggtaaggtccatgtgggtgaggtccaggtcagcctgtgggatgccgagacggtggaagcctgcaagcatgctgggatcgcactgctgtaacggctggtgccccgcgctttcgtaccgaaaagaagatacataaaaagtgctgtacccaaactgttgggtacagcactttttgtttgtcttgattggttgagagtcaggaatgggacaccgtttgccggcgcagcaggtccgccagcatctgagcgcttttggcccaggagtaacgagccagcactcccgccgcatcccggcctgggatgatgtcgtccacatcgccgtggttggagaacaggtcaatgtaatcggcatggctgccgtagatttcccgcatgcagggggtatcgctgacgacgacccggggtgcaccgcaggcgatggcctccagcggaggaataccgaagccctcatacaacgtggggaacaaaaacgctttgcagtttgccatgagggtctttgcctcgccgtccgagacatagcccagatactgcacgttgggcaggttttcaaggcccatctcccccgccgcttttgccaggttcccgccgcccgcaatggcaaacacagtgtccggccgggccttggccgcgcgcagtacccagggaaagtttttgtttttgagcaggttggacatggagaaataatactcccctgggcggagagccgtccacttttcaaagaccgccggatcgggctgagtacgctgcatatgctgccaggcgttgggaatgaccgatacctgctcaggatcgacgccgtaataccgatgcagctcggtgcgggagaactgcgatactgtgatgatatgttccgcttttttggcaatgacccggtattgcaggcggtgccacgcggcgctcaggcggctgcgggcatcggtataaaagtcgggccgtgcacggtagcagacatcatgcaccacggccatcccggagaaaccgaacagcggaatgacattgcaggtgcaaagtccttttctgccgttccggcggagatagcggggatagtcgatctgctcccacagcataccgctgcggctgccaaagggcacaacccggatattttgatactccggcgttttgacgccctgcggcaccacgatttccagttccccgggagacagaattttgtccagctccgccagcagttcaatggaataccgctggatgcctgacaccctctgggcgaaaaacgccccgtccactgcatacatttttgtttcctccgtcgtcagatcagcccgcagcgagctttcaaggcaagcacccttgctgcgctctcgtcaatgcgggattccgggatggtcccgtcctccactgccgccaccagggcttcgaaggcctcggccagaccattcggcatgagcagaatgtccgcccccgcctgtacggcctgcaccgcagcctgggcggcggtgtactgtttggtgatgccttccatggccagggaatcggtgacaatcacaccggtaaagcccagttcttcccgcaacgcttgcatcagctgcggagacagggatgctggcgtgtcatcccctgtaacttcaggcgcggcaatatggcctgccatcacaaggtccgccccggcatcgatcccggcggcaaacggcaccagttcacaggaaagtagttcctgccagcttttttgggtcacggcaagatccttgtggctgtcctccgccgtgtcgccgtggccggggtaatgcttgatgcagcacagcacgccgccgtcatggaagccctgcaccgcagcggctaccagttccgccgcctgctgcgggtcatgggagaaggcacgggcgccgatcacggtattgtcgggattggtgttcacatcggccaccggtgcaaaatcaagatcaatgccatacccggcaagatacccgccgatggtgttgcccatctcatatgcggcatcggtgccgccctcccccactttttcggcgtcggggaaatctggaacttcgtcaaagccagggtgattggccaggcgggctaccgtcccaccctcttcatccactgcaatgagcatcggggtctctcccgcctcgtgcagttccgtggtaaaagccacaagctgctgcgggtcggtcaggttcttgccgaacaaaaccaccccgcccaccggatactgttcaagctgccgccgcatggcatcggtcagcgcagtgacacccgcagcatcggcatcgttgatctggtcttgcgtctgctccgggtccagcgcgtcggggcggacaaagaacagctgcccgattttttcccgcaacgtcatgcccgccagcaaggcgtcaatttgttcatccgggggttgtgtggcttgcgtgtcaccggcagtatcgtctgtttgctgtactgcgtggggactttgcagcgcggaactttgcctggagccatccgaaacattgccggtacagccgctcaacagcacgccgcagccaaacagcagagccaaagtcaatggaacacgccgcatattccgcccgcctttccccgtaaggatgtcttgtacttatttgtgatatttcataccggcgttgatggaaaacgcacggtaaagctgctccgtcaggaccagccgcgccatctggtgcggcatggtgatccgccccatggagattttggcctgagccgcccgcttgacactgtcggacaggccatgggaagaaccgatgacaaaagccatatccccggagccgctcatggcccggtccgcgatcatggcagccagttcctcactggagatctgcttgccctcgatgcagagggccgccagatactcccctttccgtaaggaccccagaatcgctttagcttccttatccagggctttggcgatctgggcatccccggcatggcgttcatccacggccacttccggcaattcaatgatgcggaaattgcagaatgccgccagtcgtttctggtactcggccacaccggcagcgtaaaaagaagtgctgagttttccgatacagatcaggtcgatgttttgcatggctgcaccttaaaattctatgtaggggctgatctcgttacgactctgtgcctggatcagcacgtcccgtaccggttcgatgcccgccgccagcagcacattatagaccgtggtcaacgcaagctcgggggtgttattggtctggctcagatggcacagtgcaaactttttacagccgtcctgaatgagttccagcagttccgccgcacaggcacggttgtccagatgcccccggtcgctggcaatgcggaccttgagatagtagggatacggcccgccctgcaggctgaaccggtcatagttggcttccagcgccacaaggtcacagcctgccagattctgctgtactaccggcgtcagcacaccaaggtctgtggcaatggccatagtccgttcatccggcgtgcggatgcggtaaccgcaacagggtacgtcatgactggtgggaaaggatgttaccacaaaggagccgatttcctccgtgcggccgtccatggcaatggcctccacggcgggcggcagcgttccacgggattccagcatatccagcgtggccgcgcaaccataaacggggacgttataatgcttcaaaaaggtatccagaccactgacatggtccgagtgttcatgggtgatcaggatgccctcgcagtccgcgatggcaagtcccagcttgcgcaggccggtgagcgtggtgcggcagcttttgcccatatccaccagaagatatttttccccatgacggatcaatgcgcagttgccggacgaaccggaatacagtgtcgtaaacagtgccatgccttgtgtgaattcctctctgtctgattttgaggccgctcacaaaaacagggccgcagtcctgcggccccatgagcggtcaattttctccgcaaagggagacggcggcctttcgcccctgcccatggcgggacattacattgcccgcgtaatggtattgacggggatctcgacacgacggatgtccgcgccgagggcctgaagtttttcaacgatattttcgtagccgcgctcgatatggctggtctcgtcgatctcgctcacaccgtcggcggcaagggccgcaaccaccattgccgcaccggcacggaggtcaagcgcccgcagcggcgcaggatgcagctgctccacgccctcaatcactgcgacctggccgtccacctggatgctggcccccatgtggatcagttcatccacatagcggaagcggttttcccagatgccttccgtcacaatggaggtgccgtcggcgacgctcaaaagcaccgtcatcaaaggctgcatgtcggtggggaacccgggatggggcatggtcttgattttgaggggcttcagacgctggctgcagctgatgcgcagggaatcgtcaaattcctcgatggtacagccggcggcgcgcattttggccgtgatgggctccaaatgcttaggaatgatattgtgcagcgtcacatcgccccgggtgatggccgcggccgccatatagctgcctgcctcgatctggtcggggatgatggagtaaccgcagccgtgcatggagctgacgccgcggatcttgatgacatcggtgcctgcgccgtggacatcggcgcccatcatgttcagacagttggcaagatcgaccacgtggggttcccgcgcaacgttttccaggatagtgagcccgtccgccatgacagcggcgagcatggcgttcatggtcgcgcccacggagacggtgtcaaagaaaatatgcgatcccgtcagcttgtcggcactgacacggatcatgccgtactccaccgaatcctgcgctcccagggcggtgaacgccttgaggtgctggtcgatggggcgcgggccaagattgcacccgcccggcatagcgacctgcgcggagccgaagcgccccagcagtgcgcccaggaagtagtagctggcacgcatctggcgcgaaagctcattcgacacctcggtacaatcgatgtgggtggtgtcgatctcataggtgcttttgctgatcatccggatgctggcgccaagttcgctcaaaatttgcagggatgccatgacatcactgatacagggaaggttctcgatgatgcattttcccgctgccagaatggtcgcgggcaatatggccacagccgcgttttttgcaccgccgatggtgacatcaccggtgagcggatttccgccgcggatcacaaatttttccaaagtgataattctctcctttgcccagccgagcacggccgcggggatactttggggcagaaaaacgcccgcttcccggttgccggtccggacccgaagtccaaccggcacaaagccgcatggtttgctgtattatacaccaaaacggaagttttgaaaagtgctgcccttagtatttacaaaaaaagcgtgaaaaatcccaaattgctgccgccctgcacggggattttatccacaacgtgcaggggcagcacctaaaaatgggtcacatattggggaagtactttcttgcactgaccagcgagttgttgtaatacatctcaaagtggcagtggttgccgaaagagtaaccggtattgcctacgtagccgatgacctggccggcctccaccgcgtcgccggtgctgacggcaaacgccgacatatgtccgtacagcgtcttccagccgttaccgtggtcgatgatgacatagttgccgtagccgtagggatggttatgccagccggcatattcgatctttccgctgtcggctgcgatgatgggcgtgcctgccggtgcaacgatatcggcgcccttatggtctgcgctcatccagcggctgacgtaacggtaattgggtaccggccagtagaaggttccgctgcccacctgggcgaccataccgctgtcaaggcggttgcccacaatgacctgttcggtgaccggttccaccagggtattgatcttgacgatgctgacgtcggtgacctggccgtcgatgtacgtggtatcccggatgacttcctgctgaccattctggccttcctgaacgacgacctcttcaccgaagtcgtattcatccgactcggtcttgacgatatcgtacgaaacttcctcgatctcggaagtgcgttcgataaccttgacctgcagaagttccgcttttgcatcggacgccaccagggtctgcccttcttccagctcggtgtcctcgctggcaagatcggggttccagccctgcagggtctcaaaatcgacgcccaacgtttcggcggcttccccggcggtctggtcctcttccagcgtataggcggcagggtcggacttttggttcagcgtggaaatgaccgtctcataggggctgatggaggacaggaagtagactccgtccaccagcgtgatgtcgtggacaaattccacgcggcggttgaagtcgaaactgtcctcatagggttccttgacggcgtcgaggtacgaccgcagatggtcgccctcggtggtgacgaagctcagttcgccgtcaatatagactgccgtaccgctgccgatctcgtcgctggaagcgctcaggatggcatcggcgacctcgctttcggtcatgacttcacccgaaaccgccagcgtataagtgggcgtgatgtcccactggtcgtcggtggtttccacaccggcagcttccatggccgcacgggcacgctcgatacgggactccacatcgtcgcgggcgttgtcaaacacctgctcgctggacacatagcctaccgtttcgtcccctacgcggacctccagcagataggtgtagctgagctgggtgcggaccacccagaccagcatcacggctgccgcaacgggcagcacgtaggaaagtgcgttccagacaaggggcaggtatagttttgtaccgcgcttgaaatactggatcttttccgcacggatctgcctggcgtcctcatcgggatgctgttccggcaaggcgcggatgtggcgcagccccgaacgcatccgggcaaaaggttccagcagatcttccaaaaaggtgatgatgccaatggccagcggccggacgatcatcagcagaatggcccccacatgggacaggatcgccgcggcggcgcgcatcgtcgtacgcaccgtgcagaccgcggcatactccacccagaagcccaccatgtacaggacatcgccaatgagcgttgcgtggggcagtttatggatcaggtcgctgaacttgctgcggcgggccgcctttttctggcgcttgtgccagacgcggaccgttttcttgatgcggcgctcgtccagccacgcccgtaaccggcctcggggcggcttgggcgggcgggcggagccgctttcctgatgttgtttctcgtcgatctgagatttcaaagacgttctcctttgcaacagacgacagcccgccgggccatctcctacttacatattggggaaatagtcgtgtgcattgaccagtgtaccgttgtaagacatctcaaaatggcagtggtagccggtggcaacaccggtcatgccgatataaccaatggtctgtccgccggtcaccgactgtcccgtggtgacggcaatggacgacatatgggcatacagcgtgcgccagccgttgccgtggtcgatgaccacatagttgccgtagctccagtgggtgcccgccgtaacgaccacaccgctgtccgccgcaacaatgggcgtaccgtaatcggccagaatatcggtggcatagcgtccgttttcattccagcggctgacaccgttataattgggtaccggccagtagaagtttccgctgcccacctgggcaaccatgttttcgtccagtctggtgcccacaagcacctgctcggccaccggctcaataacggtagtgatatccacgatatccacggcggtgacctggccgttgatgtaggtcacgtcgctgacgacctcctgaaggccaagctgaccttcccggacgacgacctcttcgccaaagtcataatcgctggattcagtcttgactacgtcgtactggacgtcctccagaaccgactggcgctccaccactttgacctgcagaagttctgcggtggactccgacgcgatcagcgtctggccttcgtcaagccgctggtcctccccggtaagttcggggttccactgctgcaaggtctcgtaatccacgccgatggcgctggccgcctgggccgccgtctgggatttttccagcgtatacgttgcgggttccgacatctcgttcagtgtggaaatgaccgtatcatacggcacgatggacgacaggaaatacacaccgtccaccagcgtgatgtcatggacaaactccaccctgcggtcggagtcaaaggcatcttcgtaaggggctttgactgcatccagataggcgcgcagatggtcgccttcactggtgacaaagctcagttccccgtcaatgtacaatgccgtgccgtcgccgatctcatcgctggaagcgctcaggattgcgtcggctacttcgctctcggtcataacactgccggaaaccgccagcgtataggtaggcgtaatgttccactgatcgtcggtggtctcgacaccggccgcttccatgacggcccgggcgcgctcaatacgggactgcacatcgtcccgggcgctgtcaaacacctgctcgctttccacgtagccgaccgactcaccgttgacgcggacttccagcagatagttgaagctgagctgggtacgtaccacccagacaagaagcactgccgccgccaccggcaaaacataggacagtgcgttccacaccaggggcaggtacagtttggctccgcgcttgaaatactggatcttttccgcacggatctgcttggcgtcctccccggggtgctgttggggcagcgcgcgaatatggcgcacgcccgaacggaaccgggcaaagggttccagcagatcctccaaaaaggtgatgacaccgattgccagcggccggacgatcatcagcaggatgtcgcccacatgggagagtaccgcccccgccacccgcagcgtcgtgcggatggcacagatggtcgcatactccacccaaaagccaaccatgtacagtgcgtcgccgatcagggacgcatggggcagacggcggagtttttcgctcagacggctgcggcgttcggactttttctgttttttatgccagctgcggacggtactcttgatgcggtgtacgtccagccattcggcaaactttccccgtcctttattcctgtaacggggagaggattcttccgtatgattctgttccaatcgtttcttcgtcattttctctgatataatacgcaaacggcgtttggatttccactcccgctttttcaggggcaagctgccggatcagatcaaacagggtatccggctgcacccgcggcatcccgccggaggtgcacagttccgccatatccggcggcatcgggcagtcgatgcgtcgaggtttcccgtccagcggatgctggaaggtcagcgcggcgcagtgcagggcgtggcgggcgatccggtcggtatgaccgccgtaaagggtatcccccgccaacgggcagcccagatatgccatgtgtacacggatctgatgggtgcggcccgtcacagggatgcaggccgcaagggtatgtcccccgccccgtgccagaacccggtagcgggtcatgctgggtttgccgtccggggcaacggtgcgcccgatgatggagtctccgcggcgggcgatgggcgcgtcgatgacgccctcgtcctgtgggaggctgccttcggtcacggcaaggtagcatttttgcgccgtctgtgcaaggatgggcgcggcaaaagaattgcctgcacacagtaccaggccgctggtgtttttgtcgatacggttgaccgggcggaaaacgcctgtcgtaccgctttgccgcaaatgccacagccaaccgttagccagcgttctgtcagggtagttgagcgtcggatgcacggccagaccggcaggtttgtccagcaccgcggcaaaggcatcctcaaacagaatgccaaagtccaccggctggggttccacctgggtgggcgggtcggacggcagcgcaaaggtcagctgctggcccgccgtaagcggcatattggtgtggatgggcgcgccgtcggcaaaaaagccgccgcactggtgtttgaccgcacggatcagccccgccgaaagtccctgcgcacgcaggaagctgtccagacggcagccctgtgcgccgggcgggatctggcaggcaagatacagcatatgcgccctcccgcatcgttgtcggacacagccatgggcagggcaaagcccaccgcacggcagtgtatggatagattatatcacatcagccaccttgttgcaaaccaaaccggagccctgaaacttgccaaattgtgacggatgtgatatactgccacagaaacgagtggaacatacggcggcgggacggctttgtccgttctgaggaaagtccgggcttttcagaggcatgacaactgctaacggcagccgggggtgaccccagggatagtgcaacagaaatagaccgccgcgctttcgggtgcggtaaggatggaaaggcgaggtaagagctcaccagcgcactggcgactttgcggctatgtaaaccctgtcagaagcaacatccgtatgggacatatgcggagcctcgcgcgtcccggagatggcatgtgggatttcccacggagccttgcggcaacgcaaggtcaagatagatcgtcgtttaatacagaacccggcttacggtccagtcgttttcttaacgcaacacgcggccgctgcggtgggatcatccctgcccgcagcggccgcgcttgctttttctatgctttcacaccaaaaaacaggcagggcactcccctgcctgttttttctgtataccctgtcgtcacagcagcagctgaagcagcaatatccccaccacgccgggcaggcccagcaccgccgccgcaaaggccgtcagacgattgagcggcagcgtcacccccgtgtacggcgccagcagccccaccaccgcaagcgccgcgatcccgcacaccgcgcttcccaaaagcgccggcacagcgtgtttttgccgtgcggcacagcgtgctaccacaagcacgcagaccgctccggccagtatcaaaccgaggggcatggtccgtcacctccccgcaccgcgcgcaaaagcgcgcggtagcggcacatcagagccgcgcgctcataaaccagctgctcaatgcacagttcatcccccgcctgctcatagttgcgctcattggcggccagcgcctcaacgacgcgcttgagttcggcctcctgctcacgacgcaggcggtctttttgtttgcgccgcatacgcgccccctttccctgtgctttttcacagcaaaatgcagatcagtccgtcacagccgtcgttgatgatgcgttccaatgtgacctgcaggcggccacgggcttcctgcggcatatgcagcagctttgcctgcaggccctcgttgaccagctcgttcaggctcttgccaaaaatattggtgttccacagcttgccggggtcgctctcgaaatcctgaaggatactcttgatgagttcctccccctgctgctcgctgcccacgctgggagagatctcggtgcggatggttgctttcatgatatgcagcgacggtgcgctggccgacagtcgcaccccgtactgcccgccctggcggacgatctcgggttcctccaatgccagttcgtcgatgccaggcatgacgatgccgtaaccggtggcctccacctgatccagcgctcccttgatcttgtcataggcacgcttggctctggccaggctgaccacacagggcaaaaggcttgcctcatccacaatgtccaggcccgtctgttcacccaaaatcttataaaagatatccggggcgatcttgaccgagatatgcacgctgccggtggcaaggtccatgccgcacaaagacgcccctgtgatatattcacagtcgatgtccggctgtttgcccgccacgtcccgcatccggtgcacgcccgatgcaaattccagcatagcctcgtacaccgagctttgcagccagtgaccggtttccagcatggtgacccagggcggcatggtgacggcgatctcctgcaccgggaactcatacagcagccgcttgaggatagcatccagtttttcggcggtgagctgggtgcagttgaccgggcagaccggatgaccgtagtcccgttccaggccggcagcaaggctgcggctggcttcgctgtcggggtcggtgcagttgagaaggatcagatagggcttgccgatgtcgtccagctcggcaatgatgcgctgttccgccgacagatagtgttcccgggggatctccgcgatgctgccgtcggtggtgaccaccagtcccaccgtggcgtgttcccggatgaccttgcgggttcccgtttccgctgccaggtcaaagggcaccgccttgtcgaaccacgggcttttgaccaggcggggggcgttgttttcctcatggccgagggcgccttccaccatatagcccacgcagtccaccagccgcgcccggaagctgcccccgcccgaaagctccacttccacggccttttcggggatgaacttgggttccgtggtcatgatggtgcgccccgctgccgactgtggcagttcatcggtggcgcgggcgcgctgggcgtcgtttttgatatggggcagcagcatcaattcggcaaagcgcttgataagggtgcttttgccgctgcgcaccggtcctaccaccccgatatagatatcaccgccggtccggctggaaatgttctgatagatctgttcctgcgtcatttgtggtcctcctttcaaagcgccgcggggatcagcaggcaggtccgggcagtggtcatttcctgcaccggagttccgggatcgggttccatatgattggccgccgccaagtctttggcgcgggcgtggtagcgtttggcaatgtcgaacacccgctcaccgtccgacgcatagtacaggtaaagggccgggccatcgttcttgtcggggaattcctcccccaggctcacctcgcccaccaccggcacggcattgactttcataagctggccatccacggcgatctcgatctccacccgcagccggcctccgtttttgcccgacgtcaccttgcccaccgccgcatgagcatggaggcagtagtccgccgccgttcccgtccagctctggggcagctgccaggtgaacgccttgtcataacaggtaagttctcccctgatgtcggcacacaggacatgggccgtacctttgccgccgaagcaaacggtgccctcctgctcgccgggcatgggcagcagcgcccccagggtgacaaagcagcctttgacctcaaggtcagggtcgggaagatcgtcgcccgcctcggccagcaccgtctggcgcaaagagcaggcatcctccagcaggcggcagatcgcgccctgggtctcggtctggcagacggtggaataggcatccgccactgccgtgtactggacggcgcgccacagctcggcgtggagcttccatgtaaccgtcagcgcaggttccccgctgtcgtcggccgccagggtgcagcccagaacctcgccccagaagatacactcgtccccttccgctgcaccggggagttccagcgtctgccggatggggatctctttctgccgtccggtgatctcctcgctgcccgccgggcggtagcatgcctgtacccgcagcattccctgacagttgacctgccccgtctgcaccgtgcagctgtccggcgcgaacacacccgaaatatccaggatcacctcgtcggccccgggcagtgcaatggtgctctcggcggtgaaggtcttttcctccgccgcggcacagagtttgcccgccagcacccgggtccgctgctcgatgccgcagtcggccagagaggtcagcagttccagttcctctaccgcctgcaccgtcacccccagggcataggcaccccgcaggtcaatgcggtgctcgctgatggcccggcagttgcagtattccagctccccccagacccccgccgggcccgtctcatagcggccttccggcaggtccaccgacttttcaaaggggaacttctgctcaatgcggtagagctgagttcccgcctcgtccgactggtagtagacggtacagcgcaggtacccctccccctgccacttggcggcagcagtgtggttctgcatcagtaccggctcgatcaggcacttgacgatcttgaacaccgccggcagataatccgggaccaggatctcggtctccaccggcagctccagccttgtctcccatcggccgccgtaggcggcaatggtgtctttgaacaccttcaattccatatgcgtatgcccctttccacgctttcttgtgcatctatatgcgggggcggagcatttcagactagtccttttccctcttcatcgcttttctgacgcaggccgcaggccaaaaaaaacagccccgggcatccgaaaggatgttcccggggtttggggtatggctgtgttatttcaccttgaacactgcgcgcagcagccagctgagcgccttggggcatttcacgacaacgatctgcatggcatccacctcccatttcctcgtgtacgccattgtatgccgtttgccgaaaaatcgtcacccgtcggcgcgggtcaggaccacaaggccgctgccgcccgtacaggaaagaacagcggagggctccgtgaactcgttgctgacccccaggggatagtccggcgtcagggtcgcgtccgaaagcgagtagaacacaccggacatggaaacacccgtcaggctgccgtcaatggggaaaagggacagatacatccagtcgccgcgctgcaaggtcagcggacggccgggcagcaggtagtgcagctcgctgcgttcgtcggcaaggaggacctccaccccggcgcgggcaaggttcagccccgtggcaatgttggcaaaggtatgctccattcttgcgccgcccagtgcccccagcagggtcacctgttttgcgccgtgctccaacagccagcgcgccgcatagtgggtgtcagtatcatccttgacgtggggcagcacgaccatatcgccctgggtgtctggctgcggggccgagtcgaaatccccgacgatcagatccggcgtaacgcccaatatctccgcattgcggtatccggcgtcacaggcaacgatatagtctcctttttgaatgtaacggctcatctgcgccgagaccttacaggcagacagaatgacggcacgctgcatggcggtttcctcccttaaccaacaaaaagccgcaggtctgcgggcacacctgggcggcgtgccgccgggcctgcggcaaaaggcaattatttttcccagtctttgagctgggcagcttcctcgtacatggcaaggtagctgtcatagcgggtctgtgagatttttccctcggcaagagcctcgcgcacggcgcagcccttttccgaccggtgggagcaccccacaaagcggcactgttcccggtagggttcgaactccgggaaaaccagttccagttcttccttgggaatgcggcacaggcgctgggtctccaggctggcaaagcccggcgtatcggcgatccgtcccccgcatacttcaaaaatttccgcttcccgcgtggtatggcggccgcggcccagcttgcggctgatctcgccggtttcccgggccagatcgggggcaagggcattgatcagggtgctctttcccacgccggagtttccgcagaacgcgcacaggcggtctttgatccagccgcggacctcatcaagcccctcaccggtatcatagtgcaggaaaatcagaggcagactgctgccggtatacgcctgccggagcatatcagccgccgcaagatcggtcttggtgaccaccagcaccggctggacattctggtacagggccgacgccgccagtttgtccagtacaagggtactggggaccggctgggtggtgctggccacaataaacaggacgtccagattggccaccgggggccggacaaagacatttttacggggcaggatttcgtcgatcatattggcgtcggcattgagcaccacctggtcccccgccaccggcgtgatgccgcgcttgcggaagatgccccgggcacggcattcggcaatgccgtcatcggtgcggacatagtaaaagccgccgacgcctttcgtaatatacggcgtcatccctgatacaggaaggttccgtcagaacggtaaaccttgccgtcgccggtctggtagcggtcctcccagttgccgtcgcccaggtcttccgaccaggtcttgacgatagtgttgggatcgccgttcagctcgccgtcggtggaagtttccggtgccgtctcgggaacaccggaggaaacatacaggcgcacgctggaaccaatgcggacttccgtgccgcctgcaggagactggctcaggaccgtacctgccggctggtcgctgggctgttcgatgatggacggcaccagctgcatgttggccagggtggagcgagccttttcaacttcaaggccttccacggtgggaaccagcttggtggtctcgatcttgggctgggcaatatacagggtgaccgttgcgtcgccctccacctgctggcctgcctcgggagaggtgcgcaccaccgtgccggaggtcacgctgtcgtcgatgacaaagctgctcacaacgttattgacccccagatctttgagggcctgttccgcctcgtcctgggtcatgccgatgacagagtcggggatctgcacccaaagggtgccaaggctcactttgagggtgatggtctggccttccttgacggtacggccggacttagggttttgctgatagatcacgccttcatcgtactgggagttatactcatagacccagttgggggtcaaaagtgaataatactcggaggtgcgaaattcatcctccgtctgtccgacgaagttgatgagctgaacgtcggcgcggttggagaacagcgggttggtggagttggcaaaaatcagatacaccagaatgaaagcaccgatgacaaaggccaccgccatgcccaggaagatgggcacaacagagaacggcttggctccttttttgctcttgcgtttgtttttcacgtttttcccttttgcagacgtggtgggctgaccggcacggcgggcatcggcggtgcggatggcgccgcggcccttgctgtcgttgaccactttattgatggtttttccggggttgtcctgagtcatatactcatactcgaaccggatggacgggttgtgcttgaaggcgtcgatggcatccagcatttcccgggccgactggtaacgctcgttcgggtctttgttcatcgccttttcggtgatctgacgcagaccttccggaatgttgggtgcgacctctgccagaggacggggtttctccgagatctgcatgatggcaatggagacagcgccggtaccgtcaaagggcagcttgccgctgagcatctcgtacagcatgacgcccaccgaataaatgtcggtgcgggcgtcggtcttgtcgcccttggcctgctcggggctgatataatgcaccgaaccgatggccttgtcgctgacggtctggctctgggcgcgggagaagcgcgcaatgccgaagtccatcatcttgatggagccgttggccagcagcatgatgttctgcggcttgacgtcacggtggacgatgcccttggaatgggcatgttccagcgcgccgaggatctgcgtggcaaagtggaccgtttccttccaggtaagggccccgccgcgctgtttgaggtattccttcagcgtgatgccgtcgatatactccatcacgatatactgcatcttgtcagagaccgagacgtcgtataccttgacgatattgggatggtcaaggatcgagatcgctttggattcatttttgaagcgccggaccagttcctcgttatcaaggaactcctctttcaggactttcaccgccaccgcgttgcccgtctgggtatcctggccgcggtagacgtttgccatgccgccgacgccgatcaggctctcgatcagataacggccgtccagctttttgccgatcagattatccatttgtctcctccgttgattccacgcccatcagcaggacggtgatgttgtcctgaccgccgcccaaaagggcccggtccaccaatacaccgggtgcatcaaagaatgtggtttcctgtaaaatgagggcgatttcttcatccgaaaccatgttggtcagaccgtcggtgcacagcaggatgacgtcgcctttttcaatgccgcagcggttgtactccggcacgatattggccgacacgcccagtgcccgggtgatcaggtttttctgcggatgggccgcagcctgttcccgggtgatctgaccgctgtccaccagctgctggaccatggaatgatcccgcgtgagctggcggatctgtcctttgcggaacaggtaggcgcgggaatcccccgcgtggacgatatgcgccatattctcataaatgtaagcgcacacgcctgttgtgcccattcccagcatgtcagggtccgacgtagccttatcataaactgcgcggttggtaatgtcaaatccgcgcatgatgaactgcttttcctccccatggcgaagggtcttgagctggcgggcaaagtactggagcatggtatcggtggcgatcttggccgccacacggccgccattggctccgcccatgccatcgcagacgatcccccagcctgaaccgtccgtcagctgctggccgcagtagttatcctgattttcctgccggcagctgccgatgtctgttagcgccgcaagtttcatgtgtggtggttcctttccatcgtcattttggcatcctccctgcgcagctgaccgcatgccgcactgatatccgcacccaggcggcggcggatggtcgcattgacgccaagctgttcaagcatatcccggaaacggcggacgtttttgtcgtcggtagccgagtaagggctgccgtccacgggattgatcgggatcaggttcacatgggcgcccatgccccggatgagattggccagttccctggcggtctcgggcgagtcattgacgccgcgcaccatggaatattcaaagctgatgcgccgcccggtcaccttctgatagcggcggcaggcggggatcagtttttccagaggataggcgtcattgatgggcatcatgctgctgcgcatcttgttgttgggcgcgtgcagcgataccgacaacgtcagctgcagcttgcgcttggccagctcgtcgatcttgggcaccaggccgcaggtggacaggctgatgttgcgcataccgatgttgagtccgccggggcttgagatgatctcaagaaagtccataacgttgtcaaagttatgcagcggctccccgatgcccatcaggacaatgtgggagacccgctccccggtgtcgcgctgggcggtatagatctcggatgcgatctcccccgcggtcaggtcgcggacgcggcccgcctgggtggatgcgcagaaccggcagcccatggcgcagcccacctgtgtggatacgcagacggtattgccgtaatggtagcgcatgagaactgtctcgatgcagttgccgtccgccagttccagcaggtatttgatcgtgccgtcccgggaacactgcttgcgccggatggagggtgccgcaatggtgcattcctcccgcaggcgctccagcaatgccttgggctggtccgtcatggcgtcaaaatcggtgacgagtttttggtggagccacttatagatctgccccgcccgaaacgacggctgccccagggaggcaatatactcggcaagctgcttctgcgtcatggaagagaggcagcgtttttccatcaagatccaccttcttattataatgcattgagcggaaaatttctaaactctttctaaaattgctgtaaaaaagccgtcggaagcggttttgtggggcaaaaacagggttccccattcccccacctgcgcgccttgcggcacaaattccggcgtgaccacgcgaaattgaggatttgcttcgcagaaagtgcggacctgatcctcgttttcattcacgttgatcgtacaggtagaatacaccaaacgcccgttttgagcaagataccgagcggcattttgcaggatcttttgctgtaaagcgacaaggcttgacaggttttccagcgtcttgaaccggatgtccggctttttgccgatgaccccaagaccgctgcacgggacgtcgcaaaggacccggtcaaaggtaccgagcgcttcatcatattgggaagcgtctccgtgccggactgtgccgcaagtcacgccgcagcgggcaaaggcctgttcgatcagcggcagacggcttttgaccgcatccgcgctgacaagggtgccttcgttgttcatggcttcggcaagggtcaggcttttgcctcccggtgccgcgcagagatccagcacccgctcccccggctgtgccgccacacactgggcggcaaactgggacgccagcccctgcacatggaaaagcccctgtgcaaaggccttggtcgccgcaggcgatgccgggaatttgacggcaaggcaatggggccacgggccgggccgcacttcacagccttccccgcgcaggatttccgccaaagcgtcgtcctgcgttttaagggtgttgacccggatgaaggtgtccccacggcagtagaaggcctcggcaatggcaaaagcttcgtcgccgtagtcgcagtacaaaagtgccgccacttcgtccgaaaggctgtatcttacggccagccgctccaccggctccgcaaactccagcgtttcccagtcaaaggctgctgcacggcgcaagactgcgtttaccataccggctgcgctggtcttgccgaaggcttttgccagcttgactgactcattgacggcggcaggcagcggcacgtccaaaaactttgcctgtgccagaccggcacgcaggatggcccggaccggggcgtccagtttagccaccggtttgcgggtaaaacggtcgaggcagcagtcaatgagccgctggcgctccagcgtggtataaaaaatgctggccgcaaaggcggcgtcccgccgggaaagaggcgggctgcattttttcagttccgcgtccaggaccaggttggagtagccgtcccgctcctgatgcatgagcgcccggacagccagataccgcgccgtcacaggcagtcccccgctttgaggcggcgtcccgccgcccaggcagtgccgtccatggggcggccgccctccggcgtaacgctgagcagctgcaaggcgctatcggcgcaggcaacggtcagcggcttgagggccagcaccatgccgggctttgcgccctccggattttccgccgtgcggctttgcagcactttgacctttttgccgccgtactcaaagaaggcaaccggccaagggttcatgccgcggatcaggtcgtgcagcgtctgggccggtgtgtcaaagacaaagcgggccatctccttggtgaggggcggggcctgagtggcctgggcgtcatcctgctttttgggggtgagtttcccctccttcagaagttccaccgcccggaccagggtgcgggcgccgatggcgctgactttgtcgaacagttccccggaagtttcctcggggtcgatggggactttctccaccatcaggatgtcgccggtgtcgcagccttcatccagctgcatgatggtgacgccggtctcggcatcgccgtggatgaccgaccactgaatgggcgcggaaccgcggtacttgggcagcagcgaaacatgcaggttgatgcagccatacggggcaatgtgcagcagttccggcggcaggatgcggccgtaggccaccaccacaaccaggtcgggcgccagtgcgcggaacactttttccgcctcgccgtcccgcagggtggcgggctggtagacggtcaatccgtgctgtaaagcaagctgcttgacaggcggtgccgtcaggatctgcttgcggcccaccggcttgtccgcccgggtgtaaacgccgcagatctcatgcccggcgtcaatgagagccgccaggctctgggctgcgatgtcgggggttcccatgaacaggatcttcaaaaatacttccctccctgtactgcgcgatcagtcgtcgctctcgtcggggtagtcgtcctcataaaaatgctcggcaaggtccatgatggtgatgccgtccagatggttgttctcgtgctggatgcagcgggcaagcatgtcgtccgcttccatggtgaattccttgccgttgcggtcctgagccttgaccttgacgtgtttggagcgggagatggcaccgttgtgtcccgggaaggacaggcaaccctcatacagctccaccttctcgtcgctgagctcgagaatctcggggttgatgaactcgatgaacttgtactcgtaattttcgggcagttcctcgggcatatcacggtcgtccaggcagatgaacaggcggcgcatcatgcccacctgggggccagccagaccaaggccgtttgccgcgatgagggtctctttcatatcatccagcagcgtagccagacggtcgtcgaacttggtgaccgggcggcagacctttttcaggatgggatcgccatcctgtacaatagtgcgaagtgccatggaaaaatacctccaatacattcaagtgatacggcggcacggggctgccgtgggacgtttatttattctgtaaccaggaaaccacagccaaagccatgttccaggcaaacaatacaaaactgatccaggcggatgctgcaaaagcctgaaagaaatccgcccgggtagtcagactgccttccagcaggccaaaccaggactgcaagacgctgtgatacgggataccgtcctgcagttccggcacaagcgcccccgccagattgacggcaaagtctgttgtgacaaacagggaaatcaccagcagcacagcagagaccatgcggaggattcgaaccatcggggatgctcctttcagctgggattttgtttgtcacatatcgccgtcggaattgaagtcaatggcgacggtggccttggccggcagtttctgtttggcgtaatcgtccagcgccgcccgcatcagcgcgcggaaggcggcgtcgttacggcatttgatggtcagcttataccggtacttgccgttgagcattccgatattcatcggcgccggccccaaaagccgcagtgggatatccggctgtctggcggccaggtcggcaaggatgcgcgcaaaggcaaaggctgcctggcagaccgcgccctcctgcttgccggtaaatcccgtcacgcagaaggcacagaacggcgggtaaaggctgaacttgcggaaggcgatctcctgccggtagaaagcggggtaatcctgggaggccgccagtttgagtaccgggtgttccggcacaacggtctggatcagcgctctgccgggaagttcggcgcggccgccccggccaatgacctgggtgaccaggctgaacacattttcaaaggcacggaacccctggccgaacagcatggagtcaatgcccagtaccccgaccagagtgaccttttcaaagtcaaggcctttggcgaccatctgggtccccagcaggatatcatgctgaccggctgcgaactcggccagcattttctcgtgggagtttttctgaccggtggagtcctggtccatgcgcaggatacgggcgccgggcagaagctgttccagttcctcctccacccgctgggtaccgaagccgctgtaattcagcttgccgccgcattcgggacagtgctgagggaccgggcggatctgatgcccgcagtgatggcacatcagtgcctgctggggtttgtgatagaccatgggtacgctgcaattggggcatttgatgacatgcccgcaaactgagcacatgcccaccgtccggtagccccggcggttgagaagcaggatgctctgttccccgttttgcaggttggttttcagttcctgcaccaggcgggcgctgacctcccggggattcccggcagccagctccgcccgcatgtcgatgaaatccaccgtgggcagcggacggccgccataccgctgggtcaaggtgaccagccgcagcctgcccgactgggcagcgtggtacgtttcggtgcggggcgtggccgaggcaaagagcagcaatgcgccctctgccgccgcccgctttttggccacatcatgggccgagtagcgcggggcggactcgctctgataggtatgctcctgctcctcgtcgataatgatgagcccgatgtcccgcaggggcgcaaagaccgcgctgcgggtccccaccacaatgtccgccctgccggattggatcatccgccattgaagcaggcgctcggtgttgttgagtgccgagtgctgcaccgccagacggctgccgaacatctgtttcaggcggcggatcatctgcggggtcaggctgatctccggcacaaggaccagtgccttccggcccagttccagcgttcgctcgatcagtttcagaaacaccgccgtcttgccgctgccggtcacgccgtacagcagcgcagcccgggcctggtgagcggaaagatcgggttccagcgcgtcgtaggccgcctgctgttccggggagagctccagcggcctgggatcaaagggaatggacgcaaacaagtccagcagtttgtcccgctgctccaccgacaggacgcctttttcgcaaagggtcttgagggtggcgtcggagatgccctgctccgccagttcccgccggctgagcggcccgcttttcagggcctccaccgccgccacctgtttgggtcccggtttgggcttttggggcagttcccccaccagcgtgtagaccggctccgcagtgcgggaaagcctgctctgcatgacccagcgtccgtccttgcgggccggctgatactgggcgccgtaggggatcatggccttgaccgcctcgaaccaggtacagaatgtccggtccttcaaaaagcggaccaggtcaatgaggtcgggggtcaggcgggcttcctccggtgcggcgtccagcaaggtcttgagccgcggatcgggttccgcttcctccccctgttccagcacaacggccatgcgtggtttactgcccgcgccaaacggcaccagcaccatactgccgggccagatccggtccgccaattccggcggcaccaaataggaatacagcttatcaaaatggatggtggcatcgcttaccgccacttttgcgatctgcggcagacccgccgccccctttcaagccgataccccggcgaaagatcactccttgccgtgggcgatgtggaactgaatgatggaatacaggctttccgcgcaggaatccacctcaacgttgacgacatgctcgtcgtaatccaccgagttcgcgatctcggtctgggcgcgcttgagacgtttctggatggtctcctcgtcctcggtgccgcggtagcgcaggcggcgctccagttcctccatgttgggaggcagtacaaaaatggtcgttgcgccggggtacatccgcttgatgttgcctgcgccttccacttcaatcaccaggatcacgggggtcttttcccgcatatggcgctcgacctcgctgcggagggtgccgtagtaattgccgcaatagcaggtatgctccacgatctcgtcgcgctggagcttgccctcaaattcctcgcgggtgacgaagtaatagtttacgccgtccttctccccttcgcgcatggaacgggtcgtggcggaaatggtgcgggtgatctccggatgggtctccagaaggcgcgccacaatggtgtccttaccggtgccagacggtcccgaaacaacaaacaaatacttttctccctgcataacatccttatcctttcccatatgatacccgcttctgcctgattgcagaaagcgtcagtcctgctcttccggggcaggctgtgtatttccgtcaaaacggcccgccaccgtctccggctgaatggccgagaggatgacgtggtcggagtcggtgatgagtacggcacgggtacggcggccataggtcgcgtcaatgagggcgcccttgtcccgtgcatcctgcacaatgcgcttgatgggcgcggactcgggggcgacaatggcgatgagacggtccgcattgaccatattgccgaaaccgatgttgatgagcttcataaaaaactgtaccgcctttccggtccggatgcgcccctgcgcttactccagattttgcagctgttcgcggatcttttcgatctcggccttgagctcgaccaccagacgggtgatctccagatcctgacacttggagccgatggtgttggcttcccggttgagttcctgggtcaggaagtccagcttgcgccccacaggaccgtccccggaaaggatctggcggtactgcgccacgtggctacgcaggcggacggtctcctcgtcgatggcagtcttgtccgcaaaaatggcggcctcggtcaggatgcgtccctcgtcgatgttgcggtcgtcgagaagttccttgaggcgggcatagagtttatccgtgtaggcctgtacccgaccggcgctgttctgttcaatgccggtgaccagcgtttccaccgtggtcaggcggttaagcaggtcctcccgcattttttcgccctcgacggcacgcatgctcaggaaggcatcgacggcctgctcggccacggtacggacgttctcccacagggcttcttcgtccagcggcgcagcggtctgggacagcacgtcgggaaaacgggcgatcatgcccgcagtcatgtcatttttcagttccagacgctcggacagttccaccagcgcgtcatggtaacccttggcaagcgtccagttgaccgaaaccaccgtatcggcggcctcgacgctctgcaccgtcagggaaagctccaccttgccgcggctgacccgggcggagacgagctttttcagagggtcctccagaaaagagaaggctctgggaatgcgggaggaatactccagaaaacgcgaattgacgctgcgcagttccacggtgatgtcccggccgttcagcgtctggcgggctctgccgtaccccgtcatgctaagaatcatatcaaacacctcattttggctatggaaagtcataatgcgacattgtatagatgttatttattttactatctttggcaatgtttttcaagggtacaaggtgccggaacgagaatcccgcaaacgctcctggtagctgcggaaacaaaaaatggagcaagcgaaaacgcttgctccattttttatccttattgaccgcccctttttctacacgtcaattctttcttgacataaaaaattctctaaaaagttctacctttgtttcatcagattcatcttgcaaattactgtagttcagccaccagtcccattcatcaagcactggccaataaaatctgtttcgattttctaaaagaagctgtcctaattcaagtgctgcatcactagcatgaagcagcgcacaccaattcttaaatcctgcaagattggcaataagatgctgtgcgttcatcagcgtgaagtgattctcgtcaatatcatacgataaaatcaaatcatcgatatcatcataaaatctaggtgaataaaaataaattccatcaccatctacttgttgagtcttaaaatctcgaaataaattttttgcctgcaacttaaaataactaattttatccatacaacactcacctataatatgaattatttttagtgtcacctgtaaccactcaaacaaaacaaccatataggggtgggccttggacaataattgatggctgataaaatctttgcacaggtaagctggttagccaaataaccacttttatcatattagacctacacatcaatgtcaagaacaacgagcaaaaaataaaaccagaactagacagttctggtttctttggtggacctggagggattcgaacccttgacctctcggatgcgaaccgaacgctctcccaactgagctacaggcccatattctaatgcgcatgattggcgacttgattaatataccgcagattcctcaaattgtcaagagataaatccgccaaaaagcggcgtccttttttcatatcgggacgcttttcaattatttcaaatcctgatataatataggtaacagccagacctttctgttgtgccgaggtttcccgccgcagagatttggaggccaaggcattgcatatccggaccggctgcgaataattcgcgggatatgcgcgccgcaaagcctgcatttcccggccaaggaggcaaggttcttatgaaggttacatgcaccggacgcagggtttctctgaagcccagttttatagaaaaggcggaggcaaagcttgccaagctggataaattcttcccggatgaggcacaggcgcaggtgacggtcaacgtggagaagtcccgccagaccgtagagatcaccgtgcgcagcaccggattaacgctccgcgccgaaaaggcctccgagcggatggaagacgctttcaatgaagcgttcgacctgctgatgcgccgtgtggtcaagtaccgcaagcgtctgggcgacaagctgaccagcgccgccgcggaacttcccgccaacaccgcggaaccggaagatacttacgaggtcatccgcgagaagcattttgccgtcaagccgtgcagcaccgaggaagctattctgcagatgaacctgctgggacacagcttcttcctttatcaaagcatcgaaaacgactgcatccaggcggtctaccgccgtgcggacggcggctacggtgtgctgatcccggaaaactgagtttggctcaaccgaatatcccataacgtttcgccgccggcagaaagttctgccggcggcgttttgcattctttttccctcatcggagcctttatcagtaatagacctgctggttatagggatcaaaatggggcattcttccgctgtcacgcattgacgcggcgtccgtagcggttataataagatggtcaagcaaatcgatattcagcatgcccagggctttggtgatctggaccgtggtggcgaaatccgcttccgaagggaccgccagcccggaaggatggttatgggcaagcaccgcacaggtgcagcccgtagtcactgccgtgcgggccagctggttgatgtcaaaggtcagcttgttgggcagtccttcccctacgcggatatcccgcaccggcgtgtaatggtcgtccatggcaatgaggtataatacctcattctgtacgccgaaaaacagcggtttcacatattcaatgacccgttcggtgctgttcagactgacgcggccgacgcgcttgtgcatggagtaatatcgggcgaattccagcactgaatggatcatccgtgcgctggacggcccgatgccatccacctcgcaaagctcgtcctcccctgcttccagtacccggcaaaagctgccgaaatgctggatcaggcggtgggccagcgggttggtattctggcggggaatggcaaagaagagcaggtattccagtgcttcgtgttcagccagactttccaggccgtcacggcgcacccgtgcctgcattctggcgcggtgattggcatgcaaaggcttctgttttgcggcttttgccatgttgcaccttctccgtcccctgctgtgtttcaagcagaattgatttctgctatccattatacacgtatcccaaacaaatgaaaagtcagaggtcattttatgaagaaatttgtcgccggagcaaatgaaaacgacgttcggctgtcccgttttgtggagtcggtcaccaaggacatgccccgtagccttttatacaaaagtttccgcaacaaacgcatcaaggtcaacggaaagcgtggggaaccggatacccgtctgaaacagggtgacgtcatcgagctgtacatcaacgacgaatttttcccggctgtctcccccgccaaaccggcgccccggcgtcagccttccgtcactgtgatctatgaggatgacaacatcgcggcactgtacaagcccgcccatcttctgtgccacagcgaccggaccggagatcccaacctggtggacgccttcattgcccaactcaccgcccagggcacatacgatcccaaaagcgaaaaccgttttgcccctgccatctgcaaccggctggaccgcggcaccgagggccttgtgcttgccgccaaatcccaggctgccctgcgcgacatgaacgagatcatccgggaaaactggatgaaaaaggaatacctgaccatcaccgtgggtgcaccgccccaggggcggcacattgcctggctgcagcacagcgaaaagggcaacaaggtgcgcatccatgcccgggaaagtgagggctacaagcagatcatcaccgaggtgacggtcatccggcagtccgggccgtttgccctgtgccggatcgggctggtcaccgggcggacccatcagattcgcgcccaccttgcctatctggggcatccggtactgggcgatatcaagtacggcaaccgcaagatgaacgagcggaccggcctgcgtacccaggcactgtgtgcccagcggctgaccttcgggcgcattccggaggaaaatactctgcattatctttcgggccgcgtcatcaagctggaacggcccggcatccttgcccagtttgatgcgctttgtgagggaggccccgaaaagaagggctgaacttttcgctgcccggtctgcatataaggagcgtgtttccatgaactatatcgtcgacgaccgcgaactggatacggcagattttctggcgctggccaaccaggtgtggcccggtgattatgaccctgcccaaacccgtcaagcgctggaaaagacgctcaacattaccgcctacgacggcggccgtctgaccggatgcctgcgcatcctgaccgacggctattatttcggcaccatcacagaactgctggttctgccggaatatcagcaccagggaatcgggagccgacttctggaactggcgcgtgaaaacgcccccaccctgctttactttggcgcacagcccggtgtggaagcattttacgagaaaaacggatgccaaaaagggatgcaggcgtataccattcccaaggcaaaataacgcggctctgcgttttcctgctgcggcagcccgggaaacggtatgcagcactgcttttccctgtggtttcctgccaaacgttcccctttgagaaataattttgagattgcgaaaagaaaccggcatggtcgatacgaccatgccggtttttacatatttaagattgcccaaggacgaggtgtgattttagggaacctcgtcgtttcgaggcaaaactcaggcgatcaggaagcggtagatgaccgccactgcaatgatcagtgcacagatcacagcggtgatgggcggcgcccaacggatgatgcgctcggccatgacatcgtcggcgctctcctcgctgtcgtcagcataacggccgcggcggcggggacgatcgtactcgtcctcatcgtcatcatcgtagtcatcgtcatagtccagctcgccggtgacttcctccgcatcgaacatgcgggtgccctcgtcgtcatcgtcgtcctcttcatccagaaggatacccttattggcataacgacggacgcggtccagttcgggattactctccgcctgcggcggggcaaactgcgcggtgggttcctctgcgatcgctgcctgggctgcggctgccgtggcggctgctgcgtcctgctgcgggtcggaattggccactgcgttgatctcacgctgctgctgttcggcagcctgacgagcttcctccaacacatgagtcagcgccgctttgatgtaggcgcggtctccgccgcactcgctgcagacctgggtgttttcctcattgggatggaaggcaccgcaggcgcagaaccagccctgctcgatatcctgcgggacacagatcagagcgtcattgccggtgcgctgctgcagcgtcttggcaatggatgccggcaaaacccggggcgtctgaagacggacacgcttatagccgcgcagatccacgccgcggccgttcaggaacgcgcggtcctgctcgatctccacgctggagaccggcgtgtcgctgacataaacggcatcgtcgctgccgaacaaatcgcccggctgtgcatccagctgctcatagtagaagtcgtcctcacacagcacctggccggcggcatctttacacttgaaatggatcacaagcccggtcagcggttcggtacctacgttcttgaaggtcaggcagacggcgacctcgccggtctcatcacctttcagcagttccacccggacaaactggaccgggctgcccgccgtataatagttggcacgggattgggccatcaaagagaaattctgatccatgcttcactcaccttgcttaattgttgctatctctgaacagcggcaatcagggctccgccgcatcgtcatcatccgttattcctgcaccgggggttcctgggcgggagtctcctccacaggagtttcctggggtgcgggctccgctgcgggttccggcgtcgtaacgtcctcatcttcctcctggtcgagcttgccttccatcagggcacggaaatcttcgccggagattttctctttctgcatcaggacctgtgccactgcgtgcagcttatccatgtgctcggacaggatgcggcgcgcagactcataggattcatccatgatgtcacggatctcgttgtcgatctcggaggcaatggtctcggaatagcccttgccctgagcaagatcacggcccaggaaagtctggccggggtcattgccgtagaccacagggcccaggcgctcggagaagccgtagcgcgtgaccatggcgcgggccagatcggtggctcgttccaggtcgttggatgcgccggtagaaatatcttccagcaccagctgctccgccacacggccgcccagcaggcagacgatgtcctcgctcatagcggtgcgggtaacgtagctgggctccttgtcaggcagatacatggtgtagccgccagcggcgccgcggggaatgatgctgatctgatgcacgggatcgtgagtcgggcaatagtagccggtgatcgcatggccggcctcgtgataggcggtcaggcgcttttccttgtcggtcacgacgcggctcttcttttcggggccggccacgaccttgatggaagcttcctcgatctcgggctcggtgatggctttcttgcctttgcgtgccgcaagcagggcagcctcgttgacaaggttttccagatccgcgccggagaatcccgccgtggactgggcgatggtcttgaggttgacgtcggggccgaggggtttgttgcgggtatgaacgcgcaggatctcctcgcggcccttgacatcgggcaggccgacgtagacctggcggtcaaaacggccgggacgcagcagcgccttatccagaatgtcggcacggttggtggccgccatgacgataacgccgtcgttggcgtcaaaaccatccatctcgaccagcagctggttcagcgtctgctcacgttcgtcgtggccgccgcccagaccggtgccgcgctgacggcccaccgcgtcgatctcgtcgatgaagatgatgctgggcatcgtctttttggctttttcaaacaggtcgcgcacacgggatgcaccaacgcccacatacatctccacgaaatcggaaccggagatggcatagaacggaacgccggcctcacccgcacaggcgcgtgccagaagggttttaccagtacccggagggccgaccagcagaacgccgtgagggatgcgggcgcccagagagttgaaacgctcgggagctttgaggaactcaacgacttcctccagctcggccttttcttcctcggcaccggccacatcggcaaaggtcgccttgcgctggctttcctgctggtccttgaccttggcacggcccacgttcataatgccgctgccgcctgcgccgccgcggtacatcgagatgaacaggaatgccacgccgccgatcatgatgacgtacagaagcaactccatccacgggatgctcggcttgaccggagacatgtcgtagaccatgggagcatcggggtttgcttcgttatactgctcgatcagcccctcatccttcaaggtgctgagaaagaaatcgatatagggcagcttgtaggtggcaacgaccgtgccgccgttcttggggccgaaatcctcaccgccggaaagttcctccagcaggccggtggcttcggtctgctgctgggcattttcgggcaggggcttctccccttccttcaggctcagctcaatgatgccggtattgagatccagctcaaaggcggtgacctggttgttttcaaagtattcgatcacgtcggaataggccatggtgctggtctgggtaccggacagagacgagtacatcgtcaccatcagaagtgccaggaccagaatcactgcgatcacaattccgccgctgaagcgaggtttttgttgcaagaaatcaactcctactcttgatgccgggacgcggcgtcaaattttacgctttggtgtaaacttcgggtttcaaaacgccgacgtacggcaggttgcggtacttttcgtcatagtccagtccatagcccaccacaaactcatccggcacttcaaagcccatgtaatccggttcgatgttggccttgcggcggctgggcttggaaaggatggaacaggtcttgacgctgcggggattgcgcatctgcagcatgggcatcaggtgggacagggtcacaccggtatccaggatatcctcaacgatcaggacgtccttgccggacagatcctgatccaggtccttgacgatcttgaccaggcccgtagtggtggtgttggaaccgccgtagctggaaaccaccataaagtcgatggcacagggaatggtgatggcacgcatcagatccgccatgaacacgaccgaacctttcaggatcgagacaagcagaagttcgtgtccgtcatagtcgcggctgatctgcgcgccaagctcgctgatcttgtcctgcagctgctgctgcgacaccagaatatgatcgatgtcgcggttcatatcatacatggattcaagcctccgtatcccgctcagcgtttatcaccagcaccgtccgggtgtcgcgtccgggcgcaaggccctcggcaaacccgcagccccacagccagacgacttcactgccgtccgccagaagcggcatcaacgcccgttcctccggtttcacaccaagttcgttaaacaattttttgagcgtttttctgacatgacgccccgccggacggaaatcgtcccccggctggcgcgtacgcagcaaaatactcttctgtattttatcataatctgcgcaacagtttaagtcttttttgaaaattggttcatttttcagaaattcttcatacttttgcacgctgatctcgattgtatagccccccggcaggcggtaaacgcccggaaacgcaggctgcggcggcaccggaggcggcagggcgccgggcggcgcaatgcggcgcagcaccccgtttttcaccttgaaggtcacatcctgggtcagctgcagagctccgtcccctctcaggatcagaaaacgcagcaggctgacgtatttttcctccgcatcccgctccggcacgatcaggctgtgcagggcggtggtcaggatggggccgtcggcttcccgcaggcgctccacgtcgtagccgtcctccagggccgcagcctgcagaagcgccgcggcctcggcggtcagccagtcgtccagttcctgcatctggcggcagaaccgtcctatggaacgctccgccgccgagttgacgctggccagtgccggcatggccccgtgacggattcggttgcgggcataatcgtcggtctcattggtaaagtcctgtacatagctttgcccaagtgcgtcacagtatgccgccgtctgggcgcccgtgatgcaaaggcagggccggacatagacgccccggcgcaccggaatgcctgtcatgccatgaagcccggtcccccgtgccagccggaacaaaagggtctcggcctggtcggacagggtgtgggccgtggcaattttagcctcctcccgctgggccagctcgtcaaaccaggcgtagcgcagccgcctggcccagtcctcgctggcgtggggcgggatggcaacaccttcccgttcggcgtcgtacacaaacagctccacccccaaagagcggcagaactgcgccacaaagcgggcatcggcgtgggactgttccccgcggatgccgtgatccacatgggtggccagcacttcgattttcagctggcggcggcaccggtaaagaaacagcaaaagggccatggagtctgcccctccggagcaggctgcaatgaccctgtcgccgggcttgaacagcccgcgctgccggcagaacgccagcagggattcttctgtttgttcgatgatcggatcaaccgttgaagtcgtcatggctgtaatccaagttcataaagcgggtatgtgcgccgtcccagcccagcttgaccgaagtcgtctcgccgtgacggtttttcgcaacgatacattcggcgacattctcgtccgcctgctcgccctcgccgttctggctgttatagtaggcagcgcggtacaggaacagaaccacgtcggcgtcctgctcgatagaaccggaatcacgcaggtcggaaagctgcgggcgatggtcggatcggccgctggtcttttccgccgcacgggacagctgggacagagcaatgacgggaacgttgagttccttcgccatgatcttgaggtttcgggtaatatcactgatttcctgcacgcggctttcggtgcgcttggaggactgcatcagctgaaggtagtcgatgatgaccaggccgatgcgttcctttttggggtcctggttgatctggcggatctttgccttgatctccggcaccgaaatacccgaggagtcgtccatatagatgggcgcgtcgtacagaagagtactggcccctaccaggtcgttccagtccgagtcgttgaggcggccggtacggaaggtctggctgtcgatgcctgccatactggacaggatacggtcggtcagctgctcgcaggtcatttccaggctgaacacgatggtcggcaccttttgcaggcgggcgacgttggttgcaatgttcagggcgaaactggttttgcccataccgggacgggctgccaggatgaccaggtcggaccggcccagaccggtgagcacggtatccaggtaggtgaatccggtgggaataccggcgaacttgtcgcggtcgggaccgctgagtttctgcagcgtggcgataacgtccaggatggactccttgatcgtcttgacgccggtcttgtccttgccgctgcggatgtcgtagattttctgctccgcgctctccagcagcatgtcggcatcggattcctccgaggtctgctgcaggatggaacgggcggcttcgatcaggcggcgggtctggtacttttcccgaacgatgcggatataggaatccacattggacagggcggggaccgtctccgccaggcgggcgatgtaaatcttggcgtcgtccgccccctggaacgcttcgttgttcgacagagcgtccaccagcgtgaccacgtccacggcctcattctcggcaaacaatgccgccatctgggcgtagaccgcgcggttctggtcggagtagaacatctccggttccagctcggtgatgagctgggtgaggatgttctcatccatcaaagcggcgccgagcacactctgctccgcctgcatattgtaaggcatctggatgcccagccccgaaaggctcagctcattgcccggcatgtgggcgcctcctttgatccgtgtttgatgtaaacgtattctgctttacagctcttcaactttgaccttgaagtttgccgtcacgccctgatacaggcggacagtagcgtcatagctgccgaactccttgatattggactgcatctcgacctttttcttgtccacgtcagcgccgataagtttggacagggcgtcggccacgtccttggaagtgaccttgccgtacagcttgccggaagcgccgcccttgaccttgaccaccacggtcttgtccttgatcttgtctgccagagcctgggcggcggcacgggcctcggcctcatggtgggccttggcttccaccttggtgcgggcaacgttcagcgcgcctgcgtccgccacggcggcaaggccccgcgggaacaggaagttgcgggcgtaaccgtccgaaacctcatggatctcgtcctttttgccgatgttcttgacatcctgtttgagaatcactttcatagtaacccctccttaatcattgcgttttctaaccggcaccgcattggatgccgtctgattggctcggtagttgtcgatttcctcgcggatacggcgctccgcttcttccagcgtacagtctttgagctgcgcgccggccatagtcaggtgtcccccgccgcccagcggttccaggatcacctgaacattcagggcgcccatactgcgggcagagatattgacgccgccgtttttggccacggccacaaagctggcgtccacgcccgtaatggtgagcaggtcgttggcggccatgggcagaaccacgttcatgccgggttccagttcctccgacaccgccacggcacagcccttataaatataagcgtcctccacgatatgggcgcgggcttcgtactcttccttggagacgttgaacagcagtttggtgtccgccgtctgtgcgccgcggctgcgaagccatgcggcggcctcaaaggtgcgcacacccacgtgcagggcaaagctgcgggtatccagcatgatgccggccagcagcgcctgggcttccatgggagtgatattgccctgggcgggcatgaactgcaaaagctcgcacaccagttcgctggcgctggaggcataaggctcatgatagagcagaatgggattgtcgatatggcctaccgccatgcggtgatggtcgatgaccacgacgcgctggcatttttcgtagatcttctggctttccagcagacgcttctggtaggtatccaccacgatcagcagcgtcttgggggtgatgatctcgtaagtttcctcgggctcaatgaagttgtcgccctcccctgccttgacaaacaggtcgatgagctggcccgccagtgtggcgcccttatgtaccgtaatgaccgacggcacgccgcacatcttgcacatgcgcagcacaccgatggccgaaccgatggcatccaggtcgctcatgctgtgacccatgatgagcacgctgtcgctctggcggatctggtcctccagggcgttggcaatgatgcggctgcggacatggctgcgtttttcgacaccgtgggaaacgccgccgaaaaattcaaagccgtccagcgtcttgaccgccgcctgatcgccgccgcggcccagggcgatgtcaatgctctcccgggccatttcctgacattcggccagggtcttgccgccgtggccgacgccgatggacagggtgagcgaaccgccgggatgcagggcgcggaccttatccaggatatcaaaccgacgtttgatcatgcggcggatatggcgttcctccaccacggcaatgtagcggttgttggccacccggcgcagaaagccggtggtctggccgatgtattcctccagaaggcggttgatggcttcctgctcgtgggcctgctccgagtccttcatatcggtgaagagctcgtcatagctgtcgatgacgatgatcatgcaggccggacggctggcggtgtactcgtccagggtatccttgtagaaggtatcgtccaccaggcagacgatgcttgcgccgttggaggtggggctggggctggcgtaggcggtaaagcgcaggccgttggcggtgatgtcctgcccgtggggacgggagcagaccgccatatccagcccgggcagcagctgttccaccgacatcatcacggcgtcgttgccgcccaggacattgtccttgaaataagaattataccataaaacagagttgccggacatcaggaataccggcagcggaagctgggccagagaatactggaccttgctgccgccgaacacattgccgctcagattctgagcaataaaggtgcggatacgccggcggttgaccagaatcaggatcaccgccgccgccagcacaatgaccggtgcaagcagccactggggtgcatacagcgccaccggaacggccagcgccgcacagcacagtaccagcagcaccacaatggccgccgtgtccaggcgtaacttgtttttcatcgtacttcctcatacgaatccgccgggagaacctgctcccgtgcgggtcaacgggttgatttacacttccatcagaatgggcaggatcatggggctgcgcttggtcttgcggtagatatagctggaaagggcctcccgcacgcgggtcttgaggctgttccagtcgtgagcacgctcggccagcgcacggtcgagggccatctctacctgagcccgggcgccatccatgagttcctcgctctcgcgcacatagacaaagccgcgggagacaagctcaggacctgccagtacccggccgctgcgtccgtcgatggtgacggtgacaacaatgatgccgtcctccgacaggtggtggcggtcacgcaggacaacattgcccacatcgcccacgccgtagccgtcgaccatgaccgcgcccgcaggcacggtcccctccagcgtcagggaatcccgggaaagacgcaggttctggccgttctccgcaatataaatgttctgcttggggatatagcccaggttctcggccgtctcggcatggcgcttgagctgtttgaactcgccgtgcaccggcaggaaatactgagggtgcgccagggtgagcatgagtttctgctcttcctggcaggcgtggccggaaacatgggtgtcgtacatgttttcgtagataacctcggcgcccagggccagcagtccgttgacgaccttggtgaccgtcttttcgttgccggggatgggacgagccgagatgatgatgaagtcgccggggccgaccttgacgttgcggtggctggcctgggccatgcgggacagcgccgagaggggttcgccctggctgcccgtggtgatgaggacgaccttctccggcggatacttgttgacctcctcaatgtcgatcaggacacggtccggcacatgcagatagcccagttccttagccatctcggtattggagaccatgctgcggccattcaccgcgaccttgcggcccgactcgatggccaggtcgataatctgctggacgcggtaaatattggacgcaaaagtcgccacgatgatgcgcttgttgcgcgcccgggcaaacaggctgcggacgccctcggcgacggtctgttccgtggcggtaaagccgggacgctcggcgttggtggaatccgccagcagggccagcacgccgcggcggccgtactcggcaatggtggagaggtcggtcacggcatccccggaaagcggggtgtagtcgatcttgaagtcgccggtatgaatgacgatacccgccgggcactcgatggcaaaggccagggcgtccgggatggagtgattgacatggatgggctccaccgtgaagcagccgagacggaccttctgacggggacggatctccacaaaattggtgctggacgccaggccgtgctcctccagcttgttgcggatcaggccgatggtcaatttggccgcatagatgggcacattgaactggcgcagcagatagggcaggctgccgatgtggtcctcgtggccgtgggtaatgaagatacccttgatgcggtccttgttttccagcacataggtgaagtccgggatgaccaggtcgacgccgaacatatcggtatcggggaacaccagaccgcagtccaccaggatcatgtcgccctggcattcatacagggtaatgttcttgccgacttcgcccagaccgcccagagggcagatgtgcataggaatggcgggggtatccgcctgcacgttctggccgcggcgagcgcggggcgcgcgggtctgctgcgcctgaaccggcttgaccgcctgctgtgcatttttagccgcctgctgagccgccggacggcggggacgctgaggacggggacgcggttttgcgttgttattctgggcggcctctccctgctgtgcaggggcggcagcctttgccgcaggctggcggcggggacggcgctggggtgcgcgcggattcttgtttttttcagcttgacgtttctcgttgaattcttccattgaaacctccgtcggattgctcggcaaagccgacatccacgcctttggcggatgccggaccttgcgtcaggttaaacgtaatgtatttgtgtcgcggcttggccgcagtattccaaaaattggagacctggggacccgtttgtatcggacgctgctgcgcaaaaaatgtgcgctttaggtgccaaaaataccgataccgggtctcgtcttggggcgcgaaaagcccgcctgttaggcgcggccgggcccagatgccagcataacacgaacattgcagataaaaatattataattgctattggatagcttgtcaattctgcggacagcgggatggcctgtacttgcctggcgttggcaaagcaggtataatgtcagaaatgaatggacttttccaacgctcagtatggacaatatagcaggagtttagcatgaaacacatcgaaatctacaccgacggcgcctgcagcggcaaccccggccccggcggatggggtgcaattttgcggttccgcaccgctgacaaggtttatgaaaaagaactttccggcggcgaggccggtaccaccaacaaccgcatggaactgaccggccttctggaagcgctgcggcagctgaaagagccctgtgatattgatctgtactctgacagtcaatatgtcatcaacgggctggaaaagggctgggccaaaggctggcgggcaaggggctggaaaaaggccgacaagtcccctgccctgaacgccgacctgtgggcgccgcttctgaccgaaagcgagaagcacgtcatccactatcactggctgaaaggccatgccggtcatcccgaaaacgagcgctgcgaccgtctggccgtggcccagagcaaaaaatacggcggacgccaggcctgacgccgcctttgttctttcccactatctgaaaaggagagtttgtcatggatgccatggggtttaacacctacgaaaagcaggaccgtgttttggtcggtatgagcggcggtgtcgactcgagcgtcacggtgcgcatcttgcaggagcagggatttgcggtgcagggggcggtcattcgcttctcccccgcccacgacgccgccgtcgcctccgccaaagaagccgcccaggccctgggcgtggaagtgcacgtgatcgatgcctccgaagcctttgagcgggaggtcgtcactcctttttgccagagctactgcgaaggccgcacccccaatccctgcatcctgtgcaatccggcggtgaagttccggcttctggccgaaaaggccgacgagctgggcatcccctacctggcaacgggacactatgcccgcatcgagcgctgcgccgacggtgtatgccggctctgcacggcggaaagcgtggcccgggaccagagctatatgctctaccggttgggccgggacattctggaccgactggtcctgcccctgggtgagtttgaaaaggccgacgtgcgggagatcgcccacgacatcgacctgcgctgtgccgatgcgcccgactccatggagatctgcttcatccccgacggggattattctgcctttatccgcggccggggcatggagcccaaatccgggcgttttatcggacccgatggcgaggaccttggcccccacttgggtgttgaccactacacggtgggccagcgcaaggggctgggcatctccgccgggcggccgctgtttgtgaaggaaattctgccggagggcaacatccttctggccgagagcggcggcgaattcaaccggcgcatcaccgtcgggtccatcgtcactcccgacggtttgcccctgcctgacggcgactatctggtcaagatccgcagcgccgccaaacccgccccctgctccacccgcctggaggacggcgtgcttatcgtcgatttccccgaccccgtccgcgccccggcccccggccaaagcgccgtgttctaccgcgacggctatgtcatgggcggcggcgtgattcttacggcggaataatcaggcagcttgcctagcgaacgggatgcaacagtcaaaaggcatggcttctgtgctctccaaacaagaacctgaaaatcagcaaaaccccggatgctctcaaaccgagcatccggggttttattatcattatttgatgcccgccggcagtcactgcatggtcaggcactttttggggcaggaggacgcgcacaggccgcagcccacgcacttttccccgtcaagagtccagctcttggccgcgcgatcaacggtgatggcctcctgggggcactttttcgcacagagggtgcagtagacacactttgacgcatcattgaccggctttgcaccgggcttggctgcctgggcgggctgctgcggacgggtaaaggtctcgctgtgtttggtcacatccggctgggtatagcccgggacaatgctcaggcatttcttgggacagacattgacacagttgccgcactgcacacagtcaaaccgattgatggtccaggtgcctgccttgcggtccaccgtcagggcgccgggcgggcagctgcgtgcacacaggccgcagctgatacaatcctcgatgcaaatggacacatggccgcgcatccggtcaggatactgggccggttcaaagggatacccggtggtcaccggggcgctgaacagatttttgagcgccgtctgcgcaaacggcaaaaacttccattccgccatgctttctcacctctcggtacaactgatgcagggatcgatggtcaaaatcagcagcggcacgtcggccagctggcagcctttgagcatgtccagcatgggcgggatgttgcttgtggtgggcgtgcgcaggcggaagcgctccacgaatttggtgccgttggctttgacataatagatggcctcaccgcggggctgctcaatgcgcatgaaatgctccccgttggggttgcccttgaccgggacgctgatggggccttccgggatcttatccaccgcctgacggatcaggttgaaagactggtagatctcattgatgcggacctcacaccgggcaaaggaatctccctccgttgcggtgatgggctcaaagtccaggtcatcataggccgcatagcccagcaggcgggtatcatacgccacaccactggcccggagcatgggtccgaccgcgcccatcaggcgggcctggtcggctttgagcaggccaagtccatgcaggcgggtccccaccgacacatcccggaggaacgcctccgcaatgggacgcagttcctgttccatcccgttgatggtatccaccaggcggagcaacatgccggtatccatatccttgagcacgccgcccacgcaattcaccgagaaaatgatgcggccgccggtggttgcgtcgaacatatccagaatcttctcccgcagccgccagcactgcatgaacaggctttcaaagcccatggcatcggccagcaggcccagccagagcagatggctgtgaacacggctcatctccatccagatggtgcgcagataggccgcccggcgcgggatctcgatattcatgatcttttcaaggcactggcagtagcccatgccgtgaccaaagctgcagattccgcagacacgctcggcaatatagacgtagtccttatagtctttggtctctaccagtttttccaggccgcggtgcacaaagccgatgctgggcaccgccttgacaacgacctcgtcctccaggacaaggtccagatggaccggttcgggcagcacgggatgctgcggaccgaacggtacgatactttgctttgccatgtccgctcaccctttctgcttaaacggcgtttcccgcgcgatgcggtacagcttgtcgtggtaatcccggtcgatgctctcgatcttgacgccgaacagttcggcggcttcgttctcctgcaaaaatgctccggggtatacctgggtgatgctggtgactttctcatcatcccccaccgtcaggcgcagcgtacgcatatcataatccttgccaaaggaatagctcatctcgtacccgtcgggtacgcggttggcgcagatctgcaccacgcgccagccgtccatcttgaaccggatcaccgcaggcatgaactccgccatggtgatgggttcgatcgtattcaaatgctccatacggaactttcctcccctcatgcgcgtccggcgttcgcctttttgccgacgtaggcttcgcgcttctgctccagaatttccagagccttgaccacaccgtcaatgatcgcctggggccgggccgcacagcccggcacatagacgtccaccgggatgaccgtatccacgccgcccttgatattgtagcaatccttgaacacaccgccggtgcaggcacagatgcccaccgccacgacgaccttgggatcgggcatctggctgtacagctggcggacaactttctcgcactgattgttgatgccgccagtgatcagcaggatatccgcctgaaagggatctcctgtattgatgatgccaaagcgctccacgtcataggtgggcgtcgtgcaggccaaaacttcgatatcgcacccgttgcagctgctggcgtcatagtgcagcagccacggggactttgccaattttgccatagttcgcgcccctccttatcgaatcagcatgaggatcagaccgttgagtccgccggtaagcagcgtgacgacccagcagctgtccagcaacgtgcgccatttgacacgggcgctgacgttgtcccacagaatttccaggaaaaacacaaacaggcaggcaacaatggcaatgggccagctccaccagttttcattgatgaagaacaaagccacgatgcccagcatgagggtcatctcgtagtattcggcgatgttcatgatggcaaaggtgggaccggccatttcagtggtcaggcccttgaccagttcctgatgggcatggtgactggtggaaaggtcaaagggagatttgcgcagcttgatcgccatgacaaaaaagaaaccaatgaggaaaccgggcatgggcagaatggtgctgtacggcatattgatgatgtccaccacctggaaagacccggtcgccaggtaaaagcccactgccagaagcagtgtcatgggctcatacgccatgatctggatcatctcacggccggcgcccagcgtggaaaaaggcgaggaatcgctggaggctgccatgaccaggaacatgtccgccgtggaaaggatgaacaggctcatcaaaatgtcggcaccggcaaacagcatggcaccggccaccgccagaaagaccagatagctcaggttgagcagcatctgcacgctgttgaccgcgatcatctgcttggaaaacagcttgatcagatcatagaacggctgcagcaacggcgggcccttgcggccctgcatccgcgccgaaatgatccggtcgaagccgtccagcagcgcccccacaaagggagccagaaccagatagagtacaacagatactacctgcattacaccgcaccccctacgatcaggcaaagcatgacgatcagaacgcctgcggccacgataacggccgggcgcatcagtctgcgcataccgaattcaaaccggagataccagttgctcaggtacagatgttccggctcgccgaagctgtttgtgaaataggtgttgtccccttcgttgatgccgcccatataaatgggaacatagtctctgtgggtggcacgggtcagcaggaacatcagcgacggcacaaaaattaccgacaccagcatgatggccatggtggtcaggacgctcatggacaaaacttcatgggcagaaccgaacagttccacgatcatggggtcgaccacataggtggaaaccagcgggaacagcaggcacaaaagcagcgtggccgccgcatggatgtacatggagaaatactggtcgggaagcgtggcgtcgtgggccttttccttggtgtgatgcaaagacaccagtttgctgagccacttggtccagtaaagcatggtggtggcactgccgtaggcaaggaagatgaccagcaggtagttatcggcatccacaaaggccttgagggcgacccacttggagatcagcatcccgaagggcgccagatacatgcccgcaatgccgatacccataatataggtcagacggggcaggcgcagcagcaggccgtgcatgctttcaatgtcgcgggagcccaggctgttctcgatggagcccaccgcctggaacagcatggacttgctgacagaatggaagatcataagcagaatggccgcccagatggtttcctccgcaccgatgcccgcacaggcaacgatcaggcccaggttggaaatggtggagaacgccagcacctttttgccgtcgttctgggcaatggccatcatgctggccgcaatgaaagtaaatccgccgatgaacgccacggtcatgccggtcatggtgttgcacagcgcgggagaaagccggatcagcagatagacgccggccttgaccatggtggcgctatgcagcagagcactggacggcgtaggcgcgaccatggcgcccagaagccaggaggaaaacggcagctgggccgacttggtcaggcctgcaaatgccagcatgataacgggaatgactgccccggctgcaacgacctcacccagctgaacggtgcccagggtaccggcagcaacggcaatggcgatggcaaagccaaatccgcccagcaggttcatccacagggcgcggaagctgttgttgactgcttcctccgtgcgggtgtagccgatgagcaggaaggataccacgctggtgatttcccagaagaaatacatccagacaaggttttccgacaggaccaggccaaacatagcggccaggaacaaaaacagcatggagaagaagaagccgctgcggtcctggtattcagtatgatgatggtgataaccctgcatgtagccgacggcgtaaatgcagatcagaccgcccacaaaggctgcgatgatgcacatcagcatggccaggcagtccacggccatatggcagggagcttccaccggctgggtgagttcggaccagatcaccagtcccgtctgccctaccgacaaaaggatcacaggatatttgcggtggcggatgctcaggcaaacgatcagcaccatcagaacgacctcgccggccatcatcaggtggtcgatgagttcggtttcctgatacagggtgaccatttgtcccccgccgctgagccaggagatcaacaacgccaacgccaggaccattacgccgcccgcaccgacgtataccgcgatcctgcgtgccttgtcttgcttgagaaacgggatcagcactgcgaccagcgcaggccataagatcagcatcggaataacacccataaaacaagctcccttacggaaaagaatcatataatatgacgaatctgccctttattatattcctgccgtttcagaaatacaagatacgtcaatctccgtatttgacagttgttcaagtttttgcctgtattattgtatccaagttccgaccgaaatcagggttcctgtcaggaagtgttttcgcttgccgcaggtgcatttatcgcatccacgacatttttgtgttttacctttggttttttcgtccggatgtggaccggaacgcctctattcgcagaacgcatgattttccggtcggaaatttgtgaaatttttgataatttgcccgcagccaatctttgccccgcccaatgatatggaattttgtcacacgcagtgatacaataggtaatcagattccaaccatttctatcccggagggaacttccatgcacgagctttccatcacacagagcatcctggatatttccctgcaggccgcggaaaagcagaatgcatcacgcatccgtgtgatccgcctgcagctggggcctttttgcggtgtcgtgccggaatgcgtgcagatgtatcttgatgtgctggccaaagggaccatcgccgagggcgcacgcattgaggtcatcgaagttccgctacgggtgcagtgcctggattgcggccgcgaaagcgacattgaccgaaggcacattgaatgcccgtcgtgcgggagcatccggctcaagcggctgtccgggcgggaatttctggttgacagtttggaggtcgatacataaatggagatcaaagtcctgcatcaggtcatggaatggaacgaggatgtcagcgcccaggtgcgcgaagtcctgaccggcaaaaaagtatgcatgatcaacgttatgggcagccccggcgcgggcaagaccagcctgatcgcctccatgatcgaacggctgcgcggtgagtttgccgtgggcgtcattgagggcgacatcaccgggcagatcgacgccgaaaaaattgcggcgctggggattcctgccgtacagctcaacaccgacggtgcctgccacatcgaggccatgagcatccagcacatcctgccccagtttgacctggacgccctggacgtgctgtttgtggagaacatcggcaatcttgtctgtccggccgagttcaacatcggagaggatttccgcctgaccatcctgagcgtgccggagggcgacgacaaggtcgcaaagtatcccctgatgtttaccgataccgattgtctggccatcagcaagggggatatgctgccctattttgacttcgatcttgaccgtgtgcgggcagactaccggggcgtgaatcctgaaggccccatgttcatcgtctccaaccgcaccggtgacggtctggatgccttggcggagcatctggccgggcgcatccgcgctgccctggcatgagcggcagacgtcgtgtccgcatcaccgtcagcggcatcgtgcagggcgtggggttccgcccctttctgcaccggctggcccttgctcacaacctgacgggctgggtgcgcaatacctcctccggcgtggagctggagctggagggtacgcaggaagctctggatgcctttgccgccggactgaaaagcgatgcgccgcccctggcagtagtggaaacggtagaactgtttccactggccgggctttccggataccgggatttttccatccgggccagccagcacagtgacggggcgacgctggtatccccggacattgccccctgcccggcttgcctgcgggaattgtacacgccgggtgaccggcgggagcgctacccgttcatcaactgcaccgactgcgggccaaggtttaccattatccgttccctgccctacgaccggccggggacatccatgtccggcttttccatgtgtcccgattgtgccgccgagtacggagacatttccacccggcgctaccatacccagcctgactgctgccccgtctgcggtccccgggctttttatctggacgacaagggccgccccttgccgggagaccccatcgtcctggctcagaaagctctggccgcaggcgggattcttgcggtcaagggtgcgggcggcatccatcttgcctgcaacgccctggaccctgctgccgtcgcccggctgcgccggcgcaagcaccgggaggaaaagcccctagccgtcatgtgccgggacctttccgcagcggaaaggttgtgctgtctgagcgatgaggaatcccgtcttttgcaaagcccccggcggcctatcctgctgctaaaaaagaatgcggcggacgagcacggcgaattaagcgccaaccgccgcctgggggtcatgctcccctacacgcccctgcatatcctgctcctggacggcagcgccggcggcccggacacgctggtcatgaccagcgccaacctgcccggacgcccggtaatgaccgaaaacgatgaagcactgacgggattgcagggcatagctgacggctttttgctccatgaccgggacatcgtcaaccgctgcgacgactctctggcggcggtgtatgacggccgggaatactttttccgccgcagccggggctatgccccccagccggtcaccaccggccccgaagtcagcggcattctggcgttcggtgcggaacagaaagcctcctttgccgccgggcgggagcatcacgcttttttgagccagcacatcggcgacttaaaaaacgccgagacgctggaccattaccgctccgccatgcagacttatctgcggttattccatattcagccgtcgctgttggtctgtgatctgcatcccgattacttctccacccgggaagccgagggatttgcccggcaggacagtctgcctctgctgcgggtacagcaccactgggcgcacatggccgcctgcatggcagacaaccgtctggacggtgaggtctttggcatcatctgggacggcaccggcctgggcagcgacgggaccatctggggcggtgagtttttaatcggtgggctgcggggcttccgccgggtcggttccatccgcccggtacggctgcccggcggagatgccgccacaaaaaaaatcggccgcattgccctgtcccttgcctgggacgcagagctttcccccgatgccctgcccgcctgcgaaagccgcgcaccgctgctggccatgttggaaaaaggcatctcctgtcccagggcaagcagcatcggacggttgtttgacggggtgtactccctgctgaccggacgccagacttccgcatacgacggtcaggctcccgaactgctggaagccctggctgatgagactgttccggggcaagtctatccccttgccttctatgaggaggagggcttgcgccggtttgacacgcggcctctcatccgtgccgtctgtgccgatgctgccgcggggatttcccctgccgccattgcccgcggctttatggacgcgctttgccggatggcggtggagcagtgctgtgtgctgaaccccggccgcctgcccgtggtgttgtccgggggcgtttttctcaatcaatatctcttgaccgggatgacccgtctgcttgaggatgcgggattttcggtctatacccattgccgcgtttctcccggtgacgaagggctctgcctgggtcagctggcgatcgcggctgcgcaaaggagcgtggattcccatgtgtctggcagtaccgctgaaaattgtatccgttgacggcaagcgcgccgtgggggaagccgccgggctttcccagtctgtgcgggtagattttattcccgacatcgtccccggcgactatgtcatggtccatgcaggctttgccatccagaagctgacgcagcagcaggcagaggaaaaccttgcctgcatccgggaggccatcgatgctctttgaagatacctttcgccgcccggaagggtctgcccgtctgctggaggcgattcatgaactgaccgaaaagaccggtcccctgcgcctgatggagatctgcggcacccacaccatggccattgccaaggcagggttgcgcagtgcacttgccccgggggtgcagctgctgtccggcccgggatgcccggtctgcgtgacgcccgccggtgccattgatgccatcttgcagctttgcggcaagcccggtgttattctggccagctacggcgatctgctgcgggtccccggctcggtgcggggggatacccttttgcgccgccgggcgctgggggcacagattcagaccgtctactcccccatggaagccgtagaattggctgcgcagcaccctgataccgaggtcgttttcctcggcgtcgggttcgagaccaccgcaccgggtacggcagcctgtattctggaagccgccgaccggggcatctccaatttttcggtactgtgtctgctcaagcggacagaacctgccctgcgggagctgattgcagcgtcggattttgcggtggacggtttcctctgccccggacatgtggccgccgtgaccggggcggacgcctttgcctttttgccgggagattaccgactgcccgccgtggtgagcgggtttgaagccggagatattttgtactccgtctggcggctggtctccatgctgagcgagggacgccctgcgcttgaaaacgaatacacccggctggtagcgcccggcggcaaccccgctgcgttggctgccatccgtcaggtatttgaaccttgcagcagcctgtggcgcggtctgggtgagatccccgacagcgggtatgctctgcggccggaataccggcattgggatgctgcccaaaagttcggctttgcccccggtgccgagacggaagtccccggttgccggtgcggggatgtcatacggggcgtctgtgaccctgcccagtgcccgctgttcgggaaagtctgcaccccggccgatcccgtcggcccctgcatggtgtccagcgaaggtgcctgcgccgcggcctggaaataccgcagccgctgaccgttttacgcaagagaggaagatattccatgaaagaaatcgtcacattggatcacggcagcggtgggctgcgcacctcggaactgatcgagcaggtcctgctgcccgcttacggcaacaccgtcctgaacgagctgggcgacggcgcggtactgccggatcttggcggacagccggttttttccaccgacagttttgtggtcactccctggcgcttcccgggcggggacatcggcaaactggcggtgtgcggcactgtcaacgacatctgcatggcgggcggcgagccgaaatacctgagccttgccctgattttggaggaaggctttgccatggacgacctgcgcgccattgttgcttccgccgccgagacggcccggcagtgcggcgtccgcattgtgaccggcgacaccaaggtcgttgcccgggggcaggccgacggcatctacatcaacacggctggcatcggcaggctgcgggcgccgggccttggcaaatcggccatccgtcccggcgacgcggtccttgtgagcggcagtgtgggctgccacggtgcggcggtcatgatggcgcggggggacataccctgcgagggtaccctcctgtccgactgccgtcctttgcacgaactgagcgccgcagcactgaacgcgggcggtgtgcgtattttgcgcgaccccacccgcggcggcgtggcgacgaccctcaacgaatttgtggagggcggtcccctttgcatcgagctggacgaggacgccatcccggttgagccgtccgttgccgcggcctgcgatctgctgggtcttgatccgctgtacgccgcctgcgagggccgtatgctggccgtggtggcccccggtcatgccgaggcagttctgcaagcattgcgcgcgttgccggggggcgaaggtgccgtgcaaattggccgcgtcaccgaagctcgccccggtcaggtggtgctgaatgccgcattcggcagccgcatcctgggcaagctgaccggcgcgcagctgccgcgcatctgctgataagccacggataacgcccggtctgtatgatcttgccggggatacaatcacataatgaaaagcagcctttccgacggcgcggtgttcgcgccaggaaaggctgcttttttgtttcaggcagttttgtaccggatcgagggtcagccggtgctgcgttccccatccggttcatcgtcatcgccgaaaaggcggctttccagccagtccagttccatctcgaatacttcggcgttgttggtttcgttgtgcatctcgtggcggccgccctcgtagatctcgcaagtcaggtcccggacgcctgcatcgcccagcatggcgtagacctcgcgcacaccggcgccgtagtcccccacgggatcgtcggtccccgccaccagcaggatgggcagatccttgggcattgcctccgcccattttttgctgctgacatgggtcagcgcctggagcatatcccggtaggctgccgccgtaaaggtaaaattgcagtcggggtcggcgtcatattccgccaccacctgcggctcccggctgatccatgcatttttggatgttgcatccgggaaccggctgcaatacccggccacctgcgacttgatgagcacgcgggaatgataccgcgggcctgccactcccgccgccaacgagctaatggcaaaacccaacttgtttcgcgccgcagggcctgccgttccgctcacgatcagacagcggatggtgtccggccagaactcggcataccagcgggcaaaaaagctgcccatgctgtgtccgaacaaaaccaccggcagttccggccagcggcggtggagtagatcgttcatggtcttgagatccgccaagatcatccgccagccgtttttgtccgcaaaatggccgtgttcctccgccggtacactggcgccgtggcccagatggtcgttgcccgccaccgcatatccatgtgcggtaaaaaattcgatcatgcggcggtagcggccgatatactcacacatgccgtggctgatctgaatgacggcgcgaggcggttcctcctttggaagatagacatacgccgcaatggtatgctgcccgtccgcagacgggtagctgagtttttcacactggagttcttccataccgttgtcccctttccctgtgggagagtgtcagaaccgttccacgccgtccgccgtgacacgggcataaaccagcggcggcagcttgggcggctgggcgtcgatgaccaggccgccgcggtacatttcctcagccgcggcaaacagtgccgggtcatccgcatagaaggtgcagatggcatcccccgaccggaccatatcgcccagttttttgtgcatgacaatgcccgcggcaaagtcgatggagtcttccttttggatgcggcccgcgcccagaagcacgctggcgttgccgatcttctccacgtcgttcttgacgatatagccgttttcccgggcggtgatcttgtagctgtacgccgccttgcgcagcttatccgggtctttcaccatctccacatcgccgccctgggccgcaaacatctggcagcacttgacaaaggcggtgccgtcctgcagcgtccgctctgccatggcgcggcattcggtcagcgtgccctttcctgccagtaccagcatattggaggcaagctgcaggcagacctcggtcaggtcggccgggcctttgcctttgagcaccgcgatgctctcggcgatttccagggagttgccgatattatgccccaaaggcttatccatatcggtgatgagcgctgccaccttgcggccatgggcggtgccgatggacaccatcaagcgggcaagctcaatggcatcgtccagatttttcatgaaggcgccgtcacccatggtaacatccagcaggatggcatcggaccccgccgccagctttttgctcatgatggaggaagcgatgagcgggatgcaccccaccgtggcggtcacgtcgcgcagggcgtaaagttttttatccgccaccgcgatctctccgctctggccgatgaccgaaatgccgatctcattgacctggcggaaaaattcttcctgattcagagcggtgcgggtaccggggaccgactccatcttatccacggtgccgccggtatggccaaggccgcggccgctcatcttggcgattttgacaccgcaggccgccaccatgggggcaatgaccagtgtcgtcttgtcgcccacaccgcccgtggagtgcttatccaccttgatgccctgaatggccgacaggtccaccatatctcccgagtgcgccatcacatcggtcaggatggcggtctcctcatcggccataccccgcaggtaaattgccatgagcagagcactcatctggtagtcggggatctcccccgccacgtaaccgttgaccgcaaatgcgatttcttcccgggacagtgtgccgccgtcccgttttttggcaatgacatcatacattctcatggatgtttctccttatgtggatgcggcggattcgccgcaaaagcgaaacggagccggctgccgcgccgtgagacagccgccagggctggggctccggcgtatggtcaccgactccgttctgtttatgatagttttacacctgggatacgccgatcagcgggaacccttgtcgtaggggatgccctccgccttgggtgccttggacttcttggaagtgaagatcaggacgatcatggtgacgatatagggcagcatctggtacaggttggaaatatccttgacgccctcaaacttgggcaggaatgccagcgaaccactgtatgccgcaatgaccttgaacagggcgaagaaaatcgccgagcccaggatgggcagaggtttccagttgccaaagatcatgaccgccagggccaggaagccatagcctcccacatcggagttaaagccgctgccggccgccaccgtgtaggccaggccaccgatgccacccaggaaaccggaaatcagcacgccggcatagcgcatacggtagacgttgatgcccaccgagtccgccgcctggggatgctcgccgcaggcacgcaagcgcaggccgaagcgggtcttgtacagcaccacgtaggagacaatgagcagcacaatggcgatgggggtggtgaggtagaaatacttgaagatcagggtattccagaaagtctggccctcaacgggggcaaggccgaaggtctcgcgggtgatgcgggcccagctggggacctgaatggtggtcaggccctggccctggatggcccaggtcagaacgacggcaaaagccggtgcgaactggttgagggctgtgccgccgatggtctggtccgccttgaggttgatggccgcaaacgccaggaacagcgagaagatcatgccgcaggcgccggcgatcaggatggcgcagaacatggcaagctggggatgatccggaccaaagccgctcttgtcaaaggcctgcagcgagaagcaggcaaacagagcgccgatgatcatcatgccttccagggcgatgttgatgacgccggaatgctccgagaacatgccgcccaaagcgaccagcagcagcggcactgcaaaaaggaccgtcagactgatgatgtttgcaaatacgatcatttctttgccgcctccttctgcttacgattggcaaacgccttggaaatgacaccgcgcatcagcagtgcgaaagccgccaggtagatgatgaccgcaatgacgatgtcggtggtttcgggggaatattccggctgcatggcagcgccgcccacctggatatagctgatgaacagtgcgctgaaaataacgccgatggggttggagtttgccagcagcgccaccgggataccgttgaagcccatggccagaacggatttttcaatgacgtactgcacggtaccggccaggtagtagataccgccgcccaggccggacagcgcgcctgcaatgaccatggagaggacgatgttgcgtttggcgttgatgcccgcgtactgggaagcatcccggttgaggccgcaggctttgagctcgtagccgaaggtcgtcttttgcagcacgacccagaccacgatagcaaacaggatggtgatgaggacgctgatgttgatccagctggagttgccgaacagcttatccagaccgcccttgggaatgatagcgctggggtttgcagagctgagagctgcggtacggtcggagttggatgcgccccaggccgatgccagcatggtaggcatgttggcgattagaaggttgaccaggtacatgccgatccagttgaacatgatggaggtgatgacctcattgacattgaacagcgccttgaacaggccggggaaaataccccagatggcgccgcccagcatggcggccacaaggcagacataccagggcatctggaactgaatggcacagaccagagcgaagaaggttcccatggtatactggccgggtgcgccgatgttgaacagacccgtcttgaaggcaaagcccaccgaaaggccgcacatcataaggggcgcggcctggtacaggaccttgccgaacttgtccatgctggcaatgccggtacccagcatggcagccatgcccttggccgaagcctcggggttgaggacgaccagaagaaggtatcccagcagcaggccgacgacgatggacagcaggctggccagaacgccgatcagcgccgcattttgcgaaaggggctttctgctttttttcatgcttttgcctccccctgtttcttgccgcctgccatatacaggcccagttcctgcaccgtggtcttggcgggatcaaactcgcccacgatctcgccttcatacatcacgaggatgcggtcggacaggttcatgacttcgtccagttccaggctgacgagcaggactgcacggccggcgtcgcgctcggccacgagctgtttgtggatatattcgatggcgcccacgtccagaccacgggtgggctggaccgctaccagaagctgcggctccttgtcgatctcacgggcgatgatggctttctgctggttgccgcccgacatgctgcgggcaatggtctcggttccctgaccgctgcgcacgtcatactgacggatcagcttttcggcatattcctggacttcacccttgcggataaagccatgattctggaactggggctgccagtagcgctgcaggaccatattttcacccagggtataatccaggaccagaccgtgtttgtggcggtcctccggaatatggctcatgccggctttggaacgctcccggatggaggcgtcggtgatgtcctggccgcacaaacggatatgaccgccggtggccttttccagaccggtgatgccgtagatcagctcactctggccgttgccctcgataccggcaacgcagaggatctcccctgcatggacctggaaggacacgcccttgacggcgttatttttatgtgccttgctgggcaccaccaggttttccacctcaaggatgggctcaccgggctgggcgggctttttctccacggcaaagctgacgttgcggccgaccatcaggcgggaaagttcctccttggtggtggtagcaatgtcaacggtacccatgcagcggcccttgcgcagaacagtgcagcggtccgctaccgccatgatctcattgagcttgtgggtgatgaacaggatgctcttgccctcggccttgaagccgcgcatgatctccatcagttcgtcgatctcctgaggcgtgaggaccgcagtgggctcgtcgaaaatcaggatgtcgttatcacggtagagcatcttaaggatctcgacacgctgctgcatgcccaccgagatgttctccaccagggcatcagcgtcaacgcgcaggccgtacttttcagaaagcgcaacgacctttttgcgtgcctcatccttgcggaggaagccgaagcgggtctcctccacgccaaggatgatattgtccagcacggtaaagcattccaccagcttgaagtgctggtgcaccatgccgatgcccaggcggttggcatcgttggggtctttgatgcggacctcccgcccgtcctttttaattacacctttttccggctggtacagaccgaacagtacactcatcagagtggacttgcccgcgccgttttcacccaacagcgcatggatctcgccacggcgcagctgcaaggtgatgtcatcattggccttgattccgggaaattcctttgtgatgttcaacatctcaatgacaaaatcctctgccaatggtgcgttccccctttcatttgtatcctgtgcataccgtccgccccgtgcagccggcacaaagccgtcggactgccccgccgggccgcccaaaaggccgcaatttccggcgcggcgccgcaatttttacggcagacaacacggcaccgccggacttgaccggcgatgcaggcaggataccatttagtttttcttggtcttattatattgaatcccggcactttttacaaggtttttctccggattttcggatacactgtcaaaaattacagaaaagtcatactattgttgtatgaaaaatcaatacaaacaccgtgcaattcttgtcacggcagatatgctgtgctataatttagggaaaccgcgccgcccggggatccgggtcacgatcgcggaaaaactttgtgtggcagccagccacgcgggtaaggagtaaaaagatgaaaaattccgaaaagacgctcgacatgatcgtaaacctgtgcaaaaaccgcgggttcatttaccccggcagcgaaatttacggcggcctggccaacagctgggactacggccccctgggcgttgagttcaaaaacaacgtcaagaaggcatggctgaagaagttcgtgcaggaaagcccctacaacgtgggcctggacgccgccatcctgatgaacccccagacctgggtcaccaccggacatgtggccagcttttcggacccgctgctggactgccgcgcctgcaagagccgtcaccgcgccgacaagctgattgccgactgcgagcagggcaagggtgtggatgtggacgccatgacctttgacgagatggatgctttcatcgcctcccatgacgaggtggtctgccccgtctgcggcaagcatgactttacccccatccgtaagttcaacctgatgttcaagaccgccatcggcgttaccgaggactcctcctccacctgctatctgcgccccgagaccgcgcagggcatcttcgtcaactttgccaacatccagcgcaccacccgccgcaagctgcctttcggcgtctgccaggtgggcaaggccttccgcaacgagatcaccccgggcaacttcaccttccgtacccgtgagttcgagcagatggagtgcgagttcttctgcaagcccggcaccgacctggagtggttcgcttactggaaagattactgcaccaactggctgctgagcctgggcatcaagcaggagaacctgcgtctgcgtgaccacgaggccgccgagctggcattctactcccgcgccaccaccgacatcgagtatgccttcccgttcaccgactggggcgagctgtggggcattgccgaccgcaccaactacgacctgggccgtcatcaggaggcttccggcaagagcctggagtacttcgatcccgagaccaacgagcactatatcccctacgtcatcgagccttccctgggctgcgaccgtgtggcgctggccttcctgtgcgaagcctacgacgaggagcacctggtggactccaagggcaaggaagacatccgcaccgtgctgcacctgcatcccttcctggcacccttcaagtgcgccgttctgcctctgtccaagaagctgtccgacaaggccatggagatccgcaacgagctggccaaggactttatggtcgacttcgacgacgccggttccatcggcaagcgctaccgtcggcaggacgagatcggcaccccgctgtgcgtgaccgtggacttccagaccgtcggcgacgacaagacccccgccgacaactgcgtcaccgtccgtgaccgcgacaccatggagcaggtccgtctgcccatctccgagctgaaggactacatcgccaagaaagtggcgttctgatcttacagtccggaatttctcacaaactgtaaaagggacaccgtccgtgtggacggtgtccctttttgtttgtgtgtacaggcggggttactcggcgatctgctcccgcaggcggtcagccgaggggatcaggatgcggcggccctgcagctggataaggccttccccccgcagctcggtgatgatccggttgacgctgttgcgggtggagatgccgcagaacccggcgatatcctcgtaggaaacgacaaagtcgatgagggtgccgccgggcaccgcacagccgaactgctgcgccatgttgagaaggaacccgcacaccacgccctttttgctgttcatggccagcagctgctggctgcggatgctctcggaccagcggcggcggtagtattccttgacatactgctggagccccgggtcccggttgagttcattccacagctccacccgggggaccttataaaaggaagcgcggtcgctttccacacggatattgaagggcgcactggtaaaggcggagacttcgtcccgcagcagcgaaatgatggacgggcctttgagataggcaatattgaactcccgcccgtttttcaggataatgctggtcttgacgacgccgtgggccagcacataggtaaagggctggtcaaggccgcagtaggccagataggtatgacgagggcgttcctccggggtatagccccacgcctggagccgttccagcagatacccgtcgcggtccatcttcctctccccttttctctgtaaagtgtaacaaatgataccatcttttgaggtggtttgtccagataccctgtgatacacttctaacgccgtttgaaaaggccgctacaataagcaaacaaaggaagtgtacgttccatgaaagagatccgcctgccctatgacaccggcacccagacgcttcacattgaggagaagaatctggccggtgttctggtttcccgtcaggcttcctatcgtgccaacaagagtgaggccgaactggtggaggaatccctggatcaccccatcggctcccccaagctggaggaactggccaaggacaaaaagaacattgtcatcatcagttccgaccacacccgcccggtgccttcggccatcatcatgcccattctgctgcggcgtctgcgcagcgcggctcccgatgcccgcatccgcattctggtggcgacgggcttccatcgtgcttccacccgtgaggagctgatcgccaaatacggtgaggacatcgtcaacaacgtggagatcgtcatgcacgatgcccgcaagtctcccatggtcaatgtgggcaccctgcccagcggcggcaactgcctgatcaacatggtcgcagccagtgccgacctgctgctggccgaaggtttcatcgaggctcacttctttgccgggttctccggcggacgcaaggcggttctgcccggcattgccagctacaagaccattcaggccaaccactgcggcgaattcattgcctcccccgactgccgcaccggcaatcttgacctcaaccccatccacgccgacatggtgtttgccgcccgggcggcccggctggccttcatcgtcaacgttgtccttaacgaggacaaaaagatcatcgggtcctttgcaggcgatgtggagaaagctcatctgaccggctgcgattttgtcagcgaccttgcccatgtggacaaagtcccctgcgacattgccgtttccaccaacggcgggtatcctcttgatcagaacgtctaccaggccgtcaagggcatgaccgccgccgaagctaccgtccgcgagggcggtgtcatcatcatggtggcgggctgccgggacggccacggcggacaggccttctacgagaacatcgccaacgccgaatcgcccgaggctttcctgcatcaggccatggcaacgccgcgccttgagacagtccccgaacagtggaccagccagattctggcgcgcattctggtcaaataccacgtgatcctggtgtccgatctgctggaccccgatattgccgcccatctgcacatggagcttgcccccaccgttgacgaggcccttgcccgggcctatgcccggatgggcagcgacgcccgcgtggcggtcattcccgacggcctgtccgtcatcgtacactgagacagcaggaggaggaaaccatgcttcacaatgttttggccgagtttctcggcacgggattgatgatcgttttcggcgtcggcgttcactgcgatgaggtgctgaaaagcagcaaataccgcggttccggtcatctgtttgccatcaccacctggggctttggcatctcgatcgttctggtcattttcggcggtgtctgcctgaaccccgccatggccctggcccaggccatcctgggtatgatcccctggagctgctttatcccctatgctctggcggagatggccggcgcttttgtgggcgcggtcatctgctacatcatgtatgccgaccagttcaaggccagcgaaaacgaagtcgaccctattgcggttcgcaacatcttttccaccaacccgcccatccgggatctgccccgcaactattttgtggaggcctttgccaccaccgtctttctcagcgccatccttgccatggccaagaactacgaagcctggctgcccatcggcgtaggcctgctggtctgggctgtgggcatgggctttggcggcaccaccggtttcgccatgaaccaggcccgggatctgggtccccgtcttgcctaccagctgctgcccatcggcaacaaggcggacaacgactggaaatacggcctgcttgttcccggcacggccccctttgtgggcgcgatctgcgccgcgctgttctgccgcttcttcctggggctgtaacgttacgccattttctcccctcttgcaccatggggcgcctccgccagatacggagacgccccatgttttgtctttaagaatagatgcggtcggtataggtgttgcgggcacccaatacgaccagcacgcagaccagcaccgcgccgaccagcggcacaggctgaaaagcgccttccccaagggcccggccaaaaatcttcagcagttccggaacgggaatcagcgcgatgaaataggcaatgcccattaaaatgcgatacggcaaaaggcgttgggcgccgcgtcccagtaccaccctggcaatggcggaaaacagaagcactccgccgccgtaaagggcaaggatggcccccaccagctgcacggccagacctgccagaccgctgaaccctgcgccagccatgccgatgagcatggcgtagccctccacgtcccccacggggccggtggtttcggtggcctcattccacatggagcctgccgtatccaaaagcaggctgccgctgaccaatgcgacgatgcccagaaccagcacgatcgccgcgggaatccccagtaacagcagggtgtggttggcacgcttcatacaaaccgcctccttctctctttaccgacagtataccggaagcaggcggcgcctgcaaggttttccagccatttacggcagagtatggtgtatcacttttcttttggctgggtatcgtgtatactggaaccattcaaactatcgaacgccctgtacaaacacagggtataaaggagcgatcaaatatggatcagaaacttttgcagttgtatgcggactttgtggtcaaagtcggcgtcaatgtccgtccccgccagaatttcatcgtgcgctgccccgtcaccatgccggagttcgcccacgcctgtgccaaagccggttacgaggccggcgccaagcgggtcatcgtgcgctgggaggacgagcgtctttcccgcattgacatggagatggccgccgaggacgacctgaaagccatgaagccctacgagctgcgcagctacctggactatgccgaggacccggacggctgctgcaccctggccatccatgccgccgaccccgaggcttacgccggtctggatgcaggcaagctgaaccgtgtcaacctggcccggcgcaccatcctcaaaccctggcaggaatacaccatgaacgaccgcgttcagtggtgcgtggttgccgtgcctgctcccggttgggcggccaaggtgttccccgacctgccccaggacgaggccatggaaaagctttggtccctgatctttgacgtctgccgtgtgaccggcggcgatccggtgaccgagtggaaagcccatgtcgccaagaccaaggcccgccgcgaccagctcaacgcctggcagctggacagcgtccatatgaccagcagcaacggtaccgacctgaccatcggtctggcggaggacgccacctgggagggtgcttccagcgtggcggaaaatggcgttgagttcattgccaacgttcccaccgaggaagtgttcactgcaccccaccgcgaccgcgtgaacggcgttgtctacggcacccgcccctacgcctacaatggccagctgatcgagggctggcatgtcaccttcaaggacggcaaggtggtggagcacggcgccgacaaaaacgccgaactgctgggtgagctgctttccaccgacgaaaacgccaatcgcattggtgagatcgctctggttccggcttccagccccatccgccgcagcggcgtgctgttctacaacactctgtttgacgagaacgccgcctgccacattgccttcggtgcgggctaccccaccaacattgtgggcggccgcgatatgacccgtgcgcagctgatggagaagggcctgaacgactccgccatccacgaggacgtgatggtcggcgccgaggacacccatgtcaccggtctgcgcaaaaacggcgagacggtggagatcttccagggcggcgaatgggcgttctgataaagggcacttttgcgctttgacgggtttccatccggcaaaacaaacacaggccccgcctgcttcgcatgttgtcccctttcgggacagcaccgcgaggcaggcggggctttttatttttcttgttttctctttatgcgttttgtccgtctctttgccgggcaaagggccgcgccgcctatgtacgactgacttttgacggcaggtacctgccgggtgtatggccacgatcttctgtcctgtatcggaagcacggtcccggcattgtatgccgggacggccggcgtttttcacggataaaactgacggcaaaagtcctgggaggaaagctgcgactggagttcatcgctccatctttccggcgagagcagatccgacaacgggctgccgaacaggtcttccatatccttgcggtcaaaggagtagctgttgtcgtcaaaatggtaggtgatccctgccagattgtcgatcgccgccatggccgcggccgaattataaatcaagtcccgctgaactttttcttccccgatatgggagaccgtatcatggtagttgaccgtcaaaatgcaattttctgaatcgatctcgtagcttttgccaacattgctcaacggcagatgctcaaaaaggccgcccacattgctggcgttgcccacgtacgggaaacggtagtcctcgatcgatgcaatatcatgggtcagagcgtccgtctgattcagggcataggcttcctcttttctctgaatctccggaaggaccaaaaattgaacggtgcaaaaaagaagaatgccaacggcaagcagaacaaggatcactttgtcttttttattcatcctccccaccctttctgttttttgtcaggagcctggaaaagctgccgaaagtgagcggaacgaaaatcgtgagcagcggcagatagaaccgcatggcaatgctcgccatttcatacgggccgctgacggacaccggcctgccgaaccagagattgctcccgaacgtcactgccgccatcattccggccgacaccaaaaagaaaagcccccagatcacccacaccagttttctgcgacgttcacttgccgttaccgagagaacagccacaccgttcaccggatgatatttcatccaggcataagcgcatcccgccgcaaggacaagaatacccccgacatagctgagaaacgccgggcccacaaagagaaggggcagagaaaagatccagaacagcacgcagttcagcagcaccgactgcatacattccaggcgatacgttcccacatcggtcagctggttcccatcgatcaaaaagtccacggcaggcaggctttccttggccttctgggtcgcactttcggcgtccatgccctgcgccatcaggtcatcccgctttgccatcatattgctgacgatctcttctttcaggtcctgtatctccggggtcaatggctgatgccggaacaggccgtccacatagttttgcagatccgtcacgttgttgcacctccttgaagaagcattgtaatgattttttgtgcgtgcagccactcggcaagagcctgttcataggcagcaatgccgctctgtgtgatatggtaatatttgcgccgtccgccctgagactggtccccccaatagctgacaatgtgaccttgcttttccaagcgtttcaggctggtatacaaagacggttccttcagttcatattcatgctggctgtttaccgacaccgccttcatgatttcatagccatagttatccccatctttcaggattttcaaaataatggtatcgatatggccacggatcaaatcgctgttgatctcccgctccggcatcctgtccacctccatctgtatcatatcgcatattactatgtgtgtcaatataccttgtcacaaattattttggagcaaaaaacaaaacccccgccgcaatgcggcaggggtttgtggcggaaagaaagggattcgaacccttgagggctttaggggccctacacgatttccagtcgtgcgccttagaccagctcagccatctttccatatcagtctggcgactagcgccaaactgcgtattgtattatagcaagacttccctatgctgtcaatagcttttttgcaaaaaacaacattttttataaaattgctttttacagtccttccagcgtcacaaccggccagcccaaaagccgggcggcaccatggtcgtgcgtgaccagcagagcgtcccgtcccgccgtgtgacgaaccacggcagcggcggcatcccccaccagggcgtcgtccatgccggtgaacggttcatccataagcaaaatctccgcctcacagcaaagcagcgcccgcagcagtgcggcacggcgcttttgaccgccggacaaccggctgaccggctgggacaggtcggcgtccgtaaagccaaggcggcggagttcctccgtcgcctgctcccgggtcacaccgtgtccggtcaggcagatgttatccgccgccgtgagctgagggcaaagccggtcctcctgaaagacagcggcgacattgcggccggagaggccttctatcctgccggaatccggctgttccaagcccatcaggatgcgcagcagggtggttttcccctgccccgacggtcccattaaaaccacaggcccatcaatgcagagatctagcccccgcagcacctgcttttctccaaaggccttgcaaagtccggtgatacggatcatgcgctcacctccccgcaaaggtgttctttccaggcacgcagcagtctggccgcgcctgccgacagcagcgccgacagcaggacaatgaccagcgtccaggcaaagacatccggcgtagtcagggtaattttggcacggtagagcgcatcgcccaccgagtgatcgggcaggccgatgacctcggcggagacgccgcttttccagcacatgcccatggcggcggcacagctttcggaaaaggccggaaacacaccgggcagccagatatagcgcagccgctgggccggtgtcagacggtagacccgggccatctccagaagctgcgggtcggtatccgcaataccgcccgcaacccccgcgtataccaccggcagaacatgggtaaagctgaccaccaccgaaaggttatcgctgcgcacccacagcagtgccagaatgacaaagctggccaccggcatggcccggatcagctgcatgaggggagcaaacagcacccccacaatgcgccatcttgcccctgctgccgccaacgcggcgccgcagacaacggccagtacaaagcccgccaggatgcgcagggagctgaacgcaatgcggtaccagaactctgccgtgggaagaagccgggccagagcctgcagggtccccagcggtgtggtcaaaaacagtcccccgtggcccagtgccatggcggccagctgccagacgaccacccaaaacgccacggcgcctgccgtttgcagcaggcgcctccggcgggaaatctcaggcttccgcattgtaatagaaagcatcgtccggcatcgcgccgcccacactggagggatcggcgtcatacaggacctggaagtaattggtcaggtcagtcttcatctcgctacccgtctcaaacacgatattgcactcgggcagagccttctgggccagggccgctttggcaacgatgccgtactcctcgcacagggcggcagtgccttccagatcggtattggcagcttccacgctggccttgtagccgtccatgaaagccgcaaaggcgtcggggtcgcgctcaatggcgtcggtgcgcaccaccaggacgccggtgaccagcttgctgcctgcaacggcttcccactcggtgttcatgtccagagccacgcgcagtccttccacctgggaaagcgcgctggtgacaaagggctggggcagcatggcaatggtgccgcgcccggcctgcagctgggacagagcctcggtggcttcgctgaaatactcaatggtaacgtcggtgtccggatcaaggccgttctgctccagcacgtagcgcagcacgtactccggggtagttcccttgcccgtggtcaggatggtctggcctttcaggtccgccaccgactgaacggtgtcgccctgctccagaatatacaggacgcccagcgtgttgatgcaggccacctgaacggcgccctcggtacgctggtagagcgtggctgccaggttggccggcacggcggcggcgtcaatgtcgcccttaaccagcagcggcacgatctcgtcggcggctccgtacatggtgaactcgtactcaccggtagcctcgctgtcagagatcaggttacacagacccatggtggtagggcctttcagtcccgccacccgcagggaggccgcggacgtttcgggcgtttgttcctccggggccgcagtctcaacgggggtggtttccgccgtcgccgcagaactgctctgggaagaatcggacgtgccgcacgctgccagggcagcgcacatgaccaatgccgtgaaaccggcagccaaccgtttgagtatcatttgtaaaactcctccttctgtatcggcagagcgcggacggttccctccatgccgtgtcccgccgtaaaaaacgcggcggcaggacggcaaaacgccgccctgcttgaattcgctttcttactatactataatgaaaacaaaatttccgttgccggcgcaacatgacgccgtcacgggtgaggaggctcccctttggatctgcggccctattatgacacgctgcgcgccacgtcgctgctgcagaatatgcgcgacgacgagcttgacagcatgatgcagtgtttccgtccccgggtgcggcgctatgaaaaaggggagtttctgcttttggccgggtatgaaaaccatgaagtggggattgtgctggaaggctccatcaccgctttcaaaaacacgccagacggttccagtgttgccatcacccatatggggcctgcggggttgttcggggacgtgctgtccgggtccagcctgcgcagcccggtgagtgtgatggccgacaccgattgtctggccgcctacctgccctatcagaaaatcattcacccctgcgccaatctgcacgagtcccactaccagcttttgcagaatctggtcactaccatcagcaacaaatattttgccctggaccgacgggtggaactgctgatctgcaaaagcctgcgggcacgcatctgcatctggctgctggacgaggccgagcgcgccaaaagcagcaccttctcggtctcgctgacccgggccggcctggccgagtacctcaactgcgaccgcagcgccctgagccgcgagctgggacgcatgcagcaggaaggtctgatcgagacttacaggggcagcttcaaaattctggacgccgaccgcctgcgggcgcaatatcaggaagggaagatcaatcacgcatgaaaaatcataagaaccagccgatcctgtatatcgtcattccctgctacaatgagcaggaagttctgcccatcaccgcgcccctgttccttcagaagatccagcagctggccggggcaggcagcatcagccccgacagccgcatcctgtttgtcaatgacggctccaaggacaagacctgggagatcatctgcgatctggcaaagagcgacccgcactatctgggcatcagccagagccgcaaccgcggccaccagaatgccgttctggccgggctgatggaggcacgcgaccgctgcgacattaccatttccatcgactgcgacggacaggacgacatcaacgccatggacaagatggtggaagcctaccatgacggctgcgaggtggtgtacggcgtgcgcagcagccgccagaccgacacctttttcaagcgttttaccgccgagagcttttacaagctgctcaacgccatgggggccgaggtcgtctttaaccatgcggactaccgcctgatgagcgcccgtgtcctcaaagagtttgccaacttcaaggaagtcaatctgtttttgcggggcatggtgccgctggtgggcttcaagagcaccagcgttgcttacgagcgccacgagcgtctggccggagaaagccactatcccctgtccaaaatgctagccctggcctttgacggcattaccagcctttcggtcaagcccatccgcctgatcaccgggttcggcgtgttcgtggcgctcatcagctttatcggtgtgatctgggcggtcatccaggccatcctgggccacacggtatccggctgggccagcacgaccagcatcatctgctttgtatcgggcgttcagctcatctgcctgggcgtcatcggtgagtatatcggcaagatctatatggagacaaaagcccggccgcgctacatcatcagcgagcgcacctgggacgaggaggaataaagatggcccgtcaggtatggaaaggttccaccctgctcaatcccgagccgccggttctggtaagctgcggccctgcggaaaagcccaatctcatcacagtaggctggtgcggcaccatctgcacccagccgcccatggtcagcatcagcgtccggccggagcggtacagccacggcctgatctgtgacagcggcgagttcgtcatcaacctgcccaccgaaagtctgactcgcgccgtggactggtgcggcgtcaagagcggccgggatgtggacaagtttgaggctatgaagctctctgcgctgcccgctgccaaggtcggcaccgttcttttggagcaaagtcccgtcaacctggaatgcaaagtgacccagcgcatccctctgggcagccatgacttgtttttggcggaagtggtggccgtggatgtggacgaaagcctgcttgacgaaaccggacggctgtgtctcaaccgtgccaaactgatcgtctattcccacggggattatctggccctgggccgccgcctgggcaagttcggatacagcgtccgcaaaaagccccgccgcacgggaaaataagccgccggtttgaggctgcatacagggctttgccgggaagtgcaagcgtcgccgtgagcactgcaagaaagcaagggttctgccgggaccggaacgtatcgggagaacctttgcagcatgaccggcagaattttatggcattgatcgcggacgaaactgcgcaaaaaagcctgtgccttttcagaacgttctgaaaaggcacaggccttattgttttatttcatgctttatgggtttgcgtatgttgcttttggggttgcgccggcctgctcctcaaaacgaatccatcgttttggggtatgtgttccgtgcggaacatgagcggcgggtcagttaccctcctcgattttggccaccggcacattggcgtactcatccggcgggtcaaggggcagtttctgcatgtactcgtgcatggcttcggccacttttttgctgtatgccaccgcctcgacgacggtgcgcgcacctttgaccgcatcccccgaggcaaagacgccgggcatggttgtgcggcccacttcgtcggtcacaaacagtccccgctggttgatctggatctgtttttcgctgtccgaaatggtggtgcggggaccctggctgatggagacgatgacgctgtccgcgggatagagcatctccgtaccgggcagatcattcagggttccgtcctccgtctcctcaaggtcccgcagaaccacgccccggtcggtaatctccaccggctttttgttatacaagaactccacgccctccagcttggcgtagctggtctcgtaatcgctggcggccacttttttggtcaccgaaacgcaggtcacatggcgggtaccgtggcggatggctgtgcgggccacatccatggccgcattgcccgcgccgatgatgaccacccggttgcccagatgatagacatccgggttttgcaggtagttgatggcgtaatgcacatggcccaggctctcccctttgatatgcagggtattgggccgccagacgccggtgccgatgaaaatcgccttgtagccgtcgcggaaaaggtcctccagtttgagggcctgtccgatgtcggtattgggacggaccttgatgtccttgaggcgcaggtggcggtattcaaagtcgtccagcacgcttttgggaaggcggaattcgggaatgccatagcgcagaacgccgccgatcttatcgtgcgcttcaaagatggtgacatcgtacccgtagcgcgccagaatgaccgcgatggtcaggcccgccgggccggaaccgatgattgcggcccgcttgccgttgggctttgcaggcccatggaccatctgggaggcgtaggtggaggagatgtaattttcaatgaccgaaaaatgcaccggagaccccttgatgccgcggacacaatggccctcgcactgattttcgtgattgcagaccaggctgcacacggtggtaagagggttgttctcaaacagcatccgtcctgcctcattgagtttattgtctttgagcaggcggatgacttccgggatgttggtgtggatgggacagccctcctggcagcgtggttttttgcagcccaggcagagattcgcctcgtccataacgtgcagcgccatacaattcttcccctttccgcgcggttccatcagaaaacaagcccctaattcgggagcaaagcggccgtggccgctcccttgttttgggatgttccttgcgcccttcgcacagattttgcagattcggattgcatcaaagttgcagtcctctgcaaggtttatccataattcttttttataataacaccggttttgcggtgaacgcaagtcccgccggcatggtatggaccctgcaaagcgctgaaaaatccacaaaatcgctgtgcagcctgctcagcgcggcggattcatcggaaaggcggctgagttccgccagagaggtggatgcggggatcgccgcatagcgcagggtccccaacgcggcacggcgcgcccccagcacgtgcagccagggcggctgttccggtacctgttcggctgtgacattcatggctgcatccagcaccaggcggcgcagacgggcgtgaggatagcgcttggttttgagcagcgtgtacaggtcctccacatccgcagctttgcggatggcggcatacaaacggttttccagcccttccgaaaggccccgcagaccggccagttcctccggtgtgcggcagcgcagccgggacagaacggcaatggaaaacttttgcatatcggagagttctcccctgtcgacggcttcccggtacagaagggcggcccgggatgggacgtagtcctccaccgcggcaaggccctgaccggcggcaagctcccggagtttgctggccgacgcgattttgcggcccatgacttccccggtccggtcgtcattatgccccgcccctacccggggcagcggcagcggcttcaggtggctgccctggcgcagaatggctttgcagtattccacgccgaggatattgttcggctgttggaggaacgctcccatgccgggcaccagctgctccgcggcggcggctctggccgccgcaaaggtcatgccctgccccatcagaccgggcaggcgccgggacagttccgggctgtccaccagttccgccgcacgcatcagcagatcagcgtccggggtctcggcgccaaaggcaagggtatcacaccccagcgccgtcagctgcgctacccccgccgcggcaaaaccttccgcgcccaggcaggcatagggtgcaggcaggcccagcacgatatccgcccccgcggccagggccgcttccgtccggacgcggctgggcaaaatcgggatgccgccccgctgggtggcaccgtcgctcatgcagacagcgattttgccgatcccctttgcccgcagcatccggaactgctccgcatggccgttatggaaaggatcgtactcggcaataatgcccgcaaactccatagaaacacctcctgttatgcgcaagatatgcaccagtgcgccaatttgcttcttgaaatggatttgcttccattatataataaaatagtaatgtgcaaaagggggttgcccccgtattaaggaggattaccaagtatgaaagtcctggtcatcaactgcggctcatccagcttgaagtatcagctcatcgacatggacggcgagaaagtcctgtgcaaaggtctgtgcgagcgtatcggcatggaaagcagcatgatcacccatgaagccaacggcgagaaaaagaccactcccgccatcttccccacccataccgaagcctttaccgaactggtcaagaagatgactaccggcgaaggcaaggtcatcgacagcgttgctgagatcgatgccatcggccaccgcgttgtccacggcggcgagaagttcaagcagagctgcctgatcacccccgaggtcgttcaggccatccgcgacctgagccctctcgctccgctgcataaccccgctgccattctgggcatcgaagcttcctacaaggtctttggcgaggacaagcccaacgttgctgtgttcgacaccgctttccacagcaccatgccgccgaaggcctacatgtacgccatcccctacgaatactatgagaagtacggcgtccgccgctacggcttccacggcaccagccacaagtatgtcagccaccgtgctgccgagttcctggaagagcctattgagcgcctgaagctcatcacctgccatctgggcaacggttcttccatcgccgcggtcgatcagggcaaggtcgtcgatacctccatgggcatgaccccgctggccggtctgatgatgggaacccgctgcggtgacctggacccttccgtggtcaactacctgaaatacaacctggagatcaccggccatcagctggatgagatcctgaacaagaagtccggcctgctgggcatctccggtgtttccagcgacaagcgcgacgtcgaggctgccgccaaggaaggcaaccagcgtgcacagctggccagcgacatgctgaactaccagatcaagaaaaccatcggcagctacattgcagccatgggcggcgttgacgccatctgcttcaccggcggtatcggcgagcatgacgcggactcccgcgccaagatctgccaccacatggactggctgggcatccgcgtcgacaccgataagaaccgcgatgctcacaagcagaaatccgacgtggtcgagatcactgcctggggcgcccgtgtccgcaccctggtcattgagaccaacgaagagctgatgatcgcccgcgatacccgcgaagtcatcgaaggcaagtaagccagccgtttgattctacacgccccgctgcgctgcggggcgtgttttgtatctatctcggggagggaattcgatttgaagcgtctgatcatggtaaacggaaccatgggtgtgggcaagacctccacctgccgtgcgctgctgccgttggtggaacctgccgcctttctggacggcgactggtgctggaccatgtcccctttcatcgtgaacgacgagaccaaggccatggtactggataacatcgcctgtctgctcaaccggtttctgacttgcagccagtatcagacggtgattttttgctgggtcatgcagcagcaggaaattctggacgaggtattgcaccggctttctctggaagatgtggcggtatccgttttcaccctgaccgccaccgaggaggccctgcgggcaaggctgggtgcggacattgccgccggggtccggcagccgaatattctggagcgaagctgcacctaccttcccctgtatcaaggaatggacaccatccccctggatgtgagcgaccttaccccgcagcaggcggcacaatggatcgcagaacacgcgccgttctgacccgccgcccattattcaattaccaatcaaaaagccgggacatcgtctccgcgctccctgtcaggggctgtgcgaagatacgatgtcccggctttttgccgttcttattgattgcgtttatgcgggggtgtttctcactggctttggaggccattttgtgccgaaagccccatggaaacctccaacgcttcgtccacgcggcgcatgtcgtccggaggaatgcagcccgccttttcccgcaggcggcgcttatccagcgtgcggatctgctcagtcaggatgatgctgtccttggccaggccgcagcggtcggcacgcacgccgatatgggtgggcagacggtttttatcctgacgggaggtgatcgccgcggcgatcacggtgggactgtgccggttgccgatgtcgttctgaacgataagtaccggccgcactcccccctgctccgagcccacaacggggctgagatcggcgtagaaaacttctcccctgtgtacttccatcatgcggtgcctccctgtactgtgatgcaaatttctttgctaatagtataagcaggaaggcacgttttcaatcactttacgaaaacattttgtcaagtccggctgccagctcgtctcctttgcggcagagcgcggcaaacaggcgggtattttccagcgaacggatgagcagccgggtacggatcagatcgatcacggtacagccaacaaaaacgccggcaataacaaacagcgcataccacgccgaaccaggatgctgtgccgaggcaaaaatgccgttccacaaaatgcccatcactgccggggtctgatggatgatataaacgcccaatgttgcggaggacacggtattgatcgcccgcacgctgcccaggggcagatttttgaaaaagaagaagaaagccagcgcacaaaacagattgggcgcagagcacagtgccgtgcggtagtattccagatactgcatgggcttgccgccgacaccctgccacagagccgcccctcgcaggaccgtcagccccgcggcaaagagcatggccagaagcgccgcccggtgtttttgaagaaaccgggagagggcgttgtccgggtaaaggcgcagataccctaccaggagatactcatacgcaaaggtccagagcacatcggagaaaacgccgtcctcggcaaagagagtggaataccccaccagcagcacgccgaacgccaccagcaggccccgcagcgtctgacggggggctgtgcgcagcaccaggttgagcaccggggcaagcagcagcaacaccacgtaggccgccacaaaccagagctgtttggtgctgaccgggaacatcgcccagcgcagagtgccgagcccgacatcgctgcccggcacaaagaagcacagtaccgtcagcggcaccgtgtacagccaaaggctgagccacaggttgagcacccgccgggtgtgaaagggttgtccacacaggaaccaggcgccgatcatgacaaaaatgctgcatccgatgcgggaacctgcccccaacagggcaaaaaacagtgcatgaggcaaggtatcgtacaccgcggcgccgctctgccccgcgtaatggtccgcaatgatgaacagcatacagactatgcgcagcagttccagaccgctctgccgcccgccggtcttttgcgccgtttgcgggcgctgcaaaaccgcagtagccattatgcctctcctttctcgtcttgctcaaggatggcaaaggcacaggccagccctgcctcatgggtaagggaaagatgggcggtcacccggttctgctgcgcccaagcagccgctttgccttccagggcatagcagggcgcccccgacggcgcacgcagcacgccgatttcccccagagcaaatccgcccaggccagtgccgcaggctttcagaaaggcttccttggcggcgaagtttgccgctgccgtctctgcccgcgccttgccgttgcgggcaaggatcagttcccgctctctggcggaaaagacccggtccagaaacacttccctctttatacttttttccatccgtgaaacttcacacagatctgttccaatgcccaatatcaaggtgtttttcctcccccggcacaaagcgcaggcagcataagaaaatggaggttctgcaagaactgctctgcatcgcaaaatcgctgcgttgcagttagaattctgcggctttgttttcctatgaaaccgcttcagaaccggcatgtttttccgacattattatatgtattgtaccatgccgccgccggaaaagatacccccgacggcgcagtctgatccgtccgggcggacggccaaaagacctccgtttctttttgacccttgtccgatgttttttgacgaaccgccggctgttttcccgatttttggtatctcgacacgatcgaagaagaaaatgtgtgagggatttcacacaacttcaaaggactaccccagaattgtcccaaaactttcacaaacaactcctataatcgcccatagaatcgtattggcaggccggcggacaagtgtcttgccggccgtcaaattgagaaaaggagtgaatgtgctttgatcgaagtcagtcacctgacaaagcgctacggcaatcactgcgcggtggacgatatcagtttcaccgtggatgacggctgtatctacggtctgctggggcccaatggtgcgggcaagtccaccaccatgaacgttatcaccggctatctgtcggccaccagcggtaccgtcaagatcgacggccacgatattatggaaaagccccgggaggcgaaatcctgcatcggctacctgcccgagcagcctcccctttatgtggacatgacagtacgggagtacctgatgttcgttgccgagctcaagggcgtgcgccccaaagcagcccgtctggaaagcattgaactggcttccggccgcaccggtctggaaaacatgcagaaccgtctgatccgcaacctgtccaaaggctaccgtcagcgtgtggggatcgccgcaacgcttttgggcgaccccaaagtcattatcctggacgaacccaccgtcggtctggaccctgcccagatgatcgagatccgttccctgatccatgacctgagcaagacccacaccgtcattctgtctagccacatcctgagcgaggtgcaggcagtctgtgaccaggttcttatcatcgcccacggaaagctggttgcgcaaggcacccccgaggaactggccgggcgtcttgcagcccggggtgtcatcgccgcgacagcgctgggcggccgcgatgccgttctgaacgcgctgaaccagatcgacggactggccaacatccagatcaccgccgaaaaaggcaacgaggtcagctttaccgcatccagcgaggccggcgccgacctgcgtgccgccctgtccaaggctctggccgacgcaggctgcccggttctttccctgaccagccagaccatgagtctggaggacgtctttttgcagttgaccgaaaccgcccccgaggccgtttcggaccagacgaaagcgcctgccggggatcgttctacggaagtatccggagatggagccgattccgtaaaagagcctgatgcatctgctgcggcggagagcgacaccggttcgtccggtcagggcgaggctgatgccgcctcaccggaggacggtgaaccgggcaatgaaggaacggattccggttccgaaagtaccacagagaattccgacgctgcgggaaaggagggtgaggagtcttgaaagccatcttcaagcgtgaggtaaagagctactttaccagcatgatcggctatgtggtgattgccgccatctttgcctttatctcgctgtactatacggcaaacaacctgatctatgcgtcgccggattttgcgacttccctttactccacctctctggtcatgctctttgtgctgcccgctttgtccatgcgcagctttgccgacgagcgccgcaacaagaccgaccagctgcttttgaccagccccgtagggattccctccatcgtactggggaaataccttgcccaaatcgcggtgtttggcctgccggtggccctggcctgtgtgatgccgctgatcctgagtctgttcggctcggtatcctttgtgagctgctatgcggcgctgttcgggtattttctggtgggtgcttcctgcattgccgtgggcacctggatctccgccctgacggaaaaccagatcatctcctatctggccaccttcggcgcgctgctggtctgctatatgatcaacagcatccagactctgttcaccagcggcaataccatggcgttcatcgtcttttgcatcattctggccgtggtctcggtgctgatcgggcttttgtgcaaaaacgtcaccatcggcagcgccgttttctgcatcggcgccgtggctctggtgctgctgttcaagctgcgcccgacctggctgctcaccgccttcaatcaggcgctggatgccctggcactgtttgatccgttcatcgattttgtgggcggtatgttcaccctttcgggtgtgatctactacctttccgtgatcgcgttgttcctttttctgaccgggcaggcgctggaacgccgccgctggaactgaggcaaaggagggacttcgcaagatgaaactgtttcacaagaaaaacgcttccgcccggcccgagcctaccgcggagcaaaaagccggcagcgtgcgtgtgctgaaaaacggcgcctatgcaacggcaattaccgttatcgttctggttgcggtgatcctgatcaatcttgtggtgagtgcactgcccaccaaatacaccgagctggatatttcttcctcgggcctgttcacgctgagcgacaccacaaaaaccatgcttgccgctctggatcaggatgtgaccgcctattatctggccgaaaccggaaacgaggattccaacatcacccgtattctggaccgctatgccggtgagagcagccatttcagctggcagcagcgggacccggccctcttccccacctttgcacagcagtacggtgcggaagatgcatccagttccagcgtgatcctggtctgcggggaaaactctactgtcgttgactattacgacatgtacgagacggattactccgactactataccaccggttcctactcgctgaatttttccgccgagtctgctttgaccagcggcattgcccgggtgaccagcgacagctcctacgtgctgtaccagatgaccggccacggcgagacggaactggccggcgatttcaccgagaccctggaaaacgccaacgtgacggtggaaagcctgaatctgctttctgccggtgagatcccggaggatgcttcggtcattctcatcaacgcgccgcaggtggattataccggcgacagcattgaccttctgcgcagctacctggagaacggcggcaagctgctggtcaccagcggcctagagtacgacacgcccaatctggacgccctgctggcagagtacggcatgacccgacagtccggcctggtgatcgagaacgatcccaactactacgcctaccggtattcctccacctacctgctgcccaccatcctctccaactccatcacctcgggcatgaccagcggcatgtacgtctttaccccggtggcacagggcatcctgaccgacaccgaaaacgaggacgtcacctacaccaacctgctgtccaccagtgtggattcctacgccatgcaggactatgccaccgcggagacggcctaccagagtgacgacgacccggtcggccccttctatctcgcagttgcggccgagagcgagtccaccgatgcacagatcgtctggatcaactgcgccaacatctttatttccgagatcgatcagatggtgtcgggcggcaactcccagttcctgggcagtatcgtgaactggctcaacggtgaggaaaacgccgttgtcatcgatgccaagagcatgaacgccgcctacctgacggtaccttccaccgcagtcacagggctgggcctgctgtttgtaatcgtcttgcccattgcctgcatcgttgtcggcgtcgcggtctttatcctgcgccgccgcagatgagcccggccccgtgtacagccaaggaggcacttgcatgaacaaaaagaaacttctccccctctgtatcctggcgggcgtcgtggtggtgctggcactgatcctggcgatgctgactttgttcggcggtgatgccgaggaggatgccggcatcccgctgttcagtgtatccgccgacgcactggacaccattgcctatcaggacggcgacaccgacgtagccctgaccaaaggtgatgacggggtctggacactggacagcgataccctgctgcccattgaccagatggtcgtggaggaactggccgccaacatcaccggcatgaccgctctgcgggagctgggtgacgacgccgatgtggattccatgggctttgcaacgccggaaatgagcatttccttcacttccgggtccgacagctacaccatgaccgtgggcgatcagaacagcatgacggattcctattacgcccggctgggcgatgacggccctgtatacaccgtctccatctccgctctgtcctctctgtgcaagacgcccaagcagctttaccaggcgcaggatatcaccgagatcgagtccagcgatgtcaccgccatgacgctggacaccggcagcgagacgctctcgttcactttgaccgacgagacatgggtccttgacgacgatccggagtatgaactggatcaggacacggtcaagcggatggtcaacaccatctgctcgctggagtccgactggagcatcacccatcccggcagcgacagcgaatacggtctggacgcgcccaatgccatcgtgaccgtcactgccgaggacggcagtaccgttcgctgtgtgttcggcaccacatcggcggaggactcggaggtcgcctatatgacggcatccaccgcggacggcgtggtatatgagatcaacagcaatcacctgaccgcttttgcctacaccaaagacaccttgaaggcggagacccctgaaactgcggaggaatcttccgacagcgagtaagattctgttccctgtcccctgcccccgcgcaagcctgacaaaacacgcccccgtacggaacacagtgagcgttctgtacgggggcttgttgtatactcttatgcaaaaacggcccagcggccgggaagattgtgcgctcttcccggccgccgtgccgtgctatgggatcgtcggttccggacgcagccggacgacggatcaatatttcagatagtccagagtgtccttgtactcggtgtcgagagcagactgcttggtggcctgtgccttgtacttggaaagcatcgctgcgctcttggccgggtccgcgatggtgcccgcaccggcaatgcagccgcccgggcaggccatgccttccagcaggtagccgttgtacttgccggccttggccatcatcatcatcttgcggcactctgccaggccctgggcagaagcgaccttaacctcacggtcaggatcgatcttgtggatggcattgacgactgcctgggcaacgccgccggacactgcgaagccacggccgtcaccgctggcatcgtcgaaggtatcgttggcatcgtcgggcagagaagcaaagtcaacgcccttggcctcaaacatgcccatcagttcctcgaaggtgaggacgaagtcgacctcactgcggacgctgtggcggctggcctccagcttcttggcagagcagggaccgacaaagcagatacggacattcttgtccgaacgcttgatgagacgggcggtcaggaccatgggagtcatggtcatgctgatgcactccgcatactgcgggaacagcttcttggccataacgctccatgccgggcagcaggaggtgcccatgaaggggatcttttcgggaacttccttcatgaagtcattggcttcgtcgatggtgcacaggtcggcgccgacagcaacctcggacacgccggagaagcccagctgctgcatggcgacacgcagcttggcgggggtcaggccggggaactggttgacgaaagccggagcgacgatggcgatgacgcggtcgccgcgcttgatggcctggatgagctggaagatctggcccttgtccacgatggcgccgaaggggcagttgaccaggcacatgccgcaggatacgcacttatcgtaatcgatctcggcacggccgtactggtcggagtggatggcatccatgccgcaggccttggcgcagggacgctccaccttgacgatggcattgtacgggcaggtgctgacgcagcggccgcacttgatgcacaggctctggtcgatgtggctgcggccattacggaagctgatcgcctttttggggcagacttcctggcagggatgagcaaggcagccctggcacatggaggtgaccttgatgaccttttcggggcacttgttgcaggcgaacttgatgacgttgatcagcggcggctcatagtacttgtccgcgatcatgctatgctccagatcctccgaagcgggaacgctctcgtccagcggacgcagagaaagtcccatggcaagacggatacgctcggagacgatcgccctctccaggaagatgctgctgcgcagctggccgacttcgccggggatgatcttatagggcaggtcgcgcatatgcttggcgtaatccgcatactcgccgccttcataggacatgcgcgcaacttcggtaaacaccttgcgacgaatgtccgtgacaggggtgtaaatgcctctcatcttgatagctccttacagcatgaatttatgggggaccaccgcccacgtcttccaacacgccgggccgcaacgcagtctcctgttaaaatattaccaagaaaccacccgttttacaaggccctgcccacagaaaattgcaaaatttccggatttttacctttactttttcgctttgatgtgctgtttttggcatggctgcatccggggccgttcttgattcaggccatcctcccggaggtttcggcgtacgcacaggaaaaacagcttatgggctttcgggttagggttgcagaggcttctctgtttcttccgagccggtatcggggttgtccgtctgccagaacttttccagatcggtgcgcagcacattgcagtcatataccggggtaaaatgggaccagtggggcggcatgagacggcggtaatcccacatggaaaagcggtcgtcaatcagcagcaccacgcccctgtcctgcggggtgcggatgacccggcccgcggcctggaggaccttgttcataccgggatagcggtaggcatagtcaaaaccgctgccccgggtgcgttcaaaataatcccgcagctgttcctgacgggcgcccacctggggcaggccgggtcccactaccgccgcaccgatgaggcggctgcccgccaagtccaccccttccccgaacacgccgcccagcaccgcaaaggccagcagggtctcgttgggatcggggacgaaccgggccaggaattcctcccgcccggcttcgtccagagcggtctgctggacaagcaccgggatttgcggatacttttcctcaaagacggcgcgcaccttgtccagatactgatagcttgggaaaaaggcaatgtaattgcctgtcctcgcccctgtcatttcggccagatagtcggcgatctgcgcgcaggcggcttcccggtcacggtagcgggtgctgacgtcgcaggcacagtacagggcaaagttttcctgcgggaaggggcttttcagcgccaccgcgcgggcatcgggcaggccgcacagatccttgtagtaggaaggcggcgccagcgtggcggaaaacagcaccgctgcccggcccagggcaaagttctgctgcaaaaaggcactggggtccaggcagagctgggtcagccggacatcactgccgaaggccgtggcctgtaacacaaaatggtcgtcaaaggtctccgctacccgcagccaggcccgcacgtcaaaataaagctgcagcagggcggcgtgggtctcgtcgggggtgcggtgctcgtccagccaggcttccagcggttcacacagccggttgagcatccggtccagctcttcgtcacggttggggcggatcagcgttttggcgctgccaccttcctcctcgcatcgatgacgccattccagcagggcattgtttaccttttggatggcggttttaaggcggcttttgccctttcccagcagctttttggccgaggtgaactcacttttcaaaagcgactcggtgtgcatgtcccgggcgcggtcgggcagattatgggcctcgtcaatgaggaagaggtaatcccccaccgactcaaaaaagcgcttgaggctgaccactgggtcgaacagataattgtagtccccgatgatgacgtcgcaccacaggctcaggtccagccccatctcaaaaggacagacggtgtgtttgcgggcggcatcggtgagggtctgggccgtcagggtatcggcgtccagcgtttcccacaaagcatccttgatgcggtcaaagtagccgttggcataggggcaggcttccggggtgcattcgtggctttcggtcaggcagatcttgtccttggcggtcagggtgatgctgcgcagcgtgagccccggatttgcttcatgcagggcggcgatggcattctccgccgcggcacgggtggtcccacgtgccgtcaggtaaaagacagggccgccctcccccatggcctttaaggccgggaacagcacgctgatggtcttgccgatgccagtgggcgcctgacaaagcagctgccctccctgggcgcaggtctggtacacagccgacagcatggccttttggccggggcgatagtccgcaaagggaaagcgcatggcggcaaggctgccggtgcgttgggccttccaccgggcggcacgctgcgcccagggggcatactgttccagcaggccggtcacgatctcctccagctgctgccgggtgtagtcatgggaaaagcgcagtgtcagttcctcgtcgatctgataataggtcagctggacccgcacggcggcaagatcgttctgcgtggcgtagatataggcgtaaacctgcccctgcgcccagtgttcgggggactgttcccccgtgatggaggcggagggcaacgccgtagtcttgatctcatccacggtcgtcacgccgtccggagcggtaaagatgccgtcggcacggccctcgatggtatagtccacctgggcggcaacggtatggtaacgcaaaaacacctcggctttgtagtcggggtgttctgctgtggcggcgcgctgcaatttgcggtgcaggcgtgcgccctcgtttgcacggtcaaagccggtgaaacggttgtcgatgctgccgcggcggagcaaaaactccaccagctgccgcaccggcaatgtcagagacagtgcttgctgctgttccaatgccgtttccctgcctttccggttttgtcattcctggggtcctttttcaaaaagttcctgttcctgccgggcgcggatggcgtctaccttgccaaaatccgtagcgcggatatagtgtttctccagttcgtcatggatgcgcttggcttccgtctgggtctggcaggtgcggtcgatgagctgggaggcgatccgcttctggtattgcagaggtccccgccgggccgccagcattctgccgttcataaagcgggccgcatgaatgttcttctgccccgcaaagttcatgggatgccaggaattggaggtcagcaccgcaaggcgcagttccggcaggatcagatggtcgatcttgcgctggtcggaggcacagcggcagacgtaggtctcgtagccggcctgacgtgcacggtcggccagcagcttcatcatgcgggcggacgcggcaccgtaggcatcgtggatgacataaatggtatccgccgcctttgccgcggtgcgggaaaagacggtgatgccgccgggcgtgggcgcgctgagcagccggatgcgctgagtcccggccttgcggcctgcgcggcggggcatcaggcgggtggccagccgggatgtaaagcggtccagcttttcggtgtcgagagtctgggccgcatactggcggcggcgctgcaaaaggccgcaggccagcgcaaagtcggcggcggcacgctgcaaaagttcgctgttctgtctgcccagggccaggacttcggcgctgtgctcttccaggtagtcattgtccagggtatcgtaaaagctgaccacccgttccgccgcaccgggatatttgcagtccagggtatggggcgcggtggcgtcaagatagagggtgccgtcgggcaggcgcacgccgtccaggctgtcggcatcgctggagcagtggagctgctcgatcacagaaccggcgggcgcgcaggacgcagccctctcccccatgcggcgcatgaaagtcgacttgccgcagccgggtcctgccttgatgagacgcggacgggcaccgggctccgcggcggcttgcgcaaaccagccggagaaaccggagggagacagtgcaccgaggaagaaatccaaaacaggcgtattttccatagaaagggcctcctttacggtcaaaacactggatacgtcccatggtatgcgcaaaaagtccgccgtgtcactgtcctgacaggcacaagccgcccgccgcctgagccaatcggcacggcagcgggcggcttgcagttactctccgtcgggataggtgtggtcacagacctcgtggatcttgtcgcggagggcgacaaaatccccaaaggccagcggcttattgttggggttgcgcaaaagggccgccggatgcaaagtcgccatgaacagcgttccctgtttatcaaagaatttgccgtggtctttggtgaccgacagtttggggtcgatcatctgctgggcggagatgcggcccaggcagaccacgatcttggggcgcaggatgcggaactgctcccgcagccagggcatgcaggcagcggattcctccggcagagggtcccggttctggggcggacggcacttgacgatgttggcgataaagatatttttatcccggctcaggccgatggcttccagatagctgtccagcagcttgccgctgcggcccacaaagggcaggccctgttcatcctcattggcgccggggccttccccgatgaacatgacctcggcatcggcaacgccctggccgaacaccacattctgccgtgtctcgcacaggccgcaccggcggcaggccagacattcctgtttcagggtttcaaaatccatggtacctcctcgcagtctttgcatgcggctcagcagtcggtgcaagaaaaggtggtatcggcgttggggtcggccacctcatcggggctaggctttttgggcgcgcgcagcagcgtgtagggcatgagttccttctcgcaggggatggtatagcgcatcatgggatgcggggtggcattgacctcctcccctgcctcgtttttgatccactggggcgtgatgggtaccaccgtgccgtcgggctgcaaggcttccagggtgtcccccaggaagaagcggccccgctgggtgcagctggcaatgccgttttcccaggagtccaccgtgccgatgaaatcccagtcccgcacataagtatgggagggggtctgaagcgcctgctccttgccgaagtagaatcccggcgagtaatgacggtggctggtacggcccaactcgtcgatgacgtcgtcgggcagttcaaagttgtccgacatggggtccttgaggtaggcatccagagcgcggcggtaggcgctggtgaccgacgccacatagtagaaggtcttggcccggccctcgatcttgagggagtcaatgcccgccttgcagatcaggtcaataaagggagcggtgcacaggtcgttggcgttgaggatatagctgccgctgtccgtctcgccgatctccatatactgcccggggcggcgttcctccaccaggtaatatttccagcggcagggctgggcgcactcgccccggttgccgctgcggccggtcatatagctggacagcaggcagcgccccgagacgctcatgcacatagcaccgtggacaaaggcttccagctccagttcgggcggagtgttgtcccggatctgggcgatctcggtgagagtgagttcccgggagagcaccacgcgctttgctcccaggtgccacgccgccgtggcggctgcgtagttggcaatgcccgcctgggtggagaaatggatgtccacgtccggggcatactttttgaccatttccacgacgcccagatccgccacgatgaaggcatccacgcccgcggcagccgcgtcgcggatggcctggggcaggcggtccagttcctcattggtgggcagagtgttgagggtcagatagacctttttgccccgggcatgggcaaagatgcagccctcggccagttcctcgggggtgaggttgaccggcgcggcccgcatgccgaactccggcaaggcacagtagacggcatcggcgccgaacagcaccgcatatttcagtgtttcaaggttacccgccggggaaagcagttccggctgtgaaagcatggtggttcctccctaattctggttgtgctgcggcggattaccagcccgccttgtccacgttggcagcgtgctcgtcggcggtcttggcgtagaaatactcgccggggtaatcgccgttggggttgccggtgacgaagaagtagtagccttcgtcaatatactcctgatcggggttgatggcagcctcgatggcagccttgcccgggttggagatggcaccggcgggcagaccgctgatacggtaggtgtcataagcggccaggacttcctccgggatagcaccggcctccacccatcccatatactcggccatgggagagttccacaggtagttgttgtctgcgtcgttggtgatatagctggaggcgttggactcgagacggtggtcggcccacaggggatcgtcgctctcgagacggttgtggaagcaggcggagactttgtagtcctccgactccagaccggcttcctcctgaatgaaggaggccaggatcaccgcatcgtcgatggagttgatgcagtcatcggggttggcgtcgatctgatcggtcaggtcggaaatgactttctggaactggttgtagaaagtgcggacgtagttttcgatggtgtcgtcctcaaagaattcataggtgtcggggaagagatagccctcgcaccggagcagacggccctcattgtcggggatctggttccagaaatcgtaatcgctgaaatcggcggtggcctcgctgccgtccttctcgatatacgcatcgccgttggcgcaggccaggaagtccgatgcagagcacagaccgttttcctccatcagctgggcgatggccacggcggtgtagccttcggggaaggtcacggtgacggtcttgcggaagacacgctgctgggacagctgctgcagaatatcattgtaggacatgccggaacgcagggtgatctcgccgggctggaggccgctggctttgccgctgtactgggcataggcacggaacagccactcatgctcgacgatgccggcctcggccagctgacgggcgatttgattggcatttgcaccgtcctcgatggtgatggtcacttcatctcccagcgagccggtacggccgccgacttcgttgtaaagctgaaagacctgccagcctgcggcggcgatcagcgccaggaagagaacaagaatcacaatcccgatggggaaacgacggcggcggggttcttcctcgtagtcctcgtcatcttcatagtcctgttccggctcctccacgggacggctggcagcgggctgtctggccgtgtcctgtgcggcggggcgcgcagtgctgcgcccgttgggattggcggactggccgttctggtttctctggatcctcataggtttttacactccttttaggtaaggcccgcatcacaacagcaggcggaaatacacgtccgacaacggaaacggcttttgcaggaaacggatcatgccgtacccgcagcgcttgccggccccaagaaacagggactggttttccgtcagcaaaagctgcgcctgagtgcagccggtgcgctcacgcgcggcttccagcaggatatcggccgaatggtcgttatccgcctgaagttcaataaactgcaaaacatcttcccgcacaaaataaatcccataaccgcgggaattggcaacgatggtcgcgccgcggtgatacagctgggagacgacctcgttcatactggactcgggcaacgtaaggcagccgggctgataatgcagccgggcttccatcaggcggcgcaccgtcatggtgtcaaactccgccttggcccatagattatggttgatggggcggttgagcacccgcagggaaaaggcatctttgaattccagttcccgcaggcgggacgccgcacgggaggtttccggcacgacggcggcgaactcatacccgcccgctgcgtaggccttgatacagccggtcagcagatgggtcataagcccccgcccctgaaactggggatgggtcgccatgccgcagaaccagatgcccctgtgccctgccatctccaccgggacggcgcacagcatggcggcgggatgttccccgctctgggcgcccggccgctctaccagcaggatgttgtctgtcccgacgatatggttcagccagcccgcgatctcggtccggcttccgccgtatgcttcgcgccgaaaggctgtcagcatttccagatccgcgtccgttgcttttcgcagcatgagcaccttcctttccgccccgcggcagggcgctgccgatgtttacaaaagatccttcagttcatccataatgcggtgatggatcgtctctaccggaagcatgaccttatgaccgtcctgctgttcggtacattcaatccgccgccagcctagggctttggcgcaatactcggcggccgcccgggagcgggccatatactcggtatccttttcctggatgtcctttttgctctcgtcaccgtggtagcgcttggacatgagctgctgggacacctcggggtccaccgccaggtaaatcacccggtcgggcgcggggatgccgattttgttgtactcaaaatcaaacagccagttcaaaaaggaatcccattgttcggggggcagtttggagcactgatgcaccgcgttgctggtggtgtaccggtcggagatgaccagtccgccgttctgataaaacgccccccagttcattttgtagctggcgtagcgatccaccgagaaaaagctcgacgccgcataggcgttgacgtcgtccggtttatcgccgaacttcccggccaggtacatccgcaccagggccgaggaatcgctggcatagtccgggaaggtgaccttgcgcaggtttttgccctgctccgtcagcctctttgccagaagttccgcctgcgtccccttgccggagccgtccaggccttccataataatcagtttacccattttgcagtgcctcttgtttgagttttgcgtatttgtcacgcacctccgctgtttttccgcagcacatggctccttccgggcagggaccggtcaggcagcgggggccagcctgggcaaagatatgcggggccaggggcagcaccaggcgcagcatttcgtccgccacggcgcggatctcccactgagcgcggttgcagcagcgcaggttgaagaagttcagcaggctgcggcagttcatggtcatgaccatcttggtctcgcaggcgttgggcagtacgaaacgggcgtcctcgttggcctgtttggaggctttggcccgggcttttttctcgtccataccttccgccatcaggcgggcggtgtgggcgtcctccaggcttttgaccagttccagatacttggccgcgtccaggttcatggtctcgatgaacttggctttggcttcggggatggcctcgatctcgggcgggatgacatagcggaagtcctccaggcggacatagcgctggctctgcacgctgaagctggcaatgcggtgacgggtcacctgggccaggaaggtgcgggagacgccctcgatgccaaaggtgaagctggcgtgttcaatggggctggcgtggccgaagtccgagagtttctgcaaaaaggccgacgtcttttccggggtgagaccttccagcagagtatcgatgtgagcatcggaatagcaaagctttgcggccgccgccaccgtcttttccgggtcgttggtatgtgcgatcagactgacaagcatagtggttcctcttttttatctagctgctttttatgtagctgcgggaccgtggcctgcacggacgcccgcagaaggatgtcggttattcctcgatcttttgcaggggggcgtagtttgccatggtctttttgacgcccacgcggtcgaactggatctcgacgatgcagtcccccgccaccggcgtgaccttgagcaccttgcccctgccgaacaccttatgatccaccaggtcgccgggagcaaagcccgccgcctttttgggcttgggcaccgactgggcctgcatggaagccagggacgaagtccccgctcccgctgcccgggcaggtgcgccggagtggtggttggtgcggccgtagcctgccccgaaaccggaggacggaacgctgtggcggccgccctcaaagttggggctttcgtgaccgccgctgaccgagaagccgctcttgaagccgccgcgggaggcatagcctgcaccgaagccgccctgtgccgagcggttgtactcgctgttgaggtagccgcgggaggctcccgagtagccgctgcgcccaccgggaacgttgtagctgtagctgccgtagcccgcgccgaaaccaccgccgtagcccagttcggggctttcggtggcgtcgatcaggtcggggggcagctcatccaaaaagcaggaaggctggttgcgctgggtgcggccgaacatcatgcggctgcgtgccgacgagaggaacagctcctttttggcgcgggtaatgcccacgtagcacaggcggcgttcctcctccatgtcctcctcgttgtagcgggagagctcaccggggaagatgccatcctccatgcccacgataaagacataggggaactccaggcctttggccgagtgcagcgtcatcatgaccaccgagtcggcgttttcatcgtaggagtccaggtcgctgatgagggcgacttcctccaaaaagcccgagagggtggcatcctcgccgttctggtcggcgtaggtcttgatggaggacaccaactgtcccaagttttccagacgggtctggccctcgtcaccctgggccttgagcatggcctcgtagccggtcttggaaatgacctcgcccatgaaatcgtccagcggcatggtggtcgccttctggcagaggtcgcggtacatcatatagaaggtattcagcgcgcctgcggcacggcccagggccggatacagctcggtgtgggcaatgacctccatcatgggaacgccttttgccgcggccagctcggcgatcttttcaatggtggtgttgccgatcttgcgggagggttcattgatgatacggcgcaggcggacgtcatcccgggggttgacgatgaccgccagataggagttgatgtccttgacttccttgcggtcaaagaagcgctggccgcccacgatgcggtacggaatgcccgcacgggcaaaatacgtttccacggggttggactgggcgttcatgcggtaaagtaccgcgtgatcccgcagggaggcaccttcccggacatgctcgccgatgacctcggcgatatggctggcctcgtcctgttcgctggcggccgtgtaatggtggatcttggcgccgtcgccgttttcggtccagagggtcttgcccttacggccgttattgttcttgatgacgctgttggcggcattcaggatgttggcggtggagcggtagttctgctccaggcggatgaccttggccccggcaaagtgctgctcaaagctgaggatattctcgatggtggcgccgcggaagcggtagatggactggtcgtcgtcgccgacaacgcagacattgttataaccgccgcccagcaggcgcaccagatggaactgagccacgctggtatcctgatattcgtccaccagaacgtagcgaaatttctgctggtaatactggcgggcctcggcgtcggtcttgagcatctggaccgtgtgatagatcaggtcgtcaaagtccatggctccgttttcccgcaggcgcttggcgtaggcggtgtagagcttggacaccagcgccgccttggtgttggcggcgggctgggctgccacgtcggcgggagaaaggagcttgtccttgaatccgctgatctgggcaatggccgacttgaccggcaggaacttatcgtcgatcatcagttccttgtagatcagcttcatgacgcgctgctggtcgtcggagtcgtagatggtgaagctgcgggggaaaccgatgcgctcggcgtcccggcgcaggatgcgcacgcaggccgagtggaaggtggaggcgttgacgtcgccgcccaccgtctcgcccagcatggctttgagacgctctttcagctcccctgccgccttattggtaaaggtgatggccagcacgttccagggccgggcggggtgcacggccaggcggcgctcaatggtggagggcagttcactgcccgtctgcaccgccttttgcagggcttccatctcgctggaagcaaggccgccttccggcatattgcgggagccgtaggctgcaccgaaacggatgatgttggcaatgcggttgaccagcaccgtggtctttccgctgcctgcacccgctagaatgagcagagggccttccgtagagaaaaccgcctgctgctgcacgttgttcagccggggaaagcgcgccgcaatataccggtcgcgcagggcaaaataatcgttggtacgtgtatcggacatgtttgatttgttccgtcctctccgggttttgggtaatgcggcagacagccttgcaccgcccgccggtccggcagtcccggcgctcacaaaggcgtctgctgccaaaaatcgctattcagcttagtataacacaaaacgcgcccggcgaaaagtacgcgggcgcggtttacatttgtaatttttgtggggatcaaggaatcatccacgcggcgcagatgccagtctgcctatttctttcttgcggcatcccacagccggtgcagccccatccccgcaagcaggcctaaaagcgagatcatccccatccgcagcagcacaaaaaagcccaagggtgcaatgtttgtgatactcagtgcattggaaagggagatggtgattagaaaatgcattccatacagggcggacaaaagcaccggtgttccccaccgccgccggccgaacgcccggtaccagccgatcacagccgacgccgccagggtcgccaatggcagcaaaatcaggtgtgtcaggatgccgtaggccatgatccagcctccgccgtccatgcccagccagtaccatgcggtgcagaatatccagaccggcaggtaaattttgagccacagccagcgaccgcgggatttttccactgcggctgaccgggtagtgtcatcacgagttccgggcacggcagtcacctccctgcgttggggttgtgtaaggcggtatggtgcgggcggtctctcccctgttacaggatgggatgccagactttcggtgtggcgtcgcggaaccccgccgtcagctgggagcccatggacaggctggccgccgttcccctggccacacagttgaggggatcgggggcaatggccacattgacatgcaggataccggccagatagccgggcagtccccgcagcatggaacctccgccggtgagaagcacgccggtctgggagacatcggcggccagttcgggaggagtgctttccaacacgctgcgcgccgccgaagcaatgcgggctaccagttcccgcaccggttcgtacaggtcacgggtatagatgatctggcgggccggaaggttggtctgccaggaatggccccggacttccatgactccctcaaagtcgctgtcggagcagctggccacctgctttttcagctgttcggcggtggcggggccgatggcaaggccgtacttttcctgcacgcactgagcaatgcagttgtcaaaggcgttgcccgccaccggaacgctggcggcacggaccttgccccccatgctgataaccgcaatatcggtggagccgccgccgatgtcaatgaccatgcagccccggggctggcggatgtccagcccggcgcccagcgccgcagccaccggctcgtccaccaggtagacctggcgtgcacccgccgacatgaccgcttccactacggcgtcggcctcgacaccggtgatggccgccgggacacagaccgacacccggggacggcggatgcgggagcggcagacctcgttgataaagcgaacgatcagctcatgggtcatgcggtggtcctggatgacgccgtcccgcagcgggcggatcagctcaatataggagggcacccgtcccaccatacgcagggcctggtcgcccaccgccacaatggacccggtgcgggtatccaccgcgccgatgctgggctgggaaaagacaacgccctgtttttcggtggcaatgatgatggaggtcgtccccagatcaatgccgatgtcctgctgcttcatattggatctccttgttttttggtagtacacgggggcggtcttcctccacggcaaggctgacggcaaacacgtccgccgcaccgccctcgatcagcgcctgtgcgcaggcggacaccgtcgccccgctggtgatgatgtcatccaccagcagcacgcggcgtcccacgacggccggatagtcacacacggcatagccctttttctggttttgcagtctgcccgccaggtccaggcttttctggggctgcatccggcgcaccgggcgcagggcctgactgaccggaaggttcaggatcatgcccaggcggaaggcaatcgccctgggaagattcggtcccttttcttccccgagacgcggcggcaccggaacgatgcagtcaaagggctgcaacccggcaactccgtgatacaccggaagaaggcccatccgttcaggcgggtccgcagggaaaagccgcagcacggcaaggtcagtcagttcccgggcgtaccagagatgaccgtgtatcttgcagtgcagaatggcgcggcggatctcttcatcataatagtaggcgctggccgcaccggacagagcataaaagctgtgctcggtagccggcagccggggcggcgtatgccgcagcgccttttcctgtttggcacaggctgcgcaaagcaggccgtcgacggcatcgcggcccagaaccgtatcacacagcggacaccgccgtggaaaacataaaagcgtaacggtttcccatacgctgcgcagcaccgtgcggatcatcagccgttatgctccgggctgagaaaataccgcagcccgctgaaccgcaggttctggcggacattctccaccatggcgcgctcggtccgggcgctgcccaccagcacgcagagtttgcgtgcgcgggtaacgccggtatacaaaagattgcgatagcaaagccgcgccgggacgtcggccgccgggagcaccacggcgggaaattccgagccctgacttttgtggaccgtcaccgcgtaggctggttccagctcggaaagctggtcggccatataggtgtagcgtcggtcgtccatctgcaccgtgaccgtgcggttttcagtatccaccgccgtcacgatgcccatatctccattgtacgcaccgacgccggcctcggcaccgttgcgctcataggtgatgtcgtaatcgtttttgatctgcatgaccttgtccccaaggcgcagcacacgtccgccgtccgccgaaccgatctgcggtttgccgggtccgggcggattgagcaaagcctgcaggcggcggttgagttccacactgccggtggggccgaccttggtggggcacagcacctggatgtcccgcaccgggtcaaagccgtatgcctgaggcaggcgcgtggccaccaggtcgcacaccaggcgctggcaggcaaggcccaccgactcgatcatgaaaaagtcatcctcgcggccgcctttctggggcatatggccgttgacgatgcggtgagcgttgcgcacgataaggctctcccccgcctggcggaagatctcgttcaggcgcacggtgggcagcgtaccggcacgcaggatttcccccaggatattgccgggtcccacgctgggcagctggtcggcatcccctaccagcacgatccggcaggaggggcgcagcgcgaccagcagggcctgaaacaggcgcacgtccaccatgctgacctcatccagaatgacgacgtcacattttagcaggtttttggcgttatggataaaccgcagcgtcccggaggtgtagtctacctccagcaggcggtggatggtggacgccttatggccggtcagctcgctcagccgtttggcggcacggccggtaggagcgcacagtgccacccggtcataggatgcctcatacagcgaaagaattgcattgacggtggtggttttgcccgtgccggggccgcctgtcagcaccatgatgcgggaggacagggccatgcggatggcttctttctgcatgggcgcatactggacgccctgggcaaattccagcacgcggatgtcgctgtccagcgtcttgggcggctcggtgggatagcttgccagttcccgcagccgggcggcgatgtcctcctccgccgagagcaggtcgggcaggtaaatatactcggttccctcaaaggtacgggagcgcagttcctccgccgcaagcagagtttccagtccttcctccacccgggcaggttccaggcgcaggaatcttgcggtactgtccagcagtttggcgcggggcaggcaggtatgcccgttgcccgcgttgtggcgcatggcatacaaaagccccgcccccacccgcaggtggtcgtcaaggtcaaagctcaggcgggccgcaatggaatccacctggctgaatttcagattaagagggtccccacacaaaagataggggttatcctgaaggatggtcaccgcattggagccgaagctgcggtacagttccaccgcattctgggccgaaagcccaaaacctgccgcccaggccacgacctcccgcacgccgtacatccgcttgaattcccgggagatggcctctgccttttccggtgtgatgccccggatctcgcatagctgctggggactttccgcaatgacggtcagggtgtcgtccccgaattttgccacgatctttttggccgtggagggaccgatatagggcagcgcgccgctggaaagatagctcagcgtggcggccgtgtcctggggcagggatgcctcgcaggtatcggcgcggaactgttccccgtaggtgggatggttggtcatatggccgtacaccaccaccgacatgccgttgtccacgctgcccacattgcccgctaccacgatgtccacgccctgggcatccacttcaaagaccgcatagcccgtctcggggttttcataaatcatatgctccacaacgccctcgagcttttgcagctccatggcgttttgtttcccttctccggacatagcgcggacctcctttcccgggcgcagcgttcatacgtacactttcccaaaatacgttatacattataacgaatccgacaacgtttggcaaataccgacacgccggcccggtttgtgccgggccttgcaaaccggcacggtgcgtgatagcataaatatacagtttttatgaaaggagagcgcgttcgccgcgcagacagaacgatggagatccgcatttgcaaaaccgatgaacagcttgcccggctggcagacctggccagtgctatctggcatgaatattttgccgccctgctgtccgccgaacagatcgattacatggtgcagcaataccagagcctcgaggctctgacccgggcggtacggcaggaaggctacacctattttctcgggtacgagggcgaggagctggtgggttactgcggcgtcaaaccggacggtgaccggttgtttttgagcaagctctatctgcgcagcgacatgcggggcaagcatctatctaccctgctgctcaaccgtgcggtggagcttgccaaaaaagaaggcaaacgtgccatctacctgacctgcaacaaatacaatacccacagtcttgacgtttaccacgccaaaggcttccgggacattgatgcggtggtgacggacatcggccacggctttgtgatggacgactacattttgcagctggacctgtaagaactgcataaacaaacaaaacagcggcgcaccgggagaggctttctccggtacgccgctgtctttagattgggtattattccgcccggtttaggcgtgccggggcgggcagttccgatgcaatccgggcttttacatagtcggcacggggggcggctttttcagtccctcacagaccgcatggaatgggtttatcagcgataaatcacgcggccatccttgcggtcagcggcaggacgggtgccgtccggggcggcatagcccaggatgcagttgcccacgccgtagtaaatctccgggtcaaggccccactctttcagcagttccttgccgcgttcagagtcaaaggtctctttggcgcggtggatccagcaggaggccaggccgatgctctccgcagcaagcatcatattgccaagggcaaggctgccgttttccaaagaggtatgtacatcccgccgggccagcaccaccagcaccgtgggtgcgccgtagaagggatcgttgccggtgcccatgatctcggcattcattttggatagttcatcccgcagggccttgtcctgcacggccacgatgaccgggtcctgggaaccgcggccggatgccgcccaaagcccggcatcgatcacggtatccaggctgtcgcggtcgacctgacggtcctgataggcacggcagctgcggcgggaatggatggtcttgagcgtttcatttgtctgcataaaagcaacctcctttacgaatccatggttctgatgatattttgcttttctattattataacattattatagcacaatggtacaacagcaccgtttttcaggtgacggtcctcactgtgcgtgcgaaaagcacagatggaagttatatccaaaagttttcgatatttttttatcaaatttgccatttcatacattgcggttttgtagggattacggtatactatccatagtaccaaattaaattggagtacaaggaggttttttccgatgaaaaacatcgatctgaccaaatacggcatcaccggcaccaccgaggtcgtatacaatccttcctacgagactctgttcgaggaagagaccaagcccggcctggaaggctatgaaaagggccaggtcagcgagctcggcgctgtcaacgtcatgaccggtatctacaccggccgctcccccaaggataagttcatcgtcatggacgagaactccaaggacaccgtgtggtggacctccgagggctacaagaacgacaacaagcccgctaccaaggaagcttgggacgcctgcaagaagctggccatcaacgagctgtccaacaagcgcctgttcgtcgttgacgctttctgcggcgccaacaaggacacccgcatgggcatccgcttcatcatggaagtggcatggcaggcacacttcgtcaagaacatgttcatccagcccaccgctgaggaactggagaactttgagcctgacttcgttgtttacaacgcttccaaggccaaggtcgagaactacaaggaactgggcctgaactccgagactgccgttgtcttcaacatcaccagccgcgagcaggtcattctgaacacctggtacggcggtgagatgaagaagggtatgttctccatgatgaactactacctgccgctgaagggcattgcctccatgcactgctccgccaacaccgacatgaacggcgagaacaccgccatcttcttcggtctgtccggcaccggcaagaccaccctgtccaccgatccgaagcgtctgctcatcggcgatgacgagcacggctgggacgacaacggcgtcttcaacttcgagggcggctgctacgccaaggtcatcaacctggacaaggattccgagcccgacatctacaacgccatcaagcgcaacgccctgctggagaacgtcactctggacgagaacggcaagatcgactttgacgacaagagcgtgaccgagaacacccgtgtgtcctaccccatcgatcacatcgagaagatcgtccgccccgtctccgctgctcccgctgcgaagaacgtcatcttcctgtccgctgacgctttcggcgttctgcctccggtctccatcctgacccccgagcagaccgagtactacttcctgtccggcttcaccgccaagctggccggcaccgagcgcggcatcaccgagcccaccccgaccttctccgcctgcttcggccaggccttcctggaactgcatcccaccaagtacgctgaggaactggtcaagaagatgcagaagtccggcgccaaggcttacctggtcaacaccggctggaacggcaccggcaagcggatctccatcaaggatacccgcggcatcatcgacgccatcctggacggctccatcctgaaggctgataccaagaccatcccctacttcaacttcgaggttcccacctctctgcccggcgtcgatccgaagatcctcgatcctcgcgacacctacgccgacgcttccgagtgggatgccaaggccaaggatctggcttcccgtttccagaagaacttcgtcaagtacgagagcaacgaagccggcaaggctctggtttccgctggcccccagctgtaacaagctctgcgtgctgacgctgtcagccggataaacaatcgccccgccctgttgttttgacagggcggggctttttaatgttatacccgtcattgcggcccggcaatgcgcgtggtatactgaaaaagtgagaatgaaaatcggtcagcaaaacgtggagcaagaacaaggctgttttgatcggacggcacaagattcccgaacgccggtcccctttctttataaaagccttgccgttgcggatcttgccggatattgcggagtgcttttgatcgtagctgtgcggggaagaacctgtatgcccgcataaaaggaggagtttcatggattggtggaaactggatgcaccgtcacggcggcggtttgctctactgtcggcaggcggccttttgtatgtactgcccattttgctggccgaccgctactaccaggatgatctggcgcggtccctgtacggtgccaccggctgggcgggcgacggccgccccctgaccgaatggctgatggagctgctgtccggaggaagcaccaccattgtggacctttctcccctgcccatgctgctgggactggcggcgctggcttacgccatgacgctgtatgcccggcaggccttccccgctttgcaaaacagcacgttggcaacgttggctcttgggtttgttttggcacatccttttgccatggcgaacctgtcctacaaattcgactgtctgactatgctgctggctctggcactgtgctttttgctctatgccctgccccggagtctgggcggtcctcgacttgcgctggccggagcagttgccgccctgctggtcatggggctgtatcagcctgcgtcggggatgtttttggtgctggccgggatctggtttgtgttctggctggtagactggctgggcagcggcgatcctgtccgcagccgtctggctgatttctggccggagctgtggcggctgggcggactggccgcgggcgcgcttttctatctggtcgttatcgccccccagtttgtggacaaagaaggctggcggcaggaagcatcccagaccattggcggcgagaatcccgtcggcacgctggtgacaaacattctgagcgccgcctactatatccgggagcggatgcggatgctccccaccctgtaccgggtcgtccttgtgctggctgtggcgggagccttgctggccgcaatgtggcagttctggcggcacagttccgccaaaccggttcgcaaagtgctgggatgcatcgtgctggccatctcccctttggggctgttgtttgccagctacatgcccctggtcgttttgcagaacatggagtgctcggcccggatgtttctggcctacggcggaacgctgctgttcatcgggcttttgtggctgcgggcgctgcctcgccgccgggtggttgccggcatcctactgggagcctgcctgttctgccagacctgctatctgtacgcttacggcaccgctttgaaaacccagaaagaatatgagacttatctggtgacgcagatcgcccatgactgcgagaccatcaacggtgcaggcaactacaagcagctgagcttcgtgggctcggcgccccgtccccgggaagtgcagatgatctgcggacagtacccgtttttcagcgaactgatccagccctgcttcaccaacagcacctggctgggcggcgcctgggtataccggtatctccagtacgatctggagatcgtaggcctgactgacgaggacaatgccgcctgtacggacgagcatctgctgctgcaaaactcccgctatgcctgctacgaatccggcgagaaaatcctggttgccttccgctgagaggcaattccgattacggagatagcggaacatattttggtgcgcgctccttgttcttgcaggggttccgtgacaccgaaaccaccgaatattgcgccatggcaaaggcacttttcctctgccaaaaaagaaccgccccgggcctgtgatgccacaagtccgaggcggttcttttctatttatctggtgtggtctgccaggagtttcagttcctgcaaaaggcggtccctgtcattgggcagcgtgccgtccatcacatcttccagcagcgtatgaagggcctgcccgacgtccggcccggggcgaatcccggcagccagtgcatcgccaccgctcaccttgagcccctgcaatgtgtagcagcccgtccgggccagcgtgtgcatccgcttttcaaagcgttccacttcctgttcccgcgcttgcaccgcaggctttctggcgtgggctgcgaggtcggcctgcttgaccgcacaaaggcgctccagccaggtctcaccatgctttgccagcaggcgcaggatctcggggtcctcctggggcagcggaccgtcgtgcaccgccacaaggctgcacacctccagccgcaatgccgtaggcgcccgcaggctgcgcaaaattttatccgcaagctgtgcgccccgctggttatgtcccgggaaatgcgctgcgccgtccgggccgacggtacggcagagcggttttgccatgtcatgcaaaagcatggcccagcgcacgatccgggcgctttccggagagagcgttttccgaaccgcatccaccgcaccggcggtatgtcgccagacatcgtagcagtgccagcgtcccggctgggtacagccgatgcagggcgcgatctccgggatggctcctgccaaaattcccccgtactccgcaaggacacgcccggccgccggacctgccagcagacggtcgatttcggtaaaaatgcgctccggagatacgttctgtacgctgtcgcgcaggctggccgctgccctggctgtggcatcgtcaatggtaaagtccagctgcgaggcaaaccggactgcccgcagcacccgcaaagcatcctccgaaaagcggacggtggggtctcccacgcagcggatacaccgggcggcaagatcccgctgcccgccgaagcagtcaaccaagcccgcggcaggatgataggccatagcgttgacggtgaaatccctgcgggtcaggtcgccctccaccccctgcacgaactgcacggtcccaggatggcgatggtcggcataggcgccgtcctggcggtaggtggtgatctcataggttttgccgtcacagagcaccgctaccgtgccgtgtttcatgccggtaaggatctggcggaaatccgaaaagacctgccgcgtttgttccggagacgccgaagtacagatatcccagtctccgggcgtaactcccaacagactgtcccggacgcagccgcctaccacataggcggaaaatcccgccgcctccagccggtcaagaatccagaccacccgggacggcagcgcgatcgttggctgcggcatggtcattccccgaacttccactgttcgttcaggtctaccaggcaggcaacgcagtcgccttcctggcgcagggcctcgaccttctgggccgctgcctcggcgtcaggcatccaggtcacgaggaaaaagttttccgccggcacgccgtaatatacccagacgccgtccgcacggaccaggtcctccagatgatccagctgttccccgtccacaaggccctggccttcctcggcgtaaatcatctcgggctggatctggatggagttgatgacattgatgctgctggtgatgtaggtgtcgcggtccgtggactgctccccctcccgccaggcgcttgcaaaggctttgatgagcagctcccggacttccagcatagaatctcctgcagtatacataaaggttccccctcttatttattccgtttaccagtatagcacaaaaccgccgcaatgcacaccggtatgcctcctttgccgctccggcagaggattctgagcctttccggcaggattttttcattttttcccgttttgtattgaccttccaccgactggaacaggtataatgaggccaaaggaaagggaaaaatcctccgcagggcccgcgtcaggtactatttccggttttctttcagttggcgcaccgtctctttcagttcctcatactcctgctgcttgagccagacacggtaagctgagcagggagccagcacgaccaggcagccgatcatgacatagctgcagaccttgatcacctcggtatcgatgccgccgagcagggagacgcccatgactatgatcgccatggtccagactgtaagggcgatcacgctgccccagaaagcaattttcttcatccgtcattcctccccattttcgtatgcaatacctgttatccgaattatagcacatccatctcccgcgcgaaactcttttgcaggtggggcttcccccggaaaggagaatcctttatgaatatgaacatcaaacaggctgaaacactaagcggcgtatcccgcaggaacatccggttttatgaacaggccgggctgctctgccccgagcgcgacccggaaaacgattaccgcacctacaccgacgcagacattcgtaccttaaagctgatccgcaccctgcgcatgctggacatgccgctggaggatatccgttcggttttgcagggcggcctgacgctgcccgacgccgcatcccgccaggcaaaacggctgcaggagcaaagccgccggctggacgccgccatccggttctgcggcgatctgcagcagaaagccgctgacgccgccaccctggacgtggacgcctgtctggcccggatggaggacggtcccgaccggggctggttcaccggctggctgcaggattaccgcgccatggccaaagtggaacatttgcgcagctttacctttacgccggataccccggtgaccaatgcagcacagttttccgacgcgctgttcgcctatgcccgggagcatgacctggacctggtcatcacccgggagagcatgaacccccagttcaccatcggcggcatcgaataccgggccaaccggtactactatcctttccgaggcattcccacggcgcgcatccgctgctttgtatgcgacccggattttgccgaggccgacgttccccccgggcggctgcgcctgcaaaaagcgctgcattacctgaccccggtctttgtcatggccgccgtggcgctgttgttcttgctcccccgcggcctgctgactacctggtggggattgctgattctggttgtgctgctggccctgggcgtcagcggagcctggttcaacgcccacatcttttacaacgacaaggacaatcaatctcacgacagctgaagcaaacgcccccgcgcctaaaaacggcgcgggggcgtttatggtttggagaaaaagcagtcgcttaattgaacttgaagatcttctgcgcgatgcggtaaccgcccagacagatcttgcggcccaccgtaccgggcaggtcgcacaggcccgccagagaccggcggcagcgcttgtacaggcgctggtcacgatgacgcatatacgcccacagcatctttttcttttccagagcttcgacgctgccgtccatggtcaggaacaccatggagatggtcatcatcatgaacaggtagttgaacatataggcctgcagccgtttctgctccggcggcagggcgtagagatccaccgcatcgatcatgattttggtgacgcggacctgctggtccacacgcttgaccatgatcttctcgttgacgctctggtcctcgcggccgatgaaatagcggtaaagatccaggtccatataatacagcgtctgcacaaagggcagcggctggtacacgaagatattatccacgtagaaggtgtgcttgggcagctcgatgccgcagtcgcgcaggatctgggtgcggtagatcacgctgtgcatgagaatgttctggctcggggggaacttgccgcactcctgccaggtgaacacgcggtcctggggcatgatgcccttgtaggagatcacgtggcgggtgttgtcgctcacatgctcatagacgtagttacacagcagcaggtccaccggcttttccatggcggcaaactcccgcaggcaggccatggccttttgcagggcgtcggcgtccagccagtcgtccgagtcgacgaccttgaaatacatgccctgagcattgcggatgccctggttgacgccctcgccgtggccgccgttctcctgatggataacgcgcacaatgtcggggtattttgcggcgtactcgtccgcaatgcggccggtatcgtccttggagccgtcgtccaccagaatgatctcggcgtcctcacccgcgggcagcagcgtctcgatgcagcggtccatatactccgcggaattgtaacacggcacggtaaaggtgatcagtttcataaaaatattccatcctctttcttatttcgtcgttgcgtcagacctgctgctcggcacaccagtcggtccagttttccagggtggtatccgcgttgctgcggacctcctgccagtggggacgggtgtgttcatccagcacgccgatggtgtaaaatccggccgcccgggcagtctgcaccgccacgggagagtcctcaaacaccatgatctgccctggatcggcccccagcttttccgcagcccgaaggtaaacttccggctccgcttttccctggggcgtctcgcaggagagcgtgaaagcaaaccggtccagcacgccgaacttttcaagcgcggcgtcaacgaggggcttctcggtgccggaagccacacacagagtaacgccctttgcccgcatcaggtccagtgcttcccgcacgcccggcttgagggtcgccgtggtgccgtaagcatcgcgcgcccggtcacggatctgctgtgccagttcctgcggcgtgaccggcagatggcactgctccacaaagtaagcggcggcaccgtcaatggtcatcgtcatggtatcgtccccctgacgcggggtgtatacggcgttccactgggcaagcaggtcccgggcgacgtcatcccacattccggatgaatccagcagggtcccgtccatgtccaggatcgcatacggcaaaagctgcacggtaatttcctcctatcctgcggctgtcaggtcatactgttaaaagcatacctgttttttgccaaaaatacaagaggacgaagggattttaccgtgagggtcctgctttttcacgtattccctttttgctccgcgcccgggcggaaaaatagggttaccgcccaccggcgaaaccccagatccatgaacgggcaaagccggcaaaacggtattttattgttttgccgatagaagccaagaggatataggaaaaagattcaggcgcagagttcgcgccaggcctcctccatggtatctgccgagaacagaaactccccggatgcatcgtatacttcaatgtgtccgccgacattaagaaactgattcgtcatggatttgaccacctttctttcctttgattgcagtataccagaaagaaagggtcataaagcggacttttgcgttttgccgctcaatcaggagtcccgttacaaggacttttcagccgcattttcagccttgcgggccagcgcacggcacgcatggagatcagaagccacaggcacaaaatgtaccagagcatcgtatatttcgggcagacatagccaaacaggttcccccactcggcactgtaatcccacacgcggaccttgagcagctgcgtgcacagtgcaccgccgaacagttccagcgcactgatgccggctgctccgatggcggcccccagcaagaccggaagtcccggttctgctcccagccaggccaggcagcaaaagctgatgcccccggcaaaaaacatggtccagtgggtcacgccccgccaggccacttcggcggcaaggtaggcagcaccacccataacaaacaaagagatcttttcaaaccaccgcattgcagattctcccgaaaagcagaattcggcctttgctgcacagccctatacaaagaaaccctgccgcgtgcgctgcggctttgttttgtatcggaactgtgcgaggccgtctgctttattgtgtgccgtccgcacccaaagtaaccaaatcgtaattcatttggttattttttcccgatacataaaaaggggccgccggggacccgaatggtcccggcagcccggtgtgaatttgattttatttggacagccgcttgagcagttcgctgcgggtatcccacagtttctggctgaggtccacatagtaacggtgggggttttcaaagcgcttgacttcgtcccacagggtgttgacctgggccttgcagaatttgcggatgtcatccagatccggcgaggtgtagacccgtttaccgttctggtagatgggcgtggacaggcagcgggccgtgcagttgacgtaagtgcgttccttccaggtctccaccgggtcgaacagcgtgatgccgtttttggtctccactatctcgtccgccatggtgatgaggtcagccatggccttgccgtcctcatcgtaaatacgccatacctttttcaggcagggaatggtcattttctccgccgtctcggacagcttcattttcggcacatactcgccggtgcgctcgtccttgactgcggccagcttatacacaccgccaaacacagggtcgctcttggcggtgatcatgttctcgccaataccgaagctgtccacccgcgcgccctgcaaaatcaggtcgcggaccaggtattcatccaggctgttggaggcgcagatggtgcagtcgggataaccggcagcgtccagcattttgcgggctttcttggacaggtaggcgatatcgcccgaatcgatacggatacccttggggcgcttgcccatgggtttgaggacctcgtcaaacacgcggatggcatcggggacaccgtggcgcagcacattgtaggtatccaccagcaacacgcaggcgtcggggtacatctcggcgtattttttgaaggcctcatactcattggggaacatctggacccagctgtgggccatggtgccggaggcagggataccaaagtcccgggcggccataacgcaggaagtagacccgcagccgccgatgtaagccgcacgggcgccgaagtaggcggcatcatagccctgtgcacggcgggcgccgaactccatgacgggacggccctccgccgcacggcagatgcggtttgccttggtggcaataaggcactgatggttgaacgtcaccagcagcagcgtctccagcagctgacactcgatggcaggaccttccaccgtgacgatgggttcatgggggaagatgggaacgccttcctcaatggcccagatattgcagtgcagttcaaagtttgccagataattgaggaactgctcgttgaacacgccggtggagcgcagataggcaatgtcctcctccgtaaaggaaaggtggtccactgcatccatgaactgctgcaagcccgccatgatggcatagccgcccccgttggggacgcggcggaaaaacatatcgaacactgcgatcttgtcctgatagccctcgtccagatagcctgccgacatggtcagctcatagaaatccgtcatggtggtcaggttgcgtttgacatccagcataatgatcagctcccagttttttgatccgcggcacaccgccgcagacaggaaacacacggccctgtcagtccggaacctatccgtcctgccgtccggccgatacgacttggtaatggcagtgccgtcacttacggcgcttggggccgcggttaccctcgatcaggatggcgcagacccagacaaaagcatacaccgccacaacgatcagggtcagaatgacgaccaccttgaaataggttccggagaaaaattctccgaccttagtcagcgtatacaaaacctgattgcgcgacaccgtactacccgcaatgagatcgacggtacccagcttttccccgttgatggacagggtcaccgttcctaccacgtccccctgttctatgggtgcggtgaggtattccggcagagagaaggtctgctccgtcaatgccgcgccgccgtccgagggcagcagggtcatcatgtcatccgccgggtagagcatgacggtatccgtctcggtggaataacggatggggcgctcggtgatgggacgggtggtgtccagggcagactggatggtaaaggtatcgaatacccagtccatcaggctgcccgtctcggtcagtgccgggcgggggtccaccgattcatcggcggcgctgtgcagcacaacgctgatgtaggtctcgccgttctgggtatgccagccggcaaagttctgccagcctgcattcaggctgccggtcttgccgccctggttataggaacggtaataggtcgttccctgggtcagcattttattggtggagagaataatataaggttcggtatgctgggtattggcaggcatccagtagcttgccgtgcctgcggcttccacaaaagcgtcgtactggatcagtgcccgcaaaatcaggtaggcgtcccgggccgtggtgatgttgcctgcgtccagaccgcagggatcggtaaacaccgtgccggtgcaccccagagcttttgcttcctcattcatcatggcaacgaagttttctaccgttccgcccatataaaaggccacgatgtaggcagcctcgttgccggagggcagttccatgccatacaaaaggttgcgcagagtgaccgactctcccggccggatatccgccagcgaagcgccggtaccatacaaaatgtcgtcaatggtgcggggcatttccaccgtgatggtgtccagctgatcctgataggttttgagcatgagcagcatggtcatcatcttggtcaaactggcggccgtcagctgagtatcgctgtttttctgatagaccacaatgttggtgtccaggttgacaatgtaggcagcctctgcggtgggctcaaagtccggtgtatacccctgcatggccgaggcaggcaacgccagagtgactgcgatcacaagcacggcaaggatgccggcaaaacgttttttcataagcaggcttgttcctttttgcgtttggcggtcatcttgccgccgggataaacgatatgaacagtataccaaaaattccccgccgagaaaagggcgaatgtggcaccgggaggcccgggttcagttcatggctccggccgaggagaacagccgttccacctcgtctgcaaggagatggtgttccggtgcggcaaggttggggtccgcggccagcagcgccttggcttcctcctgcgccacatgcagggtacgggtgtcctgcaccaggtccgccacatgcagggtgggcaggccgtgctgggcttccccgaagaaatcaccgggaccgcgggtctccaggtcatacttggcgatctcaaacccattttgggtgtggcataggaagctgaggcgttcccgcaccgtcttgccttcattgtccgaaatgaggatgcagcaggagtctgcgcttccccgccctacccggccgcgcagctggtgcagggcggacaagccgaaacgctcggcgttttcaattaccatgaccgtggcattgggaacatccacgccgacctcaatgacagtggtggaaaccagcacgtccaactccccggatttgaaggccgacatgacggcgtccttctccttggatttaagtttgccgtggagaagtcccaccctgcgtccgggcagcagcgggcaggcggtctgttcataataggtggtgactgcctggatcccggcatccatttcattctgctcgatggccgggcagacgatataaacctgatgccctgcggcgatctgcttttccagaaagccgtacatatcccggcgcttacggccggtgatgaaccaggtcttgatgggcttgcggccgggagggagttcatccagaatggagatatccaggtcgccgtacagaagcaatcccaaagtgcgcgggatgggggttgcactcatgaccagcaggtgcgggcttttggccttgcctgccagcaatccccgctgacgcacaccaaagcgatgctgctcgtccacaatggccagtcccagatttttgaactgcactgagtcggtgagcactgcatgggtccccactaccagtccggcacggccgtccgcaatggcagaaagggctacccggcgctcggcggctttcatgccgcccaccagcagcgtgacattgacgccaaagggttccaggcggtcggccagagtggcggcatgctggcgggccagcagttcggtgggggcaagcatggcgctctgccagccgttttgagctgcgtgccagatggctgccgccgccaccagtgtcttgccgctgccaacgtcgccctgaagcaggcggttcatggggacctgcccgcaaaggtcggcgcagatctcgttgctggcgcggcgctgggctccggtaggagcatacggcaggctgcgccagaagggctccaggtccaccgggtgcatgggggcgccggtcttttcccggccatgcccccgcatgagaaaaatccccagttggaggatatacagttcttcaaaaatcaggcggcgtcgggcggcgtcggcttccttctcggaatggggggcatggatgccccgcaccgccacggcccgggagggcatacggtaacgggtcagcagcaccggaggcagcgggtcctccaggtcatccgcagcgctgagggcggcctccacgcagcgggcaatgcgtccgctgggcagaccctcggtgctgggatagaccgggaccagaggaccggcttctacctgcgcctgggtgcggacattgggatgcagcatttcccggtgggtcagcgtaccgcccacacggccctcaaagtaatagctctgcccgatcaccaggttttcggcggcataggcagcgttgaaccaggacagggtcagcgtgccgctgtcgtccgccgccagcacccggtagagcgtgcgcccgccacggatgcgccgggcaggttccttttgcagtacctccgcccggacgcagcagtccacgtcatagggggcctcggctaccgtgtagggccgggtgtaatcgatatagcgccgggggtaatggagaagcaggtcccgcaccgtgcggatgcctagcttttcaaactttttggcaaaagcgggaccaacccctttcaagtattggatgctgccgtccagcgcaggcatggcgggacctcctttctgttggaatagtccggtgccggggaaatgtaagcggcactcccctgccccggattgagaaaaaaggacgaaccgggatgccgtatcaaagcggctctccaaacagattcgtcctttttgtgttcatgcggaaatgattactccaccgagatcatatagtagtagaccggctggccgccgctgatgtggctgacctcaatgttgccgccgcacttggagcgcaccagatcggtggtcttttcagcatcggcgtcgctgatctcgcagccggaaatgaccgtgatgaactgggtgtccttcttcttcatggagcgggccagacgataggtcatcttggtgatgtcattgccggtggccacgatcttgccgttttccagggccatgatctcgcccttcttgatggtcttgccgtcgaactcgctgtcacgggcagcgtaggtgatcagaccggtggctacatggtccgcggcagccatcatgttgatggcgttctcgtccgcggaggtaccgggatcaaagttcagcatggcagtcatgccctggggcacggtgcgggtgggcaggacgatgaccttacggtcggccagtttctgggcctgctccgcagccatgatgatgttcttattgttgggcagcacaaagaccgtcttggcgggaacgctctggatggcagccagaatgtcctcggtggccgggttcatggtctggccaccggaaaccacggcctcgacgcccaggtcggtaaagacgctcttgaggccctcaccggcagcgacggccacaaagccgtactcctggtcgggatcgaccgcggcgtagacaaactcgtcggcgctgcctgcggcggcacgctcctcggcctccgcctgcttctccaggctcttgccctgcttctggcgggccaggaactgctcgtgcatgttctcgatcttaaagtcggtcaggtagccgtacttgatggcctcgctcagcatcatgccgggatcggaggtatggacatggcagttggccacatcgtcgtcctcgatgacaacgacggagtcaccgttggactccaggaacgcgcgcaggcgggtgacgctggcgccctcgtccttgtgcagcaggaactgggtgcagtaaccgtttttgatgtcctcgaccttcatcaggtcgtcggcaaagacgcccttgccggcagcattgctggaaaccttgggcttggctgcgacttcaacgctctggatgacctcgccgccgtcaaagacctgcttcatgccttcaaacaccagcatgatgccctggccgccggcgtccacgacaccggccttcttgaggacgggcagcaggttgggggtatcgtccagcgctttctggccggcagcgatgacctcatcccacagggcgggaacttcggtctgggtgcttgcagcggcagcttcggcagccaggcgggtaacggtcaggatggtgccctcggtaggcttcatgacggccttgtaagcggcatccacgcccatctgcagagcgctggccacatcggacgcatcggcgttggtcttgtctttcagcgccttggaaaagccgcggaacagcaggctggtgataacaccggagttgccgcgggcgccgcgcagcatggcggatgccgcgcacttgctggcctcggccacagtgcagtcatcgggcaggttctccagctcacggcaggcggcgccgatggtcatgctcatattggtgccggtatcgccgtcaggtacggggaaaacgttcagttcgtccacgcgggtgcgctggttggaaatgttgttggcgccggaaatcattgcgtcacgcagggtcttgccagtaatcatgtaataaacacctcgttgtttgacttttacgatcagatgcgcacaagcggtcagccggagacgatgtcatccacatagacatccacgcgggcaaccttcagcccggtggcatgctcgacttcatcgcgcacacggtgcgtaatgctttgggtaatggaggcaatgttcaggccatacccgaccgtgatatgcagcgcgatgcaaagagcgccgttttcctcctccaccgtgacaccctgctgtggcaggctgccgtgacgcaatgccgaacgcactgtgccggacgcggtgttctggcccatggcggcaataccgtaacaattttttgcggcctgcgcgaccagacccgagaaatattcgttggtcagtgaaatgctcccataggggttgaccttggtgatcatcgccgatcctccttactatatgcaatccacgcaaaggcccactacgggacatttgcctgtataatcaggtttattatacaccatcctgtgtcatttgaacagtagtatttttgcagtttcgtaccatttacccgcagaaattgtctcccctttttcgtcaggttttgcaggggcagattttacaatccattcacaaagttcccacggcaggcgcgtatacttaaattgaacggatcggaaggcaagcacgatccacccacccggggctatgtccggcatgtgtctgacgcctaccccagcgtaatgcacatgccggacttccgccgccggcatcggcatttcagccgggcgcccgcttaaaagtatcggtatgccgttctttattgagatgttatccggcgcattgacggcgcggagctgtcgcaaagatatggccccgggcgggaattgcttcgtcacacagcacttttttccaaacaacgaacaaaggagacaactgcattatgaacctgctgttcttcctcacccccaagcaggacgtactcttcgtttacgaggactttaccctccgtcaggcgctggaaaaatggtccaaccagcggttcgccaccatcccggtgctgcgccgcaacggacagtatatcggaaccatcagcgagggcgatcttttgtggggaatcaagaacattcacggtctggatctggacgccagtgaagatatccccatctccagtttcccccgccgccgcaattacaaggcggtccccgtgaccaccgacatgcggaccctggtggaagctaccgtggatcagaacttcgttcccgtcgtggatgaccgaaatgtttttatcggtatcgttccccgtaccgccatcatcaaatacatgctgcggcggatggatacctcttccgaaacgacacagatttccacccgcgccatcaagaagaaacttatgcagacacattcctgacttctgccgttaaaaaccccgctccggctgccgtttggccggggcggggctgcttttttatataacgtgattggagcatgaggatgattttttcgttaggcaaggttagcacctcgtcccggggtgtctccactcccggctatgcaaaacatccggcaaatcatgcagcattgtgtgggctgcaaagaaggtcggaaagctccctgctcctatcagaaaaactgcataaaatacaaaaagcccgctgcggggcgaaaatcctcgcagcgggctttgcagtgcaatatcgaagttgaaattacttcagctcgaccttggcgccgacttcttccagcttcttctggatgtcctcagcgtcagccttggaagcgttctccttcagcttggcgttcggggtctcaaccagcttcttagcctccatcagggaagcgccggtcagctccttaacggtcttgatgacctgcatcttgttggcgccgacatcagccaggatgacgtcgaactcggtcttctcctcctcagcgggagcagcagcagcgccggcagcggcgggagcagcagcggcaacagcggaaacgccgaactcctcgcagatggtgtcaacgagctctttcagctcaagaacagtcatagtcttgacagactcgacaatggcagtgatcttctcagaagccatgatagttacctccataagttttttatttcgatcattttagatcaaatttgtggggtcgccggccgttatgcagccggcattacgcagctgttacgcagcgggagtctcctcctgcttgtcggcaacagcttgcagggcaacagccagaccgccgatgatcccggacagggaaccggccagcatggacagcagaccttcgcggttgggcatggtggacaggctgcgaacacctgcggcgtccatgacctgaccatcgcagaaaccgcccttgacggtgaaacgcttgctcttgtcagcgtcggcgaacttgcacaggatacgagccgcggcggcgggatcctccggagagatcgcgatagcggtgtcacccttgaagcactcggacagagcctcgtactgggtgcccttgacggcgagacggagcatggtgttcttgacgacggtgtactcgacaccggcctcacgcagttccttacgcagtttggtatcgtcagcaacgctgatgccgttgtaggaaacgacaacgccggccatcgcgctggacagcttctcgttgagctccttgacataagcctgcttggcagccaaaatcttcttgctgggcatttttcattcacctcatttcatttgtgggatcaaaaaagcctcttgcccggacatgccgggaaagaggctgaaaatcgcatgaaagcaaacgccacgtttctcggcaggcagggcgaaaccctttatgctgaaatcagcacctgctgtcttaaaaacagcttaattataataccgcacaaacgcgggtttgtcaagcattttttaatcagacaccgtatttcagggtgttgacgcgaacgccggggcccatagtggtagccacggtagcgctcttgaagtactggcccttggcagccgcgggcttagccttggcaatagcctccagaacggtatccaggttggtcatcagcttgtcggcgccgaaagaagccttgccgatgggcacatggatgatgttctgcttgtcgagacggtactcgatcttaccggccttagcctcggtgacggcacggccgacatcgggggtaacggtaccggccttggggttgggcatcaggccacggggtccgaggatcttacccagacggccaacacgacccatcatgtccggggtggtgaccaggacgtcgaagtccaggtagccgccctggatcttggcgatcagatcgtcgtcgccaacttcctgagcgccggcagcctcagcagccttggcagcgtcgcctttgcagatggcaacaacgcggacgttcttgccggtgccgttgggcaggacaacagcgccgcggacctgctggtcagcatggcggctgtcaacgcccaggcggacgtgcagctcaacggtctcgtcgaacttggctttcgcggtctggcagcagagggacagcgcctcctgcgggtcgtaaactttggtacggtcgatcagcttggcgctttcggcatatttcttaccgtgattcattactcattcctcctgtgtggtggttatcggatcaattcctcccacgtatttgcgcgcagtcatgcagggcttattcctcgacggtaacgcccatgctgcggcaggtgcccttgatcatgctgacggcgctttccaggctggaagcgttcaggtcgggcatcttctgcttggcgatctcctcggcctgagccagggtgatggagccgaccttgttcttgttcggcgcgccggaagcagtctcgatgccggcggccttcttgatcaggaccggggccggcggagtcttggtgatgaagctgaaggagcggtcagcgtaaacggtgatgacgacggggatgatgtagcccatctgattcttggtacgctcgttgaactccttggtgaacgccatgatgttgacgcccttctggcccagagcggggccgacgggcggtgccggagtcgccttgccggcagggatctgcagcttaatgtagccagtgattttctgtgccatactatttgcacctccaaaatttgtggtgagttgcggtccgcggcgcggacctcccacgagtacgcgcaggcgcgcactctataaaaaccgcgtgcggtctttaccggaaaacgtatctgccgccaccctggcggcggggatcagccttgcacgagaatgtgcaggtcacagcagcttgacctgggaaagctccagttctgccggagtttcgcggccaaacatcgagatcttgacgcggaccttgcgggcgctggtgtcgattgcttcgaccacgccgacagatcccgccattgggccgccggtcagttccaccgtgtcgccgacctcgtagtcgacgcgcggaccggaaacgatctcgacacccagctttgcgacctcttcatcggtcaggggctccggcttggaagccgggccgacaaaaccggtgcagccgcgcgtattgcgcacgatgtaccaggtattgtcattcatgaccattttgacaaagacataacccggatagatcttgcgctggacttctttttcgccgattttattctcgttcttgtccagcttgtcctcgatcacggtctcagtcgggaccttgacgtcgcagatcagatcctgcagacggcggttttccaccatcgtcatcaggtcttgggccaccttgttttcgtagccggaataggtatgcacaacataccagtaagcctgttcagccatgaatcatgcctccaagtcgtcagacgccgatcatcagctggatgacgccgccgaaaatcaggtccagcagaaccagcaccaccgcggcgatcagcacgacgaccaaaacggtgatggtgttggtgcgaacctgctttttgctgggccaaacgacctttttcagctcgctcttggtgtccttgaagtacttaccgatgcggctgaaaaagttcttgaccttggtgaagaaggaagtcttctttttcccgtcggtctttttgtcagccttcttgtcggcctgttcggccttggcggctgcccctgttgcagctttcttatcagccattttcaagctccgcctttccttacttcgtctcgcgatggacggtatgcttcttgcagaaacggcaatacttcttcatctcgatacggtcagggttgttcttcttgttcttggtcttgttatagttgcgctgtttgcattccgtgcaggcaagagtgattttgacagtcatgtttcggcacctccaattaacggtttataaagcctccctcgtgcttgcggtcgcacccaaaaaagggcacaaaaaaatagccccgcaaaagaggtagtatcataataccatagttatcccctgtcgtcaagagggttcgccaacgatatttatgatattctttgcattcgagcgctttatatggtacacaaaaagcccgccgcctgtcaagtcctagacctgacgggacggcgggcgggtttcataacggaaaatcagggctgcggctggagcgggacatcaatttcctgcgccagggtaaagctgtaaatggtcagtttggtcaccggcaccttcaggcgcagagcaaaggcgcggcggtaaagccgcagctgctccccgtaggaatccaggtaatactggggatcggactggcggtctgtcttatagtccaggatctcggcatgatcgtcaaacaccagcaccaggtcggcgatgccctgtaccagcacctgcgccgtgtccggagcgccgggggtgatctcccctgccggcaatgccgtgatgaacggttcctcccgcaggatctgttttgcggtgcgcacccggcgccaggccgggctttcaaagaaagtgcgcaccgtatccaaatcaagcaccttggccaaagcagggtccagcagctgcaggtcggtctggcggcggacttcggcgtccaggtcggacaagtcccggtcaaagggcacgctctgcatgaacgcatggatggcggtgccgcgctcagcacccgtcatgccgcttttctgcataaaagccgggcgctgcaagaccgtctcccctgccgcgtgggtcaccgcgctgacgctgaccttgaccggcacctgccgcagggcctcgtcggggctgcgccaggcaaatccccggatcaggtcgtcccggagctgttcatccggccccggcatttcctcgggggcgggttccgggacaggctcggggggctgttccaggcggatggtcaagggaacggcagacgcatcctgggcaggcagcagatcggtacgtgcccagaggacatcgctgtctggatggcgcagcgccgccgtcaaaagccaccccgaccaggcctggaagtcgcagagggcttccggcgtgagcatccccgccgccgcatacagcgccggagtcttgagttcgctgtcggtggatttgagcggcaccgtaatgaacagcgcatcctgggcgcgggtgagagccacatacaaaatgcgcatttcctcgctgagggattcctccttgacctgctgcaccaaagcggcatgggccaacgtcttgtaccgctttacctgattgcctgcccgcagggtcagaccgacacccagttcccggtggaacagcaccgggcgcatgatgtcggaattattgaatttgtgggaggtgttcgccacaaaaacgatgggaaattccagtcccttggagcggtgcaccgtcatgatggaaacgcagccgggacgggactgtcctgccccggactgggtcaggccgccgttctgacgtgcggcacgcatggcccggacaagggcggcaagccctgccctgcccgcgcccgaggcccagcctgcaaaagcgcgcaggtcatcccggcagcgcgcaccgtcgggcatggctcccgcggcggcaaggtaaccggtgcgggcaaacagttcctcgatgagggcgtccacaggcagggtccgcgccaggcggcggaacactgccagctgttcggcaaaggcgcggaacttttcttccttgcttgtcagcacggcgccgtacaggctgccgccgggcagttcctgacgcaggtggaccaggtcgtcgggagtaaagggaaagatggggctgagcagcaccgccgaaagggccacatcctgggccgggttgtcgatgacttccaaaagtgccgcaaagggacgcacatggggcgcatccagcagatcggcagcggtatccgcaaagacggggatgccctgcgcccgcaaggcggcctcataaaccgggaagtccccgcggccgcggagcaggatacaaaaatcgccgtagtcacaggggcgggtggcatcgccgtcacgcaccgggaaggcatcctcttttaattggcggatgcgcccggccacagcgcgggcatcggcggcagcgtcggcgccgtccaccacggtaagttcgcagtaccctttatattcggtatcgcggcccaccacaaggcgctggccgtcgccgtaatccacaccgccaagcccggccgagaaaatgtgttcaaagaaatagttgacgccggcgatcacgcccggcgcactgcggaagttggcgtccagggcgatggtcgccgggccggaagtcaccggccaggcaggccaggctctctgcttttcaatgaataccgagggctccgcctggcggaagcggtagatgctctgcttgatgtcgcccacgaagaacaggttggaggcatcaggttttgccagagcatagtagatggcgtcctgcagggcgttggtgtcctggtactcatccaccagcacataagaatactgggccgagacggtggcacacagaggcgtgcggctgccgtcgggggttttgagcagatcgagagtcagatgctcatagtcggcgtagtcgagaagtttctccgccactttggcgtcaaaataggccgcggagaaccgggacaccgcccggcccagagcagccaccagcggtgcggcggctgcacggtcggaggcaaactccgccccggtacagagcagcaggtcggtgcgcagctggtcgatgcgctttttggcgcgggtgcgcagctccgccgccgcgctggcgtagggattggcgtcccggccgcccttgacccgtccagcggcgggccacttgcccatgtccgccgccgcacccacggcagcctcccagtcgccgctgcggagtttgtcctccagcagggcaaggcgggtgtcgtcgtcctccagtaccacggtgaaggcctgggcagcggcatcgtccaacgcagcccggctgcgggcggcggaaatcaggcagcgagcgcttgccacccgggccagcgccgccgagagcagcgtcttgccccatgccgtttcctgaggcggggcgtcggtctgccacatggcgacgaagttttccagcgcctgctgggggtagggcaatgtacggataaaatcgtggagggcaagcaccgtccggcccgccgtgtcgtcggtgcggccccggtcatacatgtcggcaaaggctcggaagtcgggatccttgtaggcttcctccagcgtgtcggccaggacctcctgccggatgcggaagaggtcggcatcgtcggcggtggtgaaatcgggcgggatgtccagcgaggaaaaatgctgctgtacaaaccgcaggcagaaagcatccaccgtgccgatggacgcccgctgcagccgcatctgctggcggcgcaggcgcaggtcctcgggatgggcgcggacctccttgcccaggcgctcggtgatgtcggcgcgcagcttggccgccgccgcattggtgaaggtcataatgaggaggctgtcggcttccacgggggtgtcggggtcggtgatcaggccgaccacccgctccaccagcacgcgggtcttgccggaaccagccgccgcactgaccagcaggctgccgccccgggccgagatggccgcctgctgggcaggggtaaactggatctttttcggtacggcatcagccatgctttgcgcctcctttcttttgtctggtttttactttcccggtttcgtcggggcgctgcacttcaaaggggtcgctgtcgatcagggcggcgcgctccccttctccgtcggcgtgacggcagacggcgcggtaatcacaccagacgcagggggttgcgctgccggggcagagaggttcggcggcgatcttgcccgcatagaggttatctgccatgcgcagcagcaggtcatccagatggtcccggatacggcccagcttttcggcatcggccagacgggcgcgggaggccgccgagaccttgccgctgctggccagataggtcagcggcgagtaggaaccggtgcccttggtatccatggcacggtagacgctctcctcgtcgagaaggagaccctccatggggtagtcctgaggggcgtcctcgccgtccgggcggggctgggtcttgggcggagggtcggccatgaggtactccacccccgcggcacgcagttcgccctctttgcgtccgcccagctgctcggccagggcggagccgttgcgctccagcgtaaacaggtacatgagcatctggcagtccagaccgtaatagacctctcgcaggtcaaactttttggtgccggtcttgtagtccactacccggagataggtcgtctcccccagggtcatggcatccacacggtcgacggtccccaccacccgcaccgtgtggcccttttcatccgacagttccaccggcggcacgcttggtgcgtcggggtcgtccgggtcggggcggtcatcgatgcgcagctcaaaggccaccgggtgaaatcccgactggcgcatatcccgctgcataaaagccagcaggtttttgaggttgcgggcgatgcgttcgatgagatattgcatccgcacccctgcgccggggaggttggcgtcggcgtattccttgaccaacgcgtccaccagttccccgatgcccgcctcgtccagttcgagaaacgccttgccggtacggcgcagggcgttttccagcacccagtgagtcagggtgccgctgatattgggggccagctccgctttctggcggggtttggcccgcaaaacgtattccatgaaatagccgaaggggcagaccgcataccgctcaaaccgggtggggctgacgcggatgcttcggccgagaagctgttccagcgcctcggtgtcctccactttggcaggatcgcggcgggcggcacgttccacggcagcaaaaccgggcgcagcagccggggtgttttccactgcctgcagcgccgcgtagacggcggcccgccggggcgtctgctgctgccacaatccgcccagcaggtcaagggccgcggcgggggtggccgccaggtcacgagggtcaggctccgcgggcggcacctgcatcagttccagcaccggggccagggccgccgagaccggcagacccgccgcgccgccgggccaggacagccagacaaaccgccgggcagcggtcagagccttataaaagcagacctgctcccggatgacgcggttttcaaaacagtcgggcagctcggccccctgggcgatcatggcgtcacggtcggcatgggtcaaaaggccggtatcccccggcgtctgagggaactcgccctcggccaggccaaggatgaagcaggcgtcggtctcgggcaggcgcatacggcccgccgtggtgaagatgacgctatccatgctctgggggatatgccccatgtcggtggtgcgcaaaagcagggtgaacagttcgtcgtaggcagcgggggtcagtacttccccatcgccgcccagcagacggaccatctggtccagcagccccataaccacgttccactcccgcagggcttcgtcagcagcgggaagttctcccccgtcccgcagggtcttggcaagagcttccagggcatcctccgccccgagagcttgcaggaacccgtagatatgtcgggtcagggccgtcacgtcggcccctctggccccattgacaaagcgggtgatgcggctgacgaggaaatcccgggcctgctcggccagagccaggtcctggcgctcctgctcccccatacggtcagtgtagcccgccgggttgcgggtgaaaggcgcgcgccagtcggcggcggagagcgtccaggtataggcgtagttttccagggcgcactgggcctcctgagaaagagaggtcagccccgttttgagcaggcgcagcaccgccgtggtggaaaggccgccccgcaaaagatccagcgccgcgtggagcgcccgggcaggggcggtgttttccggcgtggtgggttcgtcacagaagagtgggatatccgccagcctgaactcataccgcaaagcgggcaggtagtcgggggcgttgcggcaaatgaccgccatgcgccggtacggcacgccctgtctggcgcagcggcggacggcggcggccaccgccttggcttcctcctggcggctgtcggcggcaaaataagtaagttcgggctttgtagggtcgacggcacactggggcgtgtaggtggggtcggccaaaagcagggagagttccgccagggccggggcatcgacgtggcggggatcgtcggtcagtgtctcggtatggcagggcacggcggcgcgctcagccatctggcgtagctgggcagccacccgtttggcgcccgaaaaaacgcccattcccccggtggtatcctgaatgccgtcacagcacagggcgacagtcacgtcggccacggggagcatggcctccagcatggaccgcttggaggcgttgaaggtatcaaattcatcaatgtacacactgcgcccggcaaaaaattccggttccagctttttggcagccagctccacccggtcgccggggtccatgcccgtcccggccagaagtccctcgtaggcgccgtagatcaatgccagttcccccagcttgtcacggtcagcgcccggcgcgcgggcatagtttgccagcatttcgggcgtgacccccgcgcttttcagctcactgatggtctgggccgctttctcgcagaaagctgcgctctggcgctggcggctgtaatacaccaccttgtccagcagcgagtccagcgcacggcgtaccagcaccgcccgtccggcctcgtccagcgtggggaccgccgcgccgccgtagcggcggagcagcgtctcggccagggaggtaaaggaatagctctccacataaccggagagggtatcccccagcaggcggtagagtgcgccctcggtggaggaggtgaactgctcgggtacgatgaggatgctgcggcggccagcctgggcctcggctctcagcgtctgcatcagtcgggtggacttgccgctgccggaagttcccaaaagcaggttgagcatgtggttttcctttctgttttatcgttcattcgatgccgcgggcacagacagcggaaaaagccgaaaaatctgtatgaaccgctgggcatcgcaaaatcgctgcatgacggcagatgcaaggcagagggctgcaacactccttggtggaatgcaaagcccgataacgcggcagatgccgccttgcagttagacttttgtggctttgttttcttatgtcattcgcacttttgcagccggaattttgtgcctttgtttttatgagaccgcattggaaatggtatccgccagtttcttggctccgtccagcagggcgaagcggatctcatatccgccgaacaccaaggcgttttcggcgtcgtcctcgtaccgggcgccgctgctgccgatgcacaattccggatacaacacgcaaaaccagttgtggccttccgccttgcccagctcgatgcgcagggcggtgtaggtcccgccgggcagacggaaactgccgtaatccctggcggcgaactcggcctgttccagccggactgcgacggtctgggcgctgccctcccggcgcagggtgtcctccgctgtcttttgcaggcggcgctgggcggttcggactgccgccacggcgtccgccttgtccgttgccccggacaggatgtcgggcatttcggccaggacggcgtcccggactttcagtttgagcagctgatcctcaatggtatcgctgttggcaaggatatgcaggcgcagggtgtctgcacagacggcggcggatacctgctggcgatgccagagcatcgcggtaagtacaacagtcaaaaccagccccagagccacgccgatctcaacggcggcacggcggacgggcaggtgaaaagctggatgtttcataaaaccctcccggtcgaaacctgttctgccgccgggttttggcggcaaagagagtatggtctcgacccggagggtctatacacgggatcaaatcagtttttggtcttgagcggacggctgtagatcacacgcgcaccgcccaggtcaggctttgccagatacacctttttatactgtttctggagctcggcacgggcggcgcgggccttggcctcgtcgtcaaaaacgccgaacaccgctgcccccgacccggtcatgaggctggtgcaggccccggcctcatccagaagcgcccggatggcaggggtctcctcggcgccgctgcaatgttccagcgcattgcccgccgcacggcagacggccatcaggtcgcctgcgcggatggcgtcctcttgggcctggcagtcgggatgaacggggctgcccatggtgtcgtaccgctggaaagcctccggcgtagagacgcccaccgacggcatgaccaccacgaaccagcagggcgggcagggcggcagagccttgatgaagtcccccactccctgcacgcggcaggtaccgcccataagtgcaaagggtacatcggcgccgatggtggcgcccagggcgcagagctcactcatggaaagatgggcgccgtacagctcgttcatgcccaccagcacaccggcggcatcggcactgcccccggccatgccggcccgcaccgggaccgtcttgcggatggtgatgtccaccccggccagcagccccgtatagtggaagaatgccatagctgccttgaccgcggtgtttttgtcgttgaccggcacaaagctgccgggcatgcggacattcagggtatcgctgcggcgcagggtcagctgttcccgcagggtgatggcctgcatgaccatatcaaggtcgtggtacccgttgggcaacaggcccacaacgtcaagggaaaggttcagcttggcgggtgcgatgaccgttacgctctgtttctgcatcggtggttcctccccaaaggctggttcactgtttgagccagccgtgttctttcaaaaatgcgcgcatccgcttgatggcggtctcgaggtattccacgctgtaagcgtagctgatgcgggcgtagccttcccccgacgcgccaaaagcgtcgcccgggacgatggcaacatgcttttcctgcaaaagcagctcacagaaagcgctgctgctcagcccggacacctgcacgctgggaaacacatagaacgcgcccagcggcgtaaagcagtccatacccatttcattcagggccttgaccagaaaacggcggcggcggttgtactcgtcccgcattttctcgatctggtcgtcgcactggcgcagggcggtgatggcggcgtactgactggtggtaggagccgacatgatgcagctctggtggatcttggtcatgaccttgatgatgggcgcggggcctaccgcatagcccagccgccagccggtcatggcataggatttggagaagccgttgaccacgatggtgtgctcccgcataccgggcagcgaggcaatgctgacatggcgctcggggccgtaggtcagctcggaatagatctcatccgaaagcaccagaacattggtgccgcgcaaaacctcggcgatggcttccaggtcggcgcgctccataacgccgccggtagggttattgggatacggcaggatcagcagctttgttttgggggtgatggccgcccgcagctgctccgccttgaggcggaagccgtcctccggccgggtggcgatatgcaccgggacgccgcccgtcagttcggtgatgggctcatagcagacaaagcagggctcggggatgatgacctcatcccccggctgcaccagcgcacggatggccatgtcaatggcctcgctgccgcccaccgtgacgaggacttcgtcctcggggtgatagtgcagatcaaagcggcggtcgagatacttgcagatctcgtcccgcagttccttcatgcccgcgttggcggtgtagcgggtgcgcccctgctgcaaggtgcggatggccgcgtcgcgcacgctccagggcgtcttgaagtccggctcgcccacgcccagagagatgcactcgggcatatcggccgcaaggtcaaaaaatttccgtatcccggacgggcgcatggccttggcccggggggaaatcaaagattcataatccatcacagcacggtacactctctttcatcgatctcatcgtcctggaacaggacgccgccgcgcttgtacgggcgcagcacaaagctggtggccgtggacagaacgtcgtccagcggggagagccgcatggccacaaacagggcgatctgctggaagctgtggcccttgatggtgacaagcaggtcgtagccgccgctcatgagcataacgccgtcgacctcctcaaaggccgcgatggtggaggcgatctcctcaaagccgcggtccttgcggggagacacgtgcagttcgatcacggcttccacctgattgacaccggctctttcccagtccaccagcgcctgataaccgcggatgtatcccttttccttggcttcgtccatcagggcggcggcctcggcggcggggacgtccatcatcgcagcgatatcctccagcggaaggcgtgcgtttttctccagaatatgcagcaattcttccatcttttccataactcgctcctttcccgccccggaccgcaatgccggcagggcgcgtgccaaaacagatttttctgtcattatagcatatcggcccggggtttgcatccctttttcctgtgcagttggcgctttgacactataaattcctgcacagcggtatccaaacggagagaaatctgttataatggcagtgttcgcaatacccaatatatctgggatgggggatatttattatgaaagcagtcatcaccgtcatcggccacgatactgtcggcgttgtcgccaaagtcggcaccgtgtgcgccgatctgaacatcaatattgaggatgtgacccagagcatcatgcaggaaatgttctgcatgatcatgctggtggacctgaccaaggcaaacgttccgcaggacgccgtccgcgcccgttttgacgagctgggcaaggaaatgaaaatgcaggtcacactgacgcgtcaggaagtctttgacgccatgcacaaaatctgacggaggggtttgcaaacatgcggatactgaacagcggcgatattatggaaaccatcgagatgctgacgagcgagaacctcgacgtccgcaccgtcacgatgggcatcagcctgctcgactgcattgaccccgacggcaaggcagcctgcgaaaaaatctacaacaagatcgtttcccgcgccaggaacctggttcccgtggtcgacgccatcagcgccgagtacggcattcccattgtcaacaagcgcatcagcgtgacgcccatctccatgcttctgggcgctgcccccgatgccgatcccgtggcctacgccaaagctctggatgccgccgccaagacggtgggcgtcaacttcatcggcggtttcggcgcgctggtacacaagggcttttcggcaggcgacaagcgcctgatcgaaagcattccccgcgctctggccgagaccgagatcgtctgctccagcatcaacgtaggctccaccaagtccggcatcaacatggacgcggtgcgcatgatgggccaggtggtccgcaagactgccgagctgacccaggacaacatgtgcatgggcgatgccaagctggtggtcttctgcaatgcgccggaggacaaccccttcatggcgggtgccttccacggccccggcgagcccgactgcgagatccacgtgggtgtttccggccccggcgccgtgcgtgccgccctggccaagctgcccaaggacgcccccatggatgaggtggcggaactggtcaagcgcaccgccttcaagattacccgtctgggccagctggtggccaacctggccagcgagcggctgggcgtaccggcgggcatcatcgacctgtccctggctcccaccccggccatcggtgacagtgtggcaaacattctggaagagatgggtctggaaagctgcggctgctgcggcaccaccgcctgcctggccctgctcaacgacgccgtcaaaaagggcggcgtgatggcctccaaccacgtgggcggcctgtccggcgcattcatcccggtatccgaggacgacggcatgatcaaggccgccgagtgcggcagcctgaccctggaaaagctggaagccatgaccgccgtctgctcggtgggcatcgacatggtggtcattcccggcgatacttccgccgaggtcatcagcgccctgatcgccgacgaggccgccatcggcatggtcaacagcaagaccaccgccgtgcgcgttatcccggccatcggccacgaagccggggacatcctggactttggcggactgctgggacacgcgcccatcatgcccatttccaagttcaagcccgacgtcatgatccaccgcggcggccgcatccccgcccccatgcaggcactgaagaactgatcttccctgccctgaaaccataaagtgtgcataaacatcctcctgcccggcaatactgccagtggaaaggaggatgtttttcatgtccttatttcagaagatcctgctcctgctcgtcattatcggcgggctgaactggggcatctacggcatctgggcgttcgacgcggtgggctggctgttcggcggcagtctgggctggctggcccgcgcggtgttcatcctggtgggcctggcggcgatcgcattgatccccacgctgttcatgtccaagccgcccgagcatcacgagcccggcgctccgtgaccctttggcgggcatcaggagcgcccgccacgccggtgccttttgtaccggcgcactacttatcccctgcccattcctttttataaaaaggccccggaatccgaaaagtctggattccggggctttgctgttttgtttatctgtacaggcgaaaatcattccgccttgggggcactgagggcgaaggtcagctcggcctgggcggccagcttgccgtccacaaaggcgcgggccataccatagcccaccgggcctacccggcgcacgatctcacagcggagttccagcacatcgccgggagtgacctgatatttgaagcgggcgttcttgaccccgccgaagaaggccagcttgccgcggttttccggctggcaaagcagcgccaccgcccccacctgggccatggcctccaggatcagcacaccgggcatgaccttgtactcggggaaatggccgcagaaaaaggcctcgttgccgctgacgcacttgcggcccactgcccactggcccggctccatatccaggatgcggtccaccagggcaaagggatagcggtgaggcaaaattttggcgatctcgtcgcaggtcagggtgttggcgttctcccgcgggagggcgggaatggagctttcaaagttcatgttcagtcctcccatttgcgcagaacgatacaggcattatggccgccgaagcccaggctgttgctcatggcgcagcgcaggggcatctcccggccggtattgggcacgtagtccaggtcgcactcggggtcgggctgctcatagtggatggttgcagggacaaaaccgtcgtgcagcgccatgacagtgaggacggcctccacgccgcccgcgccgcccagcaggtggccggtcatggacttggtgctggaaacgcacagtttatacgcccagtcgccgaaagccgtcttgatggcggcagtctcgcaggagtcgttcatgtgggtggaggtaccgtgggcgttgatgtagtccacgtcctccggctggacgcccgcatcctgaagggccagcgtcatgcaggctgcgccgcctgcgccctggggtgccggggcagtgatgtggtaagcgtcacagttggcgccgtagccaatcatctcggcgtagattttggcgccgcgggccttggcgtgctccagttcctccaggaccaggacaccgccgccctcgcccatgacgaagccggaacggcgggcatcaaagggaacgctggcgcaggcggggtcctcggcattgcagagggctttcatgctggaaaagccgccgatgcccagctcactgatgcagctctcggcgccgccgcagagcatgacatcctcgtagccgtcgcggatgcggtggaacgcgtcgcccaccgcgttggtacctccggcgcaggcagtgaccgggcaggtgcacatgcccttgaagccggtgcggatggcgatctgcgccgccgccatgttggcgatgctcatgggaacaaagaaggggctgacccgctcaaagcctttttgcaggccgcgggagtgttcctcctcgatgacgggcaggccgccgatgccgctggaaacgataatgccgcagcgggaggcctccggggaatcggggtcaacggagaagccgctgtccgccagagcttccgccgcggcgtacactgcgaactgggtgaagcgggccatctttttggcgtcccggcgctcaatgaccggctgggggtcaaagtccttgacctcacccgccagatgcaccttgtagccgctggcgtcaaaaagagtgatggggccgatgccgcaggtccctgccttagcggcagcccaggtctcggcagtgttgtgtccgatggggttcaccgtgccaaggccggtgaccacgactctgcgtttatccataactgtactccttatcacgttctgccgggtcagacggccataccgccgtcgacgcaaagcacctgtccggtaatataggaactgccttccgcagcgaagaattccaccgcccgggcgatctcatccgggtcggccatccggcccgccgggatggttgccagcgccgcggtgcgggcggcttccggcatggcgtcggtcatctcggtgcctacaaagccgggagccaccgcgttgaccgtgatattgcgggaagccagttccttggccaggctcttggtcaagccgatcaggcccgccttgctggccgcgtagttgacctggcccgcgttgccccgcaggcccacaatgctggtcatgttgacgatgcggccatagcgctggtgcatcatcatgcgggaggctgccttgcagcagaacaccgcgcctttcaggttggtgttaagcactgcgtcgtagtcggcttcgctcatgcgcagcagcaggccgtcccgggtgatgccggcgttattgaccagcacatccacccggccgaactgctttttgacggcgtcgaacagatctgcgcatccctgggcgttagaaacgtccgcctgcacggtcaggacggttgcaccggcttcccggcagaggtttgccgtctcctcggcggcctgggcattgcccgcatagttgaggcagagatcatagcccgccttggccagccgcacgcagacggcccggccgatgccgcggctgccgccggtgacgacggcaacgcggcggtcggggatcattgcttccttcatgttcaggcctcccctttcagttcggccaccgcggcggccagttcctgctcggtctccaccggcaggcagcgcaccgaggtgcccagcgtctttttcacgaagccggacagagcacggccggggccgatctccacaatggtatccacacccagttcacccagacggcggatggtgtcctccatgtaaacgctgctctggacctggcgttccagcagggcggggatggtatcctcctcccctttttcccggcccaggcagttgaagagaacagggatctgcatctcgccgaaggtaacggtctggaatttctcccggagggcatctcccgccgggtgcatcaggctggtgtggaagggtccgctgaccttaagaggcaggcagcgcttggcccccgccgctttggccagttccgacgcacggtccacggcagctttctcgccccctatgaccagctggccggggcagttgtaattgcagatctgcaccgtaccaagggcggaggcctcgtcgcagcaggcctgcagtttgtcccggtcaagggccaggacagcggtcatgccgcagtcgatgccctccgctgctttggccatggccttgccccggaaagctgccagttccacggcggtggcagcgtcaaaaacgcccgccgcctgcagggcggaatactcgcccagagaaaggcctgccacatactcgggccggatgcccgccgcgtacagggctgcggtgacgcccgccgcaaaggcgaccatgcagggctgggtatactgggtctggttgatgacaccctcggggtcgtcaaagcagacggacttcagattgaagtccagcttggcggcgtcgaaggccgcgcggaagtcggcgttgttctcgtaaaggtcacggcccatgccggcgtgctggctgccctggcccgcgtacagaaatgcgagtttcatggtagtttcctcccttgtctcaggccttggtcagatcctgcatctgggcgatgcgctgctgcgctccggtccagagttcttccaggatctctgccgccgggcggatatcgtgtagcatgccgctgacctggcccgccatcaggctgccggtgtcggtatcgccctcaaagacggcgcggcgcaggctgcccagcgtaaactgttccagttccatcttgtcggcccccgccttttcccggcgcacatactcccggctcatgcggtttttcagcacgcggaccggagtgccgccgatgcggccggtgacgatggtatcgctgtccttggccttgagcagggcggccttgtagttttcgtggatggggcattcggcgctggtcagcaggcaggtacccacctgaacgccgcaggcgcccagggccagggccgccgccatctgacggccgtccgcgatgccgcccgccgcaatgacaggcaggtccaccgcgtccaccacctggggaaccagagccatggtggtcatctcgcccacatggccgccgctctcggtgccttcggcaatgatggcatccacgccagacttggccaggtgctttgccagcaccgccgctgccaccacggggatgatgatgatgcccgcttccttccacttggcaacatacttgccggggttgcccgcgccggtagtgaccacggggacatgctcctccgccaccacctgggcaaactcgtcggcgcaggggtgcatgagcatgatgttgacgccgaagggtttgtcggtcagttcccggcagcggcggatgtggccccgcagctcgtcggcgctgcggacgccgcccgccccgatgatgcccagggcgcctgcgttggagcaggccgcggcgaactcgccggtggcaatgttggccatgccgccctgaatgatgggatacttggttccgaggatctcattgagcagtttcattcgtcttcccccatggatacggtcagcagcactccggcccaggtcaggcctccgccgaaaccgatgcacaaaaccgtctgaccgtttttcagcagcccggcctcgcgcatatcgcgcagggccatgggaatgctggcagcactggtgttgccgtaacggtcaatatttttatagaacttttcgggcggtgcccccagctttttgacgcagtgatcgatgatccgggcgtttgcctggtggcagaccacccagtccacctcgtccagcgtcttgcccgcctttgccagcgtttcatgcaggcagtgcgggatggcttccaccgcaaagcggaacactgcccggccatccatgccgatcttgctagtctcgggaccggggccctgggccacaatggccttgctgccccgggcacccaggcaggacgccagcggcttgcccgtttctttacggtagaccgccgcgcctgcgccgtcaccgaacagcacgcaggtgctgcggtcggtcatgtccagcaggcgggagagctgttcacagccaatgaccagcgcatagtcgccgccgcagttttccaaaagtcctgccgccgtgacggttccatagagaaaaccggagcaggctgcgttgacatccagaaccgggatgtcctccggcaggcccagttccgcctgcaccatgcaggccacgctgggcgtggcgtagtctcccgatacggtggcgcagatgcagcaggcaatttgctccggggcaatgcctgcgtcctgcatggcttggcgggccgctgcaacggccagggtgacggtgctctccctttccccgcagaaatagcggttgcggatgcccgtgcgctccgaaatccaggcgtcgctggtatccaccgtcaggctcagttcatcgttggtcacgcagcgttcgggcagcgcccgcccggtgccgatcagttgtaatcctgtcatggctcctcctctgcggaccgggttcagacctggcccatctgacggaattttttataccgctggttggtcagtgcgttgccgctcatcttgcaaagcgacgccagatttttgtccagcgccacatccaggcaggcaaacagccgcttgggatcggtctgggcgccgcccatgggttcggggatgacttcgtcgatgacaccgaatcccagcagatcctgcgcggtcagcttcatgacgtcacaggcctcggcatggcgggtggcgtccttccacaaaatgctggcaaacccctcggggctgagcacgctgtaaatggcgttctccagcataaggacacggttggcaacgcccagcgccagtgcgccgccgctgctgccctcgccggtgacgacggcaatgaccgggacggtgagctggctcatctcggccaggttgcgggcgatggcttcgccctggccgcgcatctcggcctccatgcccgggtaggcgcccggtgtatcaataaaagtgatgatgggccggccgaatttctcggcctgcttcatcaggcgaagagccttacgatagccctcgggcccaggcatgccgaaattatacttcatgttctcctcaagggagctccccttgcggtggccgatgacggtcaccgggcggcctttgtacagggcaatgccgcccaggatgctttcgtcctctttgcactgacggtcgccgcgctggacgaaaaagtcggtgaagagagcgtcgatgtaatcgtcgatcttgggacgatggggatggcgggccagaaaaaccttgtcctccgcatggagggcggtgcagctttccagcagttcggcgcggtcacgctcgatctgctttcggcgcagttccgcctggggcgtgtcaacaccgtccagcgtcgccagttcctgttccagcgcatcggtcatgcgcaagatatctttaatcaagctcggcgtccccctttggtatgcaggcgcagcaagcgcgccagagtggctttcatttcgctgcgcggcacaatgtcgtccacgaagccgtgttcctcctggaactcgctgcgctggaaaccggcgggcagcttctgaccgatggtctgttcaatgactcgaggccccgcaaacccgatcaatgcgccgggttccgccagcatgatgtctcccaggctggcaaagctggcggtaacaccgccggtggtgggatgggtcagataactgatgaacagcccgcccctggcggagaattccgcaatggcggagctggtcttagccatctgcatcaggctgaaaatgccctcctgcatccgggcgccgccgctggcggaaaagatgataagaggcagttttttggcctgggcatattccacggcgcgggtgatcttttctcccacggcagtacccatgctgcccataaagaaccggctgtccagcaccgccacgaccacctgaataccgtcgatcttgcccgttgcggtaatggccgcatcggccaacccggtcttacggctctggacggccagtttctcggtataaccggggaagttcagcacgtccttggcgtggagtttttcatccagttcccggaaggagccgtggtccagaatcagcgacagacggtagtaaccgccgatgggctgatagtgaccgcagttggggcagacgtacagcgtttccgcccagatcttacgggtggcgcggcgtttgcagttggggcaggtcacaaaggtgggttcctgccagaccggggcaagttcgccgctttcgggcgcggccttgcggaccagtgctccctggcgccctgccccgccgattttatctaaaacgtttggcatgtcggatctcctcgttctctttcccggcagcacgccggacaaacccatgagatgttatttgcgcagcgaattactctgcgtgggcctgcaggtaatcaaaaatgtccttgacggttttcatgttgcccagctcctcatcggggatggcaacgccgcaggcctcttccagggccatgttcagttcaacagcatccaggctatcggcgcccaggtcgtcggccagagaggcttccatggtgattttggcttcgtcacagctgaaggtgtcggcaatgatctgtttgagagtttcgaattccatgatatatgtctcctttgtttgaaaatctgtgttaaatttatttacctaaatttatttaggtaaatattatgaacttatattagcagagttttctataatgtcaagcatatttttttgctttcgctcttccaaccaaaacatttgtccgattgcaacaaacaaacaggcgcttttgcacaaaacgcaaaaaggcctgactccacatcaaagcaatggagtcaggccttttaacctggatatacattgattttgtttaatcccacattgtgaacggcatgaaaacacacagcccgtcgcagtttttccctcaatcggaaagaccaagctgtgcgtaagcatttacagatccgctgaaagagcagctttcattgctctacttttttcgaattataacgcatcattttattcgttatctctcaatacctctcactaaaataatcagatccgtacacgcgttatccccttttaggcacacagatttgcttccacactgtatccacattattatatttcaccaatgtcaaatcgatacagcagtacattgcgcattccttccgcatatagctcgttatcctccggaacagtctccattccgatgaagcgtccacctgctatttcacaggtccgcgaggatgcaagattatccggggcacaagtaatgatcagatacttcatcccatgttttcgtgcctgacgaaacagcaatcgacaggcttttgccgcataacgatttccccggtatgctgcatcaatgctgtacccgacatttccgcctatataagttttgtcgttatgaccgacccgcagatcgcagcgtccaataaccgttccatctgacaaacagatttcaaaataataggcaggaagccatcttttttctggctgcgccggactgttttttgtaaggcgcaagaaaatctcgtctgtctttaagtcgctcgtatcgaaaaacataagacctcattcctttataagatagcgcggatggcatagtttttctttgcttcacttacaatgtcccaaggggggtggatttattttaacaaacatcaaagcggctttcgcttccccgcggtttcgtgttgccatactatttttcgatataaacaacaaatccgaacccatcaccttacggtgaaaagttcggatttgtcttttttggtgacccgtgcgggaatcgaacccacgttaacggcgtgagaggccgctgtcttaaccgcttgaccaacgggccatataaaagagaagccggcatctacctattttcacaggtcgtttccaaccaactatcgtcggcacaagtgagcttaacttctgtgttcggaatgggaacaggtgggacctcaccgtcatcgacaccggccggtatacaatctttcgatcgcatattctctttttagaaggcatgtgccctcaaaactgaataagaactgcatctggcaaatgaagcactagagaagattgggtcaagccctcgacctattagtacacgctagctgaacggatcgctccgcttacactttgtgcctatcaaccttgtagtcttcaaggggtcttacctgattgactcagtgggatatcttatctcagggccggcttcacgcttagatgctttcagcgtttatccgatccgcacatagctgcccagctgtgccactggcgtgacaactggtgcaccagaggtgcgtccatcccggtcctctcgntcgacaccggccggtatacaatctttcgatcgcatattctctttttagaaggcatgtgccctcaaaactgaataagaactgcatctggcaaatgaagcactagagaagattgggtcaagccctcgacctattagtacacgctagctgaatggatcactccacttacactttgtgcctatcaaccttgtagtcttcaaggggtcttacctgattgactcagtgggatatcttatctcagggccggcttcacgcttagatgctttcagcgtttatccgatccgcacatagctgcccagctgtgccactggcgtgacaactggtgcaccagaggtgcgtccatcccggtcctctcgncttacactttgtgcctatcaaccttgtagtcttcaaggggtcttacctgattgactcagtgggatatcttatctcagggccggcttcacgcttagatgctttcagcgtttatccgatccgcacatagctgcccagctgtgccactggcgtgacaactggtgcaccagaggtgcgtccatcccggtcctctcgtactagggacagcacccttcaaatatcctgcgcccacgacagatagggaccgaactgtctcacgacgttctgaacccagctcgcgtaccgctttaattggcgaacagccaaacccttgggaccgaatacagccccaggatgcgatgagccgacatcgaggtgccaaacctccccgtcgatgtggactcttgggggagatcagcctgttatccccagggtaacttttatccgttgagcgatggcatttccactcacataccaccggatcactaactccgactttcgtctctgctcgacccgtcagtctcgcagtcaggctggcttttgcgtttgcactctatcgtctggtttccgtccagaccgagccaacctttgaacgcctccgctactctttaggaggcgaccgccccagtcaaactgcccacctaacaatgtcccccgccctgattcaagggcgcaggttagaattccaatgtcgcaaggatggtatcccaacgtccactccacaaaggccaaagcccttgcttcccagtgtcccatctatcctgtgcatgcaacaccgaaacccaatattaggctacagtaaagctccatggggtctttccgtcttgtcgcgggtaaccggcatcttcaccggtactacaatttcgccgggcgggctgttgagacagtgcccagatcattacgcctttcatgcgggtcagaacttacctgacaaggaatttcgctaccttaggaccgttatagttacggccgccgttcactggggcttcaattcaatgcttgcacatctccttttaaccttccagcaccgggcaggcgtcagctcgtatacgtcatctttcgatttagcacaaacctgtgtttttggtaaacagttgcctgggcctattctctgcggctcactctcgtgagcaccccttattccgaagttacggggtcaacttgccgagttccttaacaacccttctcccgttggccttagaatcttcttcctacctacctgtgtcggtttgcggtacgggcaccttagatatacacgcagcttttctcgcctctattccagccagacttcggtactatatttccctcgatcactaccggaaccaacacccggctctgaccttcataaagtgtccctgcgcttaaatctttcggtggggacggaatctctaccgtctgtgcatcggctacgcctttcggcctcaccttagctcccgcctaacttggagcggacgaaccttcctccaaaaacctgaggctttcggccatgaggattctcacctcattcgcgctactcattccggcattctcacttgtatgaactccacgaccgcttacgctatcgtttcaccgcgcatacaacgctcccctacccaacatcctaa
